United States Patent Application Publication US 2007/0054278 A1 - sequence listing, part 90

SEQ ID NO: 96930 - DNA, 77330 bp, Homo sapiens
  misc_feature (1)...(77330): n = A,T,C or G
tggcctaatttttgtatttttagtagagacggggtttcaccatgttggccaggctggtctcgaactcttgacctcaggtgatccacccgcctcagcctcccaaagtgctgggattacaggtgtgagccaccgagcctggccacacacagcacccgtttctttgggcccctgccccgcagcggctgagtggttcaccctccacctctctgtgggtgggtcctcctgaccacaggtgcccagccaatggtgggtcccgggggcagaggccgtcaggtcatccatggccatggtgacagtcacactgacctgatattggagccagggcatatgaggtagggccctgctccccttcccccaggcctctgccttttgtggggaccaggatcactcctggggcatctgccctgcggaggcagctttggctacagagctatgtggaccactccaaataggaagcgtgttgcaacatagttggatgacacacctgcccgacaggtgtgagggggagaggaggaaggacctatctaggggcacatcagtgctaagggggctgccagatgtggaggccggggaggccccagcccaaagtgacaccaacagctgggatggcccaggaagcccctggcagggtgtgtctctcaggaaggtggcagaacctccatgccaggccccaggccaccgtggggcgatgtggctgccatcagccgtgaccatcaccctgctggacacacactgcccagtggtcagttccacccctcagggcctcagccgtgatgcccgtctccttcagtgggttaacttacacagaccgttccacgggaccataactgttacatccctgtagacattcctgaacatgcaaagaagaaaatggaacttcatgcttctgcttccactaataacacgtggactgttttgagtcttcttgccctttttttttttttgagatagagtctcgctctgtcgcccaggctggagtgctgtggcgcgatctcagctcactgcaacgtccgcctcccgggttcaagcgattctcctgcctcagtgtcccaagtagctgggattacgggcatgcgccaccacgcctggctaattttgtatttttagtagagatggggtttctccatgttggtcaggctggtctcgaactcccagcctcaggcgatctgcctgccttgacctcccaaagtgctgggattacaggcgtgagccaccacgcctggcccagtgtcaggtctttctctcacccagactggagtggagtggcaccatctcagctcactgcagccttgaccactcgggctcaagccatcctcttgtctccgtgtacctgggaccacaggtgcacgccaccatgcctggctaattaaaaacaatgcttctatagggaaagggtcttgcattgttgcccaggctaatcttaaaccgctgacttcaagtgatcctcccgcctcagcctcccaaagtgctgggattacaggtgtgagccactgcgccccgcccacattttctattttcaggaaaagtggtgccctgtgtgcgtggcctggcggcatgtctctggggtgttgtagctccttgttctctgtcgggcttgggatgggggcacaggcagcatctggcctctcctgtgggctcagaactgatggaaaaagaaggctcagggatgagagctggggctcgccttacagcctggaaggcggtggagggtggtgggggctctgcctgcgatggaaagtgcagtcctccctcgcctgaacgggatggtccaaggcctccctccccctcgaggggcctccctcccctccagcggcctcccctgcctgcccactcccacctctcacacctatggactgagcggagggggcagagaaggggcagactggaagaggctgaacccaaggcttccctcagcctccagaaccctggatcagaaccgtccgtcctcttcccccgctccccttacactgatgcagggtcggtggctgcacagtgtccatctctgcagctggctgtctccatcacacatcgtacagcggcaaacactccccagctaatgtccttggggtgtcttccagggtttcctttgggtcattttttataagtggtcttcctcagttaaatggataaacacacttaaggcatcaaaactcactttattattttcttaatttttatttcttggagacacggtcttactctgttgcccaggctgacgtgtagtggctcaatcacagctcactaaagcctccaaccgctgggttcaagtgatccacctgcctcgcgctcccgagtagctgagaccataggtgcgcaacaccacgcccagctagtttttaaaaattgtttagtagagacaaggtctcactatgttgcccagactggtcttgaactcctaagcttaagtgatcctctggccttggcctcccgaactgctaggactacgggtgtgagccaccgtgcctggccttttctttatttttatttttttgagacagagtctcgctctgtcacccaggctggagtgcaatggggcgatctcagctcactgcaacctctgcctcccaggttcaagcaattatcctgcctcagcctcctgagtagctgggactacaggtgtgcgccaccacgcctggctaatttttctatttttagtagagatggggtttcaccatgttggtcaggctggtctcgaactccttacttcgtgatccacctgcatcggcctcccaaagtgctgggattacaggcgtgagccaccgctccgggccagccactttattttcaaggtattccttttaggctgggcatggtggcttgggcccgtaatcccagcacttcgggaggccaacgcaggtggatcccttgagctcaggagttagagaccggcctgggcaacatgatgaaaccctgtctctagcaaaaatacaaacaattagtggggtgtggtggcacacgcctgtaatcccagttactcgggaggctgaggtgggaagatcacttgagcatggtaggtggaggctgcagtgagccaaaatcacgccactgggctccagcctgggcaacagaatgaaactccgtctccaaaaaccaacaaacaaaaaaacataccttttatgtctacattgaagaaaataattccatgtctgctcttaagtgtctcatttggtgcctagaaacaaaacctgattaaatgtcatctacggtcaatcaaataaaagccttcgtggcaaactcacgctcgaagcaaagggcgtttgcctcttcaaggagctctgtgaggaagggaggtggctgaacctcaccctgcacaccacaggcccccgcgcgcctccctgcccctcctcagggccttcctctacctctcttctgcctggcctgcctctggtctcctcctacccccactaggctcagagaatctcccctccacacccacaccacaacctactttagaagggctgctgcatttcctccaggctttctgacccccttcctgtccctgcagggcaggggccccgaggagctggaggcccaagggccttgttctggtcccagggcctggggacacctgccaccgagggccaagaggaggatggacgtggacacagccccgagagcctggcccggacacagcagcagctctgcagaaccaaggcaagcattggggaccttgttgggagtcggggggcagcccaggggccagtgtctgaggtcctgctgtctgtctggccacccaggactccctcatccctggaaactgtgctttaccatggaggccacccactctgtctcctctaaggttctgaggctgaatgggctagggggcttgcggggaggccccagtgtccagcactgtgggacctggcagggtgcctgcggccaggacccagcggggccaggtgttggtctaacagtgcagcttcgttcatatccccagcccctgcccacctgctctgagcacggtgatggccctgggaggtgggcctgggcccttggcaggctggggacagcctagtggcccttgtcccatgctaccccctttcccacacagcgatgctggcatcagacaccatgctgagtgctggcaggggcgagggctgggaggcttccacacatggttccccatgcagtcccacctgtgggcatctggttgggggtaggctggaagctcggggagcctggagctgggacttctgtgcttgcctgggagctctgaagggtgaggctgggcatccagggtgacacagcccagggaaagacatgggggtgacgtgagaggtgcctggagggagctggcaggtatggacatgatggacacggaagcacggaggcgggcaagtggccagacgcatctaggggaaggtgtgggggaggcgcccttaggaagggccctgaagggctgtgggcagcagggagccctgggaggcctaaagcagagggcagatagatgagggctgttgtctcaggtgtggggcggacgaggtggggagccctcacccaacaggaggcgagctggtcctgtgtggcctgaactgcagctgtctcctctgtgaaacgggggtatagctgaccccagggggctgcctggagcatcccgggaggtgccaggcccaatagtgctctgggaaggacagggccctgggctgttgtgggaggcggcagatcctggtactcacatcctcctccttggggagggcctgatggttggctgaggcctgggtggagagcagagggttggttctgacagggttgggctggccagagctggtgctggggctgctgctgggggcccgtgcctctctgccgtggggtgcctggggctgtgacctcatgctctgtggcctgcagggcaagtgacacggatctgggcagccagggtggcaggatcggactggaccccttggcagggccgctgtggagacagcccaggggaaggggtgcaggggtctggacactccaatggccttgctctcgggctggcctgggcagcggagggaaggagaacccttctctgatactagatggtgcctgggagaaatcaaggcagagggtcctagccggtgggctctttggaggttgtggctcctgtccgggtgagagccaccatatattggggcctaacgtgttccctggcgctgtgagtccaggctgccttgggactcaggagggtggagcccaccccaccttccaagggccctggccatccctgcctgccgaccaccccactcctgggagcctgcttccctcacggcggcgggcaggccgtggcggtccccacgagggcctcctctccagggccggctgggcagggagccccgaggcctgcagccccctgactgccctccgatgtactggcggcagaaaagggctgcgccccacgtgcgcccttcggggcgcgcagtccgcccagtgctccccacggccgcggccattccaaggacctgcaacgccgcctctcccactccgctctctgggaagccaaagcctcccgggctccgcttccgcaccgcccctcgggaagacggcgcgaccgcgcccccggcacgccccgcccccggcaggcactgaccacgccctctcccgcccatgcagagaccccgccccatgtttctcacctcgtcttctcgcttccggccccgccccgcgccggaggccccgccccacgctctttacctcttctgctcgaggcgggccccgccttactccctggtccccgccccacgcccgaggccccgccccgagctcttcacctcgtcttctcgcttccggccccgcccacgccccggccccgccccgcgctcctcacctgtcccctcgctgtcggccccgccccacgctcctcactttatcctcgcgctttcagccccgccccgcgcctgaagccccgccccacaccctttacctcgtccccgcgctgccggccccgccccgtgttgaggccccgccccgcgctctcacctcgtccccgcgccccggccccgcccccgcacttccggacgccgccggcgggggcgctcgggcctgggcttcggcgctctggctcgggctctggctcgggaggcgatcgtggccgctgccgccgccagagccggccggagtcggcccggagccgcgtccacgcggagcgggcgggtgggagctggcggctgggcccctgcggcgcccccgcggcctgccccgcgtccgctccgggccgccgagccgcagccgccgagatgggggccgccccgggccgcgcccccgccgggtcccgcccgccgcgctgccgctgagcgcatgggccgggccgcgccgcgccgctccgggagccgggcccggggtcccgccaccaccgcgcgcgggtgagtagggccgggctccggggcgggctaggccgcggtaggccgggcgggcgggacccggaagcggcggggggcgcgggtggctgacgcgcgtgggaccgagggggtgggcgcgcggggagctggggccggggtgtccctgggcagcgggactggcggcgcggtggccgcttggaggtccgaggcctcgggcgcgtctcggggcacggagcagctgcaggggccgcgcatcgcgtgcgggggcccgggagagccgggcctggagccctccccgccgcccagaagtcggcgggagtccggctgtcccggaggaggacactcccgcccgccctcgccgaggccgcgtgccgggtccgggtcggggttcggcctgagtagccgcgtgctccggcgtccgtaccctccaggttgatgccttgctgcccaaacactggtctttctcttgggtgtggttcttagattctacccccgccccgcactttggaatttagcccccgtgaaaccagagctgcactgcccgagcagtgaaactttcagcttggcattgaagaaagtagagaaaaacatgtcagttctctggggatttttctcagcccatctrtaagatatatatatatwtwttttttgtagagatggggtgtcactatattgcccagcaggtgttgaattcttggcctcaagcgatccacctgcctcagccttccaaggtgttgggactacaggggtgaccaccgycctctaagataattttttttttttgagacggagtctcgcactgtagcccaggctggagtgcagtggcgctatcttggctcactgcaacctccgcctcccgggttcaagcagttttcctgcctcagccgcctgagtagctgggataacaggcatkcgccaccacatccggctaatttttgtatttttagtagagacagggtttcaccatgttgaccaggctggcctggaactcctgacctcaggtgatcygcccacyttggcctaccaaagtgttgggattacaggcgtgagccaccgcgcctggccccttctaagataatttataaagggttcttatgtgcatgtcagccccttgtttttgctcacacttctgttctctgcttcttcaggaagaatctcgagcttacttggatccacaggccctrttttggagaaaacacagtctaaaccggctacccgagatactcagcaatagctcggtttcagtttttttttttttttgagacagagttttgctcttgttgcccaggctggagtscaatggcgtgatctccgctcaccgcatcctccgcctcccaggttcaagcgattctcctgcctcagccttcccaagtagctgggattataggcatgcgccaccaagcctgactaattttgtatttttagtagagatggggtttctgtatgtgggtcaggatggtcttgaactcccgacctcaggtgatccgcccacctcggcctcccaaagtgctgggattacaggcgtgagccacctcacctggctttggtttcagttttaagatctccattcagggacaaggatgggaaagcatgaaaaacagactgtttttgtttgattttcagctggtgttgacttgtcttgggtttctagtttcagaaaagctaagcagactttttcggattacattggtcattgagaatttcagtgatgggggaataaattacatgtgaaatagtagccctgaaccttcaagagttaaatcaatggacagctgggaagatgtcagagtcgtgttgtgttacttgcctcctccatgtaaatcaaaatgtcaaaagttacgtttgggtaaaataaatacctacacacgtaggtagcattgagtttgctgccatgatgcctggagcatatgcctaagcrgtgacgaaagggaattttaaatacagtatcatacttgtaggcatcccgcccgttttatggactcactttattgatggtagctacaggctgtgggccagattcagtgcttgcaggcatttgatactgaactgagtaaacgtgactgctttatgtgtggtgtgtacttgtgtgtacactaaatgcttggtgtgcttccctgtgggaacccagagatttcaggaattgggacrtgtttcaacaacatcagtagcttgtagaggggttcatgtgcttccagggacaccaaaaagtcttctgtcagttgacagccaaaaatacacatgattgtaagaaaattttcttctgggctctgaaaatttggttcacacatgaattaaaacattagttttggggccaggcaaagtggcctgtaatcccaacactttgggaggccgaggcgggtggattgctttgagctcaggagtttgagaccagcctggccaacgtggtgaaacccaaaatacagtaattagccgggcgttgatgactcgtgcctgtagtccccgccacttgagaggctgaggctggagaattgcttgagcctgggaagctgaggctgcagtgagctgagatcgccccactgcagtccagcctaggcgacagagcgagaccctgtctcaaaataacaaaaaacaaaacaacaaaacccattagttttggaagaatttgctgctgttttctgtggtacagtagttcagcccctgtagagagccagtgtttggcgtctgtgacaaatgtcttttcttttttacatcagtgaatgacttactggtgcccgttagttgcaggaccttgtgctgggtgctgtgggtcccgctactaccaataattaacacagaagacttaagtcccttatgagagcatgatggtgacttgtggttagcctcccttctgagcactgtctgattaatcactttccactctccggtgacttggttcttcaagctagtgaatggtagtacatctatagtggtaaggctcaggtggtcagggtgcaggccttctttcctgtgatggcgtcccagacagatgaccgtgagctagtgtggaggtgcccacgcccagggtgctccctccatgctgatgtggctcacggagtgactgccgctgaagtggtctgtgagcagcaggatgtcacagctcactgggccttgacctttagaagctgtgtgttcctgctgaggccaagatgacatactacccagcagcgttcacaaaaagtccttagctgctgaaatgtcattgggggcacatagttgcaaaccatcctccatctatgggtgcttcttatttatttactaawtttattttattttattttattttatttttttgagacagagtctcactctgtcgcccaagctggagtgcagtggccggcrcggtgtcggctcactgcaagctctgcctcccgggttcatgccattctcccacgtcagtctcccgagtagctgggactgcaggtgcccaccaccatgcctggctaattttttgtatttttagtagagatggggtttcaccgtgttagccaggatggtctcgatctcttgacctcgtgatccgcccgccttggcttcccaaagtgctgggattacaggtgtgagccactgtgcccggcctattttttttttagagacaggatcttgctctgttgcccaggctggagtgcagtggggtgcgattatagctcactgcagccttgaactcctgggtcaagtgatcctcttgcctcagtcttccaagtagctgagactacaggcatacgctaccatacccggctaattaagaactgktttttggtagagattgggtctcactatgttgcccaggttagtcttgaactcttgggctcaagggatcctccagcctcagcctcctgagtagctgggactacaggtgcgtgacaccacgcctggctctgtggatccttcgtgcttccagccgtgagcagctgttggctggtaaagtgtgtgcaatgtgaggaagttggtgtgggggacagattccacatagacaagggacagcagtgtggagtggtggctgggggatagatcccccttcagttggtcctgggttttagggttttatttgtttgctgtgacttgttcagcactctaggcttttgaacccaacatgcttctctaaagccctctctccagccccttttagccaggaccacttacatcatggcaggctgttgtttcagtcacctgcatggccgggttgacaggcatagccagagctcctgggctcctgtaggacgtggcaggaaggaccatagaccrtggcaggggttctgttggagcccttatctactctcttttgcacaccccttgcaggcttgtagcagcagcagcagtagtagcagcaaattctatagttccctgatgtctaagagggtgggtggtttggttttcagcttaaggagtgaagtcacatgaactatagcttccttagctaaaaattgtatttgcatttccttttattctgtaccttctctgttccttgaagtacccatttactatttgctatctgaatcctcatcagagaggcttttcagagtcaagtgcagcattctgacagagcattttaagattgtctccagtgacggtgtccgagcgcctctgtgggcctgggtggtgtccttgatccctcggtcgatggggctgaaggtgacccatgattatctctctttgaggcgtgtgttgagagtcggaggaacaccctgcagtgtgttctcatgtgtcggaaggtgtaccacgcgtgacgtgatgcagcaggtagaaaacagtggccgtgggcctggaggacgtggggttcagaagacgcccaccaccttcggggctgtagcgcaccttcctttctctctgagtgttgctggggctggtggagcgattgtctccatcttacttgtgagggtccagccctcactcaggtttgtacacatagtcaggactagaggcagctttccttcctccggtcttcctgccttccctgtccctcagctctgcagctgaggtgggaggtgctcaagctgccagcctccgtgatgtttgtgcagtgagacttgtggggagtggcattcccatgtcctgggcatcccttcttagcatgagaggcattcctgtagttgtaaaagtttccagaaattgctttaaagtagaacwatgcttgtggccaaaatatatcttgattgaacatttaaactgagtttcttgctttgagtttgagcgggagggcgtcatcgtgagtcttgtcttgagaaaacctctggtcgtgtttcatggacccacctttcctaatccttgtcctcttaatggtttcaacaggacagattgattcactttggagctgtaagtactgatgtattagggtgcagcgctcattgttcmttgacgcagagtcccaaaatgaatatccaagagcagggtttccccttggacctcggagcaagtttcaccgaagatgctccccgacccccagtgcctggtgaggagggagaactggtgtccacagacccgaggcccgccagctacagtttctgctccgggaaaggtgttggcattaaaggtgagacttcgacggccactccgaggcgctcggatctggacctggggtatgagcctgagggyagtgcctcccccaccccaccatacttgaagtgggctgagtcactgcattccctgctggatgaccaagatgggataagcctgttcaggactttcctgaagcaggagggctgtgccgacttgctggacttctggtttgcctgcactggcttcaggaagctggagccctgtgactcgaacgaggagaagaggctgaagctggcgagagccatctaccgaaagtacattcttgataacaatggcatcgtgtcccggcagaccaagccagccaccaagagcttcataaagggctgcatcatgaagcagctgatcgatcctgccatgtttgaccaggcccagaccgaaatccaggccactatggaggaaaacacctatccctccttccttaagtctgatatttatttggaatatacgaggacaggctcggagagccccaaagtctgtagtgaccagagctctgggtcagggacagggaagggcatatctggatacctgccgaccttaaatgaagatgaggaatggaagtgtgaccaggacatggaygaggacgatggcagagacgctgctccccccggaagactccctcagaagctgctcctggagacagctgccccgagggtctcctccagtagacggtacagcgaaggcagagagttcaggtgagtccgacgccaggcgtccactttctgtactcacctccgagagctggagaacaagccagggaaaggtgctgatgaggcgggcgttaacccacwccggatgtcctgctgccgctggggttgaattttggttctgttcttatttgtgatacttttgcatttgtcattacttttttatatttgtaatgttgagaacacttttactgagaacagactaaaatatatgactttatgagtcattaggaacatcggaattcttagaagtcacaatgacatgtaaactttacccttcagcagtaaagtctgtcacctcttaaataggagctggatctacccagtagacatggtcctttccgcttaataaagggaggagtggacgtttcagggcatygataagaattggagaattggattcttgcttttttttttttttgagacggagtttcacttttgttgctcaggctggagtgcaatggtacaatctcagctcactgcaaccttcgcctcccgggtttgagcgattctcctgcctcagcctcctgagtagctgggattacaggcatgtgccaccacgcccggctaattttgcattattagtagaggtggggtttctccatgttggccaggctggtctcgaactcccgacctcaggtgatctgcctgcctcggcctcccaaagtgttgggattacaggcgtgagccgccgcatccggccagattattgcttttataatgatcttctaagcttcttyctacaggctgagaaatagcaggggggacgttttacgtgtggggaatggtcagagtactttgaaaacttcctgtggctatagtgggcattccaggattgggccttttttcctgccaacaaaatctgttggtgctgttgtgtagtccacagcagcctggaccctgaggcgatcctggcagggcctgtggggtgcgtgtgttgcctgggagggagcagagtggtgctcagccttggaacctgtttcttcgttcttccttccctgtgatccctgcgtggttcctggaggtttatttggctttcgggctgrcatctactgtgcttgtgagcagagcgcatgcatttcccactctttccctagagctggtgaccggaggctccggcctgtgtaactttgaaagcctggaattcatgtgacccctgctgacctaatcaagactccgaaagcacagccccatgtgctgggactctcctgaggagttattaaaaactckcattagttcttcaagcttactgtgacacagaaattggctactcgctcatcaacacaggattaaacatgtctaaggttaaacttgtagtctaagtgatacgatttaagatggactgtcgactgggcgcagtgactcacacctgtaatcccagcactttgggaggccgaggcgggcgaatcacctgaggtcgggagttcgagaccatcctggccaacgtggtgaatcctcatttctactaaaaatacaaaaattagataggcgagttggcgcatgcctgtaatcccagctcctcgggaggctgaagcaggagaatcgcttgaacctgggaggcagaggttgcagtgagccttggttgtgccattgcactccagcctgggcgacaagaggacaagagtgaaactctgtctcagaaaaaaaacaaaaaaaaaacaaaaaaggattgtgtaggttaattggttaattttttttttttttttgagatggagtcttgctctatcgcccaggctggagtgcggtggcgccatctcggctcactgcaagctccgcctcccaggttcacgccgttctcctgccccagcctcccaagtagctgggactacaggcgcccgccaccatgccggccaattttttgtatttttagtagagactgggtttcaccatgttagccaggatggtctcgatctcctgacctcgtgatcgcctgcctcagtctcccaaagtgcggggattacagacgtgggccaccacgcccggccttttttcccttttgttcattgtctttagccaagtggtatttatttagcaagcattttaggacacaatatgccgcaaagttatcctgttgagtaagcctggtataaactgagagtttctttctttctttcttttttttttttttgaaatggagtctcgctctgtcacacaggctggagtgcagtagcactatctcgctatctcrgctcactgcaacttctgcctcctgggtttaagtgattctcctgcctcccgagtagctgggattacaggtgtgtgctaccatgcctggctaatttttgtatttgtrgtagagacagcgtttcgccacgttggccaggatggtctcgagctcctggactccagtgatctcagcctcccaaagtgctgggattacgggtgggagccactgcacctggctggttattttttttgcttgtttttttgtttgagatggagtctcgctctgtcgcccaggctggagtgcagtagtgcaatctcagctcactgcaacctctgcctcctgggttcaagtgagtctcctgcctcagcctcccgagtagctgggattacaagtgtgagctaccatgcccagctaattttctgtatttttagtagagatggggttttaccacgttggccagtctggtctcgaactcctttcctcaagagatctgcccgcctcagcctcccaaagtgctgggattccaggtgtgagccactgcgcccggccccggctggttatttttaagatgggactgaagttgagggctgggctgcaggaggaaaatgagctcngttctgatttccrctgttggaaccccagtgcctccctcccagccactcttcagttcttggctgcgagcagtagctttgctgtctgtccttggtttgctgtatttgtaataaggaacctttgctatgaaattagtgggatacattggcttctcctgtctaattttgtgtagctctgtctacacagtttgggtcctaacttgactgctctggggctgctggtggcagaggaccctggggcttgggagtcgtgtctgcggttgaatcctctctgtgggaggtggcctgtggtgcagccttgtggcttgaagatctctgatgttggaatggttgcttgtcagcacagacagggcatgaagtccaggctgcgttcctcacatttagaccattctctttgtcctgccaggtgtaggtgagggtgcactaggttggaagtcgtggaaacccacccacctgagcccaaccctgaagggcactgttgaggcagagcctcaggtgtgccttagggcctggcacctttgctttgtgccattctgactttgcctgcctggtgggcgacttcgtgggctttgtrttggaggtggctgctgcagtgaccttgggctctgggctcccttgtttacagatgcttcccgcagctctgacggatgggccygctgttgctctgaggagggcacgtgtgccgctgtgtcccgtctgtctcagcacagtcacggtgcgtgcgctgggggctgtgcagcagggtcactcctgaaggaaagtgggttctccacccagacagacggctgctccccagtggggagctgggggcagtcctccaaaggaaggctgcgggtaatgcaaagggaaaaggagagtgggtactgaacaggcggctggtgagcattgctaccacarcagggcctggagcttaggcctcacgtgttaggggatgcatatcctgtggagagccggttagtcgtcccggtgtgtccggaattggtgggttcttggtctcactgacttcaagaatgaagccgcggacccttgccgtgagtgttacagttcctaaaggcggcctgtccggagtttgttccttctgacgttcggaggtgttcggagtttcttccttctggtgggttcgtggtctcactggcttcaggagtgaagctgcagatcttcgcggtgagtgttacagctcataaaggcagtrtggacccaaagagtgagcagcagcaagayttactggaaagagagaaagaacaaagcttccacactatggaaggggacccgagcgagttaccactgctggctcccgcagccagcttttattctcttatctggccccacccacatcctgctgattggtagagtccagtggtctgttttgacagggcgctgattggtgcgtttacaatccctgagctagacacaaagcttctccacatcctcaccagattagctagatacagagtgtccacacaaaggttctccaagtccccaccagagtagctagatacagagtgtcgattggtgcattcacaaaccctgagctagacacagagtgctgattggtgtgtttacaaaccttgtgctagatacagagtgccgattggtgtatttacagtccctgagctagacataaaggttctccacgtccccaccagaatcaggagcccagctggcttcacccagtggatcccgcaccggggttgcaggtggagctgcctgccagtcccgtgccgtgcgcccgcactcctcagcccttgggtggtcaatgggaccgggcgctcgtcggggagactcggtccgcacaggagcccacggagggggtggggggcttaggcatggcgggctgcagctcccgagccctgccctgcaggaaggcagttaagacccagcgagaaattgagcgcagctccggtgggccggcactgccgggggacccagcacaccctccgcagccgctggcccgggtgctaagcccctcattgcccgcggccggcagggctggccggctgctctgagtgccgggcccaccaagcccacgcccacccgggactccagctggcctgcaagcgcatgcagccgcggttcccgctcgcgcctctccctccacacctccccgcaagctgagggagccggctccggccttggccagcccagaaaggggctcccacagtgcagtggtgggctgaagggctcctcaagtgccaccaaagtgagagcccaggcagaggaggcgctgagagcgagcgagggctgtgaggactgccagcacgctgtcacctctcaccggggtggaatttgcgtggaggaacgtgccaggagggccagccctcgggtgctgacccctctgtcctggaggctactttgcctgcatctctgccacagtcgctcatcccctgcggtggggctgctgcggtccagcacggccacaggcatccagttcccctgtgggacgcctgagtgcgggtccttgttggtccgtgtgtgagccgcgtggtggtttcacatacttgatttgaggaaagtgaagtgttctgcttaggtctttgtctcagcctargaaagagctccattcctggcccttttctgygtttgtcccactcacccactgtcattttgagctcctgggccaaggtttcatggggttcctccctggctcccccgctctgcctctgtgggaacactttctgcaccctcgggtctttgttcccattgtcagtggaactttgaacagagctggctggttcacctcgtcatttcagcggtgtggatcagcaggcaggttctgctgttgactgagtgttgggcgggaggcccagggcctgcactccctggctggcgggctcaggctctgcttcccttcagggtggcttggcccaccaggtggccttcarggctggccttgcatgcccctgccaggtccgcttggtcaagcccgcagtctcctcgccgctggccccttctgttgactgccctgaccttccttgatgactggggacagggtcttcctggatattttcgtgtgtcttcccgggccagtccagtgatgcacttgtggatagggctggtcaatgtggctgtggccagagagtggacaacagacatgtccacagcaggagcaacatggtggcttgtcttgggctgctggttcctggagctgctcagaggaccggtgggtcctttcgaggtgggcagccagcccttgccgttcaggttcccgcaggggtgcgtgaggaaccgtcggacctgctcattagtttattgactgtgtttctggtaatggcctaaaaggttaagagaagaaatggttaaaaaaaaaaagaagaagaagaagaagaaaaagaaagggcccaaaatgtgtacagagttgtctgtggaggagtggttttgggtttccatgtccgttggacctcaggcggtggtgctgttgaaggtgcccggctgcagaggggctgtgttgcaagggtgaactctgcttcctgtgcaaagggtgtggcccagggtggggtcgcccccaggcttgtcttgttaaggggacctctgctgtggtgcagagggggcagaggtgcttgtgagccatactgccccttgcgtgggctccccttgcctgggtgtggggggtttctagtctcctttggggtatttgcttcccctgtttgagcagatctgaagagaatttttttttttttttagacagtcttgctctgtcacacaggttggagtgcagtggcaccatctcggcttactgcagcctccgcctcccaggttgaagcagttctcctgccccaacctccccagtagctgggattataggcacctgccgccatgcctggctaattttttttttttttttttttttgagatggagtctcgctctatcgccaaggctggagtgcagtggcacaatcttggctcactgcaagctccacctcctgggttcaagcacttctcctgcctcagcctcctcagcagctgggactacaggcgcgtgtcaccacgcccggctaattttttttttttttgtatttttagtagagacggggtttcaccttgttagccaggatggtctcgatctcctgaccttgtgatccgcctacctcagcctcccaaagtgctgggattacaggtgtgagccaccacgcccggcctttttttttttttttttttttttttgagaccaggctggctggttttgaactcctgacctcaagtgatctgcccgtctcggcctcccaaagtgcaggggttgcaggtgtgaaccaccacaccctgcccaaagggaaattttttttgtttgtggatgtccaaggaaaactttaaaaatgattcctggccaggcacggtggctcatgcctgtaatcccagactctgctggactctgctggtgctctgctggactctgtccccacagcaccagcttgcatcccactttttttttttttccccaagatggagtttcgctcttgtcacccaggctggagtgcaatggcgcgatctcagctcactgcaacctctgcctctcaggttcaagtgattctctagtctcagcctcccgagtagctgggattacaggtgcatgcccccactcctggctactttatgtatttttagtagagacaaggtttcgccatgttggccaggctggtctcgaaatcttgaccttaagtggtccgcccaccttggcctcccaaastgctggaattataggcgtgagccactgtgcccagtccatcttgtatttttatgcacctgtcagtgggcaaggactccaaacatattttttctcttccttagccacgtaaagctccatagtctcagacaggtttcagcagagtccacgaaagtatctgtagttgcctgtcaggccaaaggattctggaaccgagaggcccctttgcctgggcggacctcagtcctgagctgtgtgggtgggttgtgaaagggaagcactttgcagacagccagtggcagacgtgccgatgagactgtgtgcctggccctggtgctggtgctgacctgcagcagctgtttctggagggcttggggtaagtgtccctgcgggcccctgtggcccttcttggaactgtgccctagccgtgactggccgcctggcaccccagcccattctcacattttgcgccagtgtcacagatttgaattgacgcacacgctccggttctgctcatccttgtcaaacgcagacgtcatttgtagcagcgtaccctgcagttatcggaggtgggggccaggctgggctatggtggctgtcagggagagagggccgcctgttggctctttcttgggcccctccgctgcctacttgtgcgtgtggagggaagcagcttcacctcagtttttccccgtgtcacatctgtgagaataaccactcagggttctctcagaacccattagctccagaaggtgttcggtctctccactccctgagagatggagactggtcacagggctctgtgaaaacacacacagctctgccatactgctrtggcgtccagggggcccccagaggccgcacgcccggctgagtgcccatagggcccagattccatgccccttctcctccagcaaggaccctgggccctgtccggagttgaacgctggcttgtgtggattgcagcctcggcccacgggcttcctttgtgatccgttgaagcatctgctggcaaatgggctcagctcttggctcagctggctaggtggccaggtggccgggtagctgggcgtccgggtgtcctggcaggcgctgtcctcactgtgagctgcartgggctgcttggtcctgtgccctgctcatggcactcaccctcctgcctcctttgaggttgctccagtgcttttttttttttttttttttggttttgacccactctggatctttactagctcacctgtagtctatgggattggtgtctgctcctaaacaaacatttaaaataaccctaaggagtgctgcttgtaatattccagcaaataggatgacttgaatgcccagtggcattcatacagttggatatgtgggcttttaatttttttctttgtttttctgtattttccaaattcctataacagcatgtttataattagaaagtatattattaaaagaataaaagctttaaaatatgcagctattcaaaagcacattttttctttaaaaaggatacacgtaaatgtgtcttttttttttttttttttttttttttttgagacggggtcttgctctgtcacccaggctggagtgcagtggtgtgatctcagctcactgcaacctctccctcccaggctcaagagctcctcctccctcagcctccccagtatctgggattacaggcgcctgccaccatgcccggctaatttttttgtgtttttagtagagacggggtttcaccgtgttagccatcatggtctccatctcctgacgttgtgatccaccagcctcggccttccaaagtgctgggattacaggcgtgagccactgtgcctggcccacacctggttaagttcttgkatttatgttttgttttttttttttttttttgaggcggagtcttgctctgttgcccagactggagtgcagtggtgcaacctcagctcactgcaacctcygcctcctgggttcaaatgattctcctgcctcagcttcctgagtagctgggattacagacatgcgccaccacacctggctaatttttgtatttttagtagagatgaggttccaccatattggccagactggtcttggactgacctcgtgatctgcccgcattggcctcccaaagtgctgggattacaggtgtgaggcaccgcgcccagctggtgtctgttcttttagggaaccagccctcttgggtcagggccccacgtttgcgttctcatctaacaataacacttccttacttcaagcacagccacgtgatggtcagggctgacayatattaattgggcgacacggttcggtccttagtgccttttctgagtaacgtgctcactgctatcttgtgtccactggctctttgagagctctgctgctctcctgtctcacccctaccctgaggtgttcatgcaccagggcatggtgctttcacttctgagccaagtgggtcaatcattttcttttttgagacggagttttgctcttgtatcccaggctggagtgcaatggcaccatcttggctyactgcaacctccgcctcctgggttcaagaaattcttctgcctcggcctcccgagtagctgggattacaggcgtgcatcaccacacccagctaatttttgtatttttagcagagaccaggttttaccatgttggccaggctggtctcgaactcctgacctcaagtgatccccctgccttggcctcccaaagtgctaggattataggcgtgagccaccacgcctggccattttctttcctgtacaattttgtgtgtttgtttttgagttaataatggccgtttttttcatttgattaaatattttactttccaacttaaatcttcccatattcttcagctcaatagagtgcttgtgaatattcttctcctcactgtaaaacctcttggataaagtattttttctctggaagacatgtgtcctgaagtcttccatattcccactctggttgaaacagttactctttaggcatcctgtggtactgggtgccttggagctggtgtgtgtggtactggcatgctgtgtaactgggcgcagtggtactgggtgctgttattgggtgccatggtactgggtgttgtgttattgggtgccatggtactgggtgctgtgttattggcatgcagtggtactgggtgctatgttattggtgtgccgtggtactgggtgctgtgttattggcgtgctgtggtactgagtgctatgttattggtgtgctgtggtactgggtgctgtgtaattagtgtgccgtggtactgggtgctgtgtaattagcgtgccatgatactgggtgctgcattattggcatgctgtggtactgtgtgctgtgttattagtgtgtcctggtacagactagtggccgaggtgygcctgtgtggagatctgagggtgacgtaagtagaggcactggcgtgagggcccctcatgcagtgtcaggcttgcacctttgcttggaaattccattagctttggaatttatagcttcgtggtgcagtgtggagttatgttggagataccacaaagataaagcatttccatggtgaacaaaaaagtttrcaaataaaagcagtccaggccgtttttattttggctttgttatgtgtccacttactgctgtgcattctatacgccaatgggagtgttttgtagattctcatgagttggttgcgtttggttcatttgggtaaagtgaaactccttttaaaagaagcagaaaaaaattaaatatctcataaaaataaagattttctatttctgcctcagagtgtttctctctagtgagtggtgtgtaattagtgtgccatggtactgggtgctgtgtaattagcgtgtcatggtactggatggtttgcttttggcatgccatggtgctgggtgctgtgttattggcatgctgtggcactgggtgctgtgatattagtgtgttgtggtactaggtgctgtgttattggcatgctgtggtactgggtgctatgttattggtgtgctgtggtattgggtgctgtgtaattagcatgccatggtactgggtgctgcattattggcgtgctgtgctactgggtgctgtgttatcagtgtgccatggtactgggtgctgtgtaattagtgtgccatggtactgggtgctgtgttattggcatgctgtggtactgggtgctgtgttattggtgtgttgtggtactgggtgctgtgtaattagcttgccgtggtactgggtgctgcattattggcatgccgtggtattgggtgctgtgtaattagcatgccatggtactgggtgctgggttattggcatgctgtggtactgggtgctgtgttattggtgtgttgtggtactgggtgctgtgtaattagcgtgccatggtactgggtgctgggttattggcatgctgtggtactgggtgctgtgttattggtgtrctgtggtactgggtgctgtgtaattagcgtgccatggtactgggtgctgtgttattggcatgccatggtactgggtgctgttattggtgtgccatggtactgggtgctgtgttattggcatsccgtggtactgggtgctgtgttattggcatsccgtggtactggatgctgtgttagtggtgtgccttggtactgggtgctgtgttatgggcatgctatggtactgggtgctgtggtactgcgtgctgtgttattgsatgccatggtactgcatgctgtgttattgctgtgctgtggtactgggtgctgtgttattggcatggtatggtactgggtgctgtgttatgggcatgctatggtacctggtgctgtgttactggtgtgctgtggtattgggtgccatggtactgggtgtgctgtggtactgggtgctgtgttattggcatgctgtggtacctcgtgctgtgttactgttgtgctgtggtactggtgttatgcgctcatgccaaaagaacttgaaggagagatgagttgggtttagaatttaggttgggtggcaccccccccataaatttagaggaatttgcaccatcaccttctgtttttctgagctgccctggaaagacctggctccattctcttcatacggtgtggatggtgctttttttcttccctccagacattttttggatgttttctttatcaacagtgttatttcataatactgtgttttgctgggggcttttttctttcatcgtgctgaagaaacttgtcctttaattctggagtttaaatggtatttgtttcttttcttttttttttttttctgaggcgagtctggaaaaaaaggcttgagcgatcctcctgcctcagcctccagagtagctgggactataggcaccagcacaccccactaatttttttttttcgagatggaatttcgctcttgttgcccgggctggggtgcagtggtgcgatctcggctcactgcatccgctgcctcccgggttcaagcaattctcctgcctcagcctcctgagtagctgggattacaggcatgcgccaccacacccagctaattttgtatttttagtagagatggggtttctccatgttggtcaggctggtctcaaactcccgacctcaggtgatccgcctgcctcggcctccaaagtgctgggattacaggcgtgagcaattgcacccggcccacctcgctaatmtttttttacagttttttgtagagacaaggtctcccagtgttgcccaggctggtctcaagctccaggccttgagcactcctcctactttggcctctcagagagttgaaattgcaggtgtgagccattgattgcatctggccagaaatgttatttctttgataattccttctctccatctttaccatttctcattttagaacttatttgagatcttatttagattttggaccatttagagtgatcctttaaattttaaatctttcatatattttgcatttctttttgttgtgttttcatatcttttcaatacatttttttcctgcccttgctttctgaatatacactcaaaaaattatactttttttttttttttttggtttagatcaacattgtttagatcaaaatctttctggagatgttaagatgttaagtgtaattttttttttgttttctttttttttttgagaaggagtctcgctctttcgcccagcctggagtgcagtggcacggtctcagctcactgcaacctccacctcccgggttcaygccattctcctgcctcagcctccctagagctgggactacaggcgcccgccaccacgcccagctaattttttgtatttttagtagagatggggtttcactgtgttagccaggatggtctccatctcctgatctcgtgatccgcccgccttggcctcccaaagtgctgggattacaggcgtgagccaccgcgcccagcctggctgcaggttttatatcctgtttctaaaagttaaatatgctttacttgtgattgtgatgttgctgctgcgagttctctaaactgtccttggaccgtggggccctcagttgttgctggtccaccaccatctgcaggagctgtgaacagaggactgtcagggaccattgtcgctgctgaaggctgccgacctgtggactctcgcactgcctgtgtcaggcgtcaggccatccgcgagcccctaacgaggtgtgggagtgtcatgccatccatgtggaaactgaggccctgggagattaagtaacttcccatctgctgtagtcagggtcgggcccttagtcaccgtggtctctggaacccacaggcctgkaaacagcgcttttgagcaggggctcagcgaggctgggggtcagactagtggccgaggtgcgcctgtgtggagatctgagggtgacgtaagtagaggcactgrcgtgagggcccctcatgcagtgtcaggcttgcacctttgcttggaaattccattagctttggaatttatagcttcgtggtgcagtgtggagttatgttggagataccasaaagataaagcatttccatggtgaacaaaaaagtttgcaaataaaagcagtccaggcagtttttgttttggctttgttatgcgtccgcttactgctgtgcattctatacgctgataggagtgtttgatagattctcatgagttggttgcgtttskttcatttgggtaaagtgaaactccttttaaaagaagcagaaaaaaattaaatatctcataaaaataaagattttctatttctgcctcagagtgtttctttccagacagaggcttcttcctgctgcacactcagagtcaaggaaactggacacagctgctttggagtgttagggacgtccatgagctgtcagcccagggaagggctccaggatccctgagaatgtcataaagagggtagacccagcttggaacttgcagtttctaaattacttcaagggaacaaaccagagtgcttcatgtacagaattttttttttcatgtacagaatttttaccttaactagattgataagtgtccagtgttttaatttttaataagacgtggctttcagaagttgttattttcgtcttgtagcttcarcactgagagctggtctccttcaggtgagttttatgcaggattcagggaccatgactgtaagccggcaacctggttctgggtaagtgatgtattcagacttctgctgaggaggctctgaggctggcgtgagacttgccaccctgcagtctgcaagggctgcagtctggctggcctttgtaaagaccctggagcaatagggcagattgcatcttggcaaatgactctaaattgcctgcaatttgctgggaattgccacttccaaatgtttgttgcagcatagataatctgagcttgtgaaaggtcattggctgttctttggaaccagtaaattcctgggggcttctgctccaggggtgaaggctggagtgagggtgctagtgtctcctggggaggaaagcataaaacatttttttgttctactttttaaatgttaccactcttcattacataaagtgtttctcatcagatccttgtgaacctaaaaatgtgatgtgaagccatttgtgcagttccaggctctgaagagacttttgtgacattgaagaaatgtggcagtgagcagcacaaaactgaattcaatgcacggtgttcacgctgagcagaggaaagaggtcgtcagtttcataactgattgtgctgagcactaactagtgagtctcattagtgagttctttggtgcattataattttcaaagtgttcttcatgtacattattgcatagttttcagtcaatgcaaagacagattgttgtcagagttctatatgaaagacgtttggtagcgggcacagtggctcacatctgtaatcccagcactttgggaggccaaggtgggtggattgcttgagcccaggattttgagaccaacctgggcaacatagggagacccccatctctagaaaaaaatagaaaaattgagatgagtgtggtggcatgcacctgtggttccagccactagggaggctgagatgggtgggtcacctgagaccgggaggttgaggctgcagtgagctgtgaatgtgccactgctctccagcctggttgacagagagagaccctctctcaaaaaaaaaaaagggccgggcacagtgggtcatgcctgtaatcccagtactttggaaggtcgaggcgggaggatcacgaggtcaggagtttgagaccagcctgaccaacatggtgaaaccccgtctctactaaaaatacaaaaattggccaggcgcggtggctcacgcctgttatcccagcactctgggaggctgaggcgggtggatcacaagatcaggagattgagaccatcctggctaatacagtgaaaccccgtgtctactaaaaaatacaaaaaaaaaaaaaaaatagccgggcaaggtggctggcacctgtagtcccagctactcgggaggctgaagcaggagaatggcgtgaacctgggaggcggagcttgcagtgagccaagactgcgccactgcactccagcactctagcctgggcgacatagcgagactccgtctcaaaaacaaaaaaaaacaaaaattagccgggcatggtgttgtgcgcctgtaatcccatctactcgggaggctgaggcaggagaattgcttgagcccgggaggcggaggatgcattgagccaagatcacgccattgcactccagcctgggcaacagagaaagatgccatatccaaaaaaaagaaaagaaagaaaacacagaacaaagaaatggtctgatatcccactgctcagagatactactattctatctagatcgctctagatttttcttagcacatttttttcatcaaaaatgggatcctaattcatgttacccactctgtatgtttttcagtatctttttttttttttttttttttttgacagtctcgctctgtcgcccaggctggagtgcagtggcgcgatgtcagctcactgcaacctctgcctcctgggttcaagcgattctcctgcctcagctcttgagtagatgggattacaggtgcacaccaccacgcctggctaatttctatatttttagtagagacagggtttcaccatgtcggtcaggctggtctcgaactcctgacgtcgtgatcctccctcctgccttggccttccaaagtgctgggattacaggcgtgagctaccgtgcccagcccactatcattttaaatagttactggtgtgagcagcgtggcagcacccaggggttgtgcagagaggacagggtgcctggcagaccctccctgcccgccatctctcctggaaagcggagcagcagcttcagtctgtgggggactgtgcagagaggacagggtgcccggccacactctccctgcctgccatctctcctgtctgtagcacccgttgccatgtgcctttcaaaatcatgagtgtttgggttcctgtgaatatgctgttcttgttaagtatttaatttattattattttttttgacatggagtttcgctcttgttgcccaggctggagagcaatggtgtggtctcggctcactgcaacctctgcctcctgggttcaggtgattctcccgcttcagcctcccgagtagctgggattacagacatgtgccaccacgcctggctaatttttttttttttagtagagatggggtttctccatgttggtcaggctggttgcgaactcccaacctcaggtgatccgcccgccgcggcctcccaaagtattgggattacaggcgtgagccactgcacctggctgtattattattattttttttagtgacagagtcttgctgtgttactcaggctgaaatgcagtggcatgatcatggctcactgcagcctcagcctcctgggctcaggcgatcctcctgcctcagcctcctgagtagctgggaccacaggtgcatgccaccacacctggctaattttttaaatattttgcagagacraggtctcaccttgttgtccaggctggtcttgaactccaggactcaagtgatccatctacctcagcctcccaaaatgctgggattacaggtgtgagctaccccgcccagcccttggctaatttttgcaacatttttttgtagagacaaggtctggccttttcactcaggtgggtcttgaactcttggctttaaggcattctgcctcagcctcctacagtgctcggattacaggcttgagccactgtccccagcctggtgaagcatttgtttagagtctcacagacagttagttggaattgtgggtttaactgtgacctgcagcctttcccacccagtcccctaactaatgtgcaggacactttggttgctaggctgtagtgagggctttctgcatcatgtgcctggcctcacccaagcactgtttgytgaaatgctcagaaactttataaagaagtggccactgtcatttccgctttgtaagctaggaattggcagactgcctgtggtcagtagccagtaagtgctggtgaggggcatttggccacagtttgagctgttggactcccgggatggcasgtgtgggtggctgccagggccgccccgcctgtgctgcgcctgtggacagtctgcagaaacacacaccctccctatcgtcactgtttgattttgatcataaagggcctttggtgtgttgtgcggttcacagtgagtgggtgggggcaccagcggtgttataaaacaaagaaaaggctggccgcagcgtggaaccacagcgaggcctcctaggcacaggccgcagggctgagccggaagctcctgcctggtgcctggtgactcattctcttgccctttygtgtctgccaccctgagtgaccgagaaatcacctgctcattcagtgtgagcagaaggggtgagagtgccctgccccatggtcattcaatgctgtctggtcagcccatcacctgttcctgcccctgagggtgacaccaagtgtctgccgccatgcagaacacccacgagatacgtaggtggagtattctgggacctgatgggggtgctggcaatctttttttttttgagacggagcctcgctctgtcgcccaggttggagtgcaatggtgcgatctcggctcactgcaagctccacctcccaggttcatgccagtcttctgcctcaggctcccgagtagctgggactacaggcacccgccaccgcacccggctaattttttttatatttttagtagagatggggtttcaccgtgttagccaggatggtctccatctcctgacctcgtgatccccccgcctcggcctcccaaactgttgggattacaggtgtgagccaccacacccggccagtgctggcaatcttggctgacgcttcaggcagaggccacatccctgattttatggaggaagtaaaatagagattttcatagctgacggtggcctgattttgatcactttttttttttttttgatcccactctgtcaccaggctggagtgcagtggcgcgatctcgctcactgcaacctccgcctcccaggttcaagtgattctcctgcttcagcctcccgagtagctgggactacaggcgtgccaccacgcccagctaattttttgtatttttagtagagatggggtttcaccatgttggcaaggatggtctcaatctcttgatctcatgatccgcccgccttggcctcccatggtgctgggattacaggtgtgaaccaccgtgtccggctctcaatcacattttttagtataaactttgtgacctttgggtgcaaaggtaggttatttatctataggtgtgtatatatatatatatatatatatttttttttttttttttttgagacggagttttgctcttgttgcccaggctggagtgcagtggtgtgattgtggctcactgcaacctctgcctccccagttcaagagattctcctgactcagcctcccgagtagctgggattatgggcgcctgtcgccatgcccagctaattttttgtatttttagtagagatggggtttcaccattttagccaggctggtcttgaactcctgacctcatgatccgcccacctcagtctcccaaagtgctgggattacaggcatgagccaccacgcctggcccttgttatatatatagtatataagtgacagcatctgcatgaatgggggccagttgtcagtattgctaaaacagaagcgagacctctccatgccggtgtgaaccagggcgggccttttcgtggccagcgtgagtgagtggggccctctctgtggtcagcatctgcattttgtgtgctgtgcctttgtcacattcatatggaagttcatgtgaggtgaggaaatgcttgtcctgcttctcccagtgcctgtctgctttggtcgtttcttggtgtttccgaaggccccgtcatragagaagatggagctaacacagagcaaggtgccgtgttggggaatggctctcctctcttcttctcagggctggagcctgcagccacgtgggacagaccataagttgtacacacgacgctgtggcagccatcactctggggcggtgaccgctccttggcagtcggcccctgcgggcagtgggttgagccctggtctgggcgcccttgaccaggtttgtgtctggactgggggaggcgagacgtggggagggcgctggctgtggcctggctgttggcctcggggtcaactctgcccgctgggaagcgctgccccaactccagtggcactgccaagcagttggagaaaaacaccgtggtgcatcctggcatgccacggcataaaagggatgagtcgctgataaccatggaggcaggggtgcatctcaggatcctgtgccagtgaagaaagccagagcggagggggcgccggagcagcggggggcactagctccccatgagactgcgtttatacagaattctagaaaaggccgactgacctcgagcgacaggtggatttccccaagggaagcctccccaggcttccgrgttgaatatgtgggctgaggcgatggtttcctggggtgcggggccgcccgcggggctgaggcgatggtttcctggggtgcggggccgcccgcggggctgaggccatggtttcctggggcgcgcccgcggggctgaggctgtgatctggtgcgcgtcagaacgtgccaggtaggactgtggttctgtgcgggtccgctgagcacccagccgtgcgtcagtagagctgatttttacacagccgtttccttgcctttgttcatcccggagttctgcgcccttaggaactgtgcaccgggcgctgctgcctccctgaaggcttgggcagagcctttccctgcgcgggactcgggggctgggcctgggaagggcctgcggctgccggaagctgcctctgcagggcgggttctgtctgctggctgtgctgttccggggggtcgggatgcaggtcgctgatggcactggccgtgtctgaggattggaccgctcacctggggtgcccctcctcctcctggtataaagtacgacttagcttgtcaaaacagggatcaagtragtgtgtctgtgtcatgtgctgacgtgcrgcgtgtggtcttgtgataacactggaagcgcctactgaccacctgcgggcgttttctgctcagttgtgtttgtcaagcttctgtttatctccacaaactctgcgggacactgggcgggttggttgggaagctgctcatggtgcccttggccatgtgatccttgcaaacctccccggaggaccgygggcctgtgaggcctgtgcctgacccgcctttccatatcgcttctgccctgcgctgcttccagccgtttctatgcacccgcattccggcccccagcctcctcccaggagggctcagaaaggatccggcaggagacctgtagagcaaatgtagcccccatgccatggcatcggcgtccttgagcaggtggcctcgtgcccagtgccgacccgtaatgtggcccggaagacccgtaaagacccgtaaggcggctcactgacacttggccccagatctgcccctcatggaggctgctggtcagtgcggacggtcccgggtatttcagatgtgactcttgtgggctgcagggctctcctgcactgggctccccatggtctgcagggtttcctgtgggctacggggcttcccatggacaggtctccccatggactatggggctctcctgtgggctttggggctcccacaggctggtgtctccagggygggttgctcattctgtgccgtattccatcccctgtcgcagttgacaccttttccctttgcacccacagtggtgaagacctgtgcttatgctcctagagagacgcaggtgagaacccaagtcacacccctcagtkttttgttttgttggkgtgtgtgtgtgtgtgtgtgtgtgtggtggagtctcactctgttgcccaggctggagtcagtggtgtgatctcatctcactgcaagctccgcctcccgggttcacataattctcctgcctcagactcccgagtagctgggactacaggcacctgccaccacgcttggctaattttttgtatttttggtagagacagggtttcactgtgttagccaggatggtcttgatctcttgaccttgtgatccacccgcctcggcctcccaaagtgctgggattacagttttgagccaccgtgccccgcctgttttgttttgttttttttaatcttattttggctttttttctttctttttttttttttttgagacggagtctcgctctgtcrcccaggctggagtgcagtggcgcgatctcggctcactgcaagctctgcctcctgggttcacgccattctcctgcctcagcctcccgagtagctgggactacaggtgcccgccacygcacccggctaattttttgtatttttagtagagacggggtttcaccgtgttagccaggagggtctcgatctcctgacctcgtgatatgcctgcgttggcctcccaaagtgctgggattacaggcatgagccaccgcgcccggcctctttccttttcttttcttttttctttctttctttcaagacagggtcttgacctcttgcctaggctggtctcgaactcctgggcttaagcagctctcctacctcagtctcccaagtgctgggatttcaggcctgagccacgcttggctctcagtttkgggaagcaagtggcattggcatccatggcctctgccaggtgaccgctccctgccatctggtgccagagccccttccctggacatgactgcagaccagagctgggacgcagctgcaggccatggctcacctcttcccccaggccactgcccgccatcctcagaggccttttctgcctgtgttgcttcttgccaggcttttgtgtctgccagtgtctgggctctaaaggatgcactcatccgtccaccgcccacagctccagaaaatgaagagggtccccgggagccagcgattctgtgtgtaggattcacccaccatcctcagtggctctgtgggactcaggtggctggagacacatggatggggtmttgaggggcagacgcacacccgagtctgcatggactcyttgcctcgcggacagccaggtcccacttgctttggagaggaggatgtgcagcccaggggattctgcctctgtgcccaggtgaggcacaggtcagcaccagcacctgccatgctaactcagctcctgcacaggcctcccacacctgtgcagaggaaacacagccgtaggagcacatctgtccccatacctgagcacaggtgcacactccactgcgggcaggtacagggtgatgggttgaggggagacatactcagtcatgagttattgcctcccgttagaccgcactaccagcagggccatccctggagcctggggtgtgcgccatgttccccagctgcccctcggtcacctcctcctggagcctggggtgtgcaccactgtttgcagccaccctgccctgagccaggcctgggagaagcacccagcctcacgcctgcggcatgcgctgcctgggtttccctggccacaagacggggctctctgtgcttctcagaaggtcgtgcatctttgggtctgtgcggccacctccgtcttcatgtccagctcacttggaattgggctttcattggctcattcctggcttatcatccagggctcacagatgtgtgtttccagccattttactaattccagcctctgtctttcagaatacagctggtctctaacttaggatggctccacttaggccttttcaactttacaaccagcctgaagcattcagggtgcccgtcaacgaagggcaaggctgtgtctggataacactttgaggttggaatccactttccacctcatattcccagctatgagagggtttaacccttcgtgggttggaatccrccttctacctcatattcccagctatgagagggtttaacccttcgtgggttggcatccgccttctacctcatattcccagctatgagagggtttaacccttcgtgggttggaatccrcctacctcatattcccagctrtgagagggtttaacccttcgtgggttggaatccrccttctacctcrtattcccagctatgagaggtttatcaggacacagccttgtcgtgagttgaggagctctgtggttggagaaaaaggcgatttgcctttcaaaatggctataattattttacgtggtgtactgacctgtgctgcttaagcaaaaccatcagaacttacttttaacaacacagaagtcttggcggggtggggcacgtgctatgcagagctctcctggggctgctgtttgctgtttccccatagtggttgtcaccagcaggtgccatgtggtgccttactaccagggagggtggcggctcctgcctgggtatggaaatgtggtgccttactaccagggagggtggcggctcctgcctgggtatggaaggcacagagagcagcgggcccagagcatcccagagcgtgggtagcaggaggcaggagggcctgtagcagtggtttcgggtgattcccagggccagatctacctccagcctcctcttcccatgttctgggtggcatccgtcacaccaggtggtcttttggcatgaaacattttttgtgggcaggcgcagtggcttaagcctgtaatcccagcactttgggaggccgaggcgggcagatcacaaggtcaggcgttcgagaccagcctgrccaacacggcgaaaccttgtctctactaaaaatacaaaaattagccgggcgtggtgacgtgtgcctggagtcccagctactcgggaggctgaggcaggagaatcgattgaacccaggaggcggaggttgtagtgagccgagatcgcgccactgcactccagtctgggcgaaagagcgaggctccgtctcaaaaaaaaaaaaaaaatatatatatatatatatatayacacacacgcatatacgtatgcatatatacatatatacacacatatatacatttacatatatacatatatatttgtttttaatttttatattcttgagtgtacttagtaattttaaaggtaattgatgaggaaagctggaactctctcaaatttgcacgtgtgtgttaagggatgtggagggatgctgtgaagcttgacctgtttctaaatttctccatgaaaccatcacagcgaagcrtcataattttgtgtaacttttctgtttagattttatccgcccctatgttgcattattggtgttgtcatcttaccttgctggaatccttttaaagcatttacccctttgcagttcagtaattaaaatgatctgatttgtggccaggcaygatggctcatgcctgtaatcccagcacattcggacaccgaggtgggcagatgacttgagcccaagagttcaagaccagcctgggtgacatagtgagacctcatctatataaaaaatgaaaaagtagccaggagtggtagtgtgcgcctgttgtcccacctacctgggaagctaaggtgggagtccagggaataaaaaagaaaatgtcagtgcaggaaatgcgttgcttgtgagtgtgtggggggctgtcggttctgaggttctcatgcggcctgggaagaggcaggtgtgatgtgtgggattgagacatgtccaggcacaggaaccaatgaaagaactgtacaacatttactttttcagagggaggaaatggaaagcaaaaaataccccaaagaaggcaagaaagagcaaaaggaagtagagcagatgtgataaaccaacccgatccgacggtggcccagctccctccacatcacactaaatgtaaccggaccagacagcctcattaaaaggaaaaattgttatgctacctttttaaaaggcaggctgcttacacaagtagaagaatatagaatggttaaatgtgaaaagacggaagatgaaagtaccacagtgaccagagagccggtgccgtggccatgctggatgtgggagcagccgcgggagtcccagaraggtgccttcctggggcaggaggagcacctttctccaccatccatgaacacctgggcaggggagaccttctgtgtggccctgacatttgggcctcctaggycagcctagagtgcactggccgcctcatggcttctcatttcctgttgccttgaagctaatagggtccttgtagctgtcaaaccccacaggtgtttgtttatgacacagctcctgggcattgattctgccatcagcgcctcctcaccgctycactggactttcccttctgtgatgggcacgtttttccctaagtcaccgtgtcttctcatgcctcctctccacgacatttttgtttttgagacagagtctggagcacaggctggaacacagtggcgtgatcatatcttactgcagactcccgggctccagcgagtctcctgccttaccctcccaagtcgctgggattctaggtgtgcgccaccacaccggaccctaaagaaagcctttgaacacacagaagagttgcgaggagtctgtcactacctggctctacagggtctcccagcctctgtgtccccggactctgcctgagtcctggcacctgttccagaagagctgtgcacgttttcctgtttgaggtcatcagcgtggggggctgggcacagctctcaccaagtctccggccgcattctctccrcacagccagagccgctctcaccaaggcccyggccgcattctctccacacacagccaggggtcagagccactctcaccaaggccccggccgcattctctcygcacagccaggggtcagagccgctctcaccaaggcccyggctgcattctctctgcacagccaggggtcagagccgctctcaccaaggccccagccgcattctcaccgcacacagccaggggtcagcatctccactgtctgagaagtgcaggtgtaggtggaggtgctcgtgaagggcgggcatacaggtgcacacatgggcatgcgggcgcgcacacagatggatacgtgggcatgcacacacaaagcacgcatccataggcgcacgcacaggcaggcacgcgagcacatgcccctcccgccactggatcccagctatatggggggatcctggaactcccatgtgacctccccttggacgtgtctttgaccagaacgttcttggtcgcatctgctggtagtgaaggccaagcccggccgcctgtgtcttcaggtacaggagccatctgagtgctgagggcagatcctgagagccagggcagttgtctgggattgttacgaagatcaatagtaaacaggctgcccttcttccttttcttttctcccagccgccttctcccgcttctctcccctttgctgcctgaccttggtgcttgtgtgcagtggaacttgctgtgtgctggagcttgtggaaaatgggaaacctgcgtttctcctgcttctcattttaaagacaaacaggttttccaaaaatgtgaaaggcacacctgggaagtcagagtgggagaaggatttggaattggacacatgaacacagaaggcttcgttctgctgtatgtggctcccaagtgacgggacaggtgtgagccccatggcagcatgagggcagggcacgtgcttccagtgcgtgccaagacagacacgccatgtgccgtgggctacagacgcgccgtgtgctgtgggctacagacgcaccaagtgcygtgggctacagaygcacccgtgtgccgtggacgtagacttcttaaacttctgtgcggcagtggccttctctcttccatttgaaatgtttttatttggccaaatagatgtttatagaaagttaccaaagttcagtgttccttcatagtaatagggagactttagtacttaacctgagatctgaggttggctgcagtggttgttacagtgataatatcagtagctgctgagcagctgtggctttaagtatcaaaggaataatggtgtcatttataaatactgcatgatgcttaaagcaaagagcctgaagctgcaggctggtatcattttatctgctctatgtcaggtacagagaggagacgaggagtgaaccaaacttacaaagcccagccaccggtggtcggtgtttccagagaacccatttcccaagagcggccccatggttgctgtcagcctgaggctgccgtcacctggccgtgactgtctgtggcctgcagtgagcgaccaggccacagtgggtgggtcagagggactcgtggacatcggccctggcaggggcctgacatcgtgaaccgtgttttccattgtggcatggggtcctgcacctgcctcccgagcagctgagcacggtcaccagcactgttcgtatgaaaggccctgcttgtgtgttctggccccatgcgataccctccagagggcatggaggccacagccccaggggaaatggccccgtgcagcgaggccctgcccagcaccgccacaggctgtccccagctcgcagtgctcgctcatctccccaggcatcccatgtcaccagagtccaaggtgctgggctgcctgccccsctcccatcttgtcaaagggcctttcctggtgtaagtagaactggggctttccctaggttctgttcatcaggtggatggctggaagctgcgctggtccctccctccacaccaaggactctgatgcgcaggtgtgcttgcacctccgacatggcagttcctccggccatgtgcacgtggagggcggcccattgtggtagccttgggaggtgtcttggttatcttgtgtcactgtgacctgtggagatccaactgaggtagtcatcacccctcgggggacacattccaagacccaggtggaggcctgaaatgcgatagtactgaaccctgtatatactgttttcccctctgggaacacacctctgatcaaatttaacttacaagttaggcacagtagagactaaaaaaattgtgaatcaaatggaatgattgtaagggtgcactgtgataaaccccctgtgaggctgacgactgtcagggtgcaatgtgataaaccccctgtgaggctgacgactgtcagggtgcactgtgataaaccccctgtaaagctggtctctttctctcgcagtcttaccgctctgtgcgcacctagtttcagaccttggctgaacgcaagtaactgaaactagggaaagcaaagccgagtgggggcagccgctagaaggaaggggcagcctcagggcacactgtggggcttggcagttagggaccctgcagagtccacatgccagttggttggcagcacagcagagcgcccggaaggggcacatgcctttgacaggagttagatgtggtggagagaggcgcttaaaattattgaggacaagatgggttatttggtatttaatgctaacagctgtatctccattttgatgtgaaggagtgagctagattttatttattttttattattttattttttacctttaggctctgctggactggcctagattttgtatacacacatttcaggtgaaggtctaaaaaaaactggagcatataaagaaaaatagaatatatgtgtaattctggaataaggaaggactgtgtttccaaaatagaaaataaataaataaataaaggaaaagattggaatatctgattgatttatttattttatttttgagacagagtcttactctgtcgcccaggctggagtgcagtgctgcgatctcagcttactgcaatctctgcctcccgggttcaagcgattctcttgcctcagcctcccaagtagctgggattacaggtgcgtgccaccacacctagctaatttttgtatttttactagagatggggtttcaccatgttggtcaggctgttcttttttttttttttttttttcttttgagacagagtcttgctctgtcacccaggctggagtgcagtggcgtgatctcagcttactgcaagctccgcctcccaggttcacgctattctcccgcctcagcctccgaagtagtctgggactacaggcgcccgccaccacgcccagctaattttttgtatttttagtagagacggggtttcactgtgttagccaggatggtctcgatctcctgacctcgtgatctgcctgcctcggccacccaaagtgctgggattaaaggcatgagccaccgcacccggcctgtctgatttcatagaaatgaaaaattttgtttgaccaaaatcaacctgagcaatgttaaaaagaaaaatgacatttagggagaaaatgttttttgcgtatataaccagagattaataacaagtctatttgaagacttctgtaaatcaccaagaaactcataatccaccccatagaaaatggtaaaccatatgaacagataaagaggaagaagtttaaatgacaaatacgctaaactgccaatctgaccattaatcagggaagtgcagattgaaaaaaggtgtcatttcctggctaattttgcagtaacaagaggaggtgaatcgtcccaggagctggggaggaacctctgctctaggtagggggacaggaggtggcaccacccacacacactgtcacataccggccctgacatcagtcccgtggccatgcttggacttgggcacaggtgcagagacgtctgagctgaatcccaagggcctcatcctgatcaaaacccagtgtcctctcccgacgcgcactgcagaatgagcagaacatctgcgtcccatttctagtaccgtgcacggaaaacaaacccaaatgatcacgtgtggatgctctgtgtgtgcaccaaagcccccgcctaaaatcagaggagagatctggaaagatgcccggtgctttaatgcaccccgttgaaaaggacagagggacaagaggacaggtggagatgttggtcttttctccatgctccttattttctccaaattgcttgtgtttttaattaatacattgagatattcagataacatgaaaatgtgaaataaaatgagaggctgttggcaggctgtcactaacatgccctgcttgcctgtttgcaggtatggatcctggcgggagccagtcaacccctattatgtcaatgccggctatgccctggccccagccaccagtgccaacgacagcgagcagcagagcctgtccagcgatgcagacaccctgtccctcacggacagcagcgtgtaagtcccgccccggatacccagtccctcacggacagcagtgtgtaagtccggtcccagacaccttgtcccttgaggacagcaatgtgtaagtcctgccccagacaccctgtttcttgcggatggcagcgtgtaagtcccaccctgctgcagagcgcggccagctcagagggggcttcgtgctgacccagagatgcctgggctttgtcttcaggaaaagtgtttcctggctccccaggtctcagtgagagtgcgtctggacatgcaggcaggctgtaccgcagaggctgtcctccaagcagtacaagtgagggctcagctttgtgtcggttgcttctctctgtgaccagggctgctgggacctccctatgaggaaggatcgagggtgaacctaagacagtctgtaggctgcccgggctagagtttgctctttggttttcagagtctggggtttcagcttaaagacaggcacaggccagctgcctcaccactggctgtggcgagtgatgtggtccctgagggtggcgtttctgccgacgctggtgcagtacagggtcctgtcttgtccctgtcacccacttggcaaggggctgggagcaggagtgagggaagatgctgtggttgtgctgaggcctgggccacacatgtgtgacgctcgaggtgacaggcagaagcttattctttcattgtccagggaaaccccatgtgtaggaacgtgcttgttttatgacctcttcccctgtgcttcgcagctggctttttgggacctatgtacaccccagccattagatgatgccaacagtcttgttgcagtagggcactggctgccagcctgtgggggtcatttggggttttggttacccatgaagctcagaccttcccagctctggtctgtgcgccacacgccacctgcccaccagccatcctagccagggctggggccgagccgcaggaaccagggtctccctgcagcagcctcagcattggaggaagccagcggctatgaacttgtgagcagctggagcccgcggaccaccaccctccatccccactgcggccagtggtgtcccagatgtctttcccgcttagctgggttctccatgaggaaagcctggagatctggatagggctggaggaggagagagggacttctcacctactggtgattctgcccatctttttatgaatatgttttaagtgatggtcccactgtatgtaccatttttatggttcttttcattttgagacaggatctcactgtcacccaggctggactgcaatggtgcgatcttggcttactgtagcttctgtctcctggtcccaagcaattctgcctcagccttcagagttgctgaggctacaagcgtgcgccaccacgcctggctaatgattattataatttttgtggagacgaggcctcactatgcagtctcgaactccgaggctcaaacggtgcacccacttcagcctcatgagtgctgggattacgggcatgagccactgcatccggctgatgatgatgattatttttgtggagacgaggcctcactatgcagtctccaactcctgggcgcaaactgcacccacttcagcctcacgagtgctgggattatgggcatgagccactgtgcctggctggtttgttcttttcatttgcctgtctttaaacatttttccaaaacctgaatttcagatgaggagaacaagttgtcacattctgtttctgaaccagattcagccagcccacattgccgtaggtcttggccccttggtttttccccaggtagctgtggtagtgcaggggcagctccctgccccttccgggcagagctgctgtgtgtggcttctcctggtttctttcatcctcgtttaattttgaatcttcaaaataaaatgttgacgtgattttagcagcacctgacttgaggttactggagttgaagcagtgcctgccgtggtcctgaagcctcgggccaggtggttgggtgcagtgcagcccacggagcgcctgacatgcatcctagcatctggtttccctcttccccaaaactctgttactacaacaaaaagtaacctgccaactcagttttctcaaaaagtctcctaattctctccaagaaaagggacatatgtttcctaaagggaggacctaaaataaataggtattttttttcttgatattctgttcatcttggtttgtactgaagtgtttaacaatttggaatgtgaaattgctacacgtactcgaaagcaaatcagaggtaaaaagtggacaggtgaagagcatcattccggtggggcagctgccctcagcttttgtgctggcggcaagctcacaacattccacatggcactcgagaggctgtgggctgtggacacagatgtggggtcagtgtctaatccacggaggcctgtggaggttacccaatccaagtatcatgtctaagaaaccagtaggttggtggcttcaggacacttcaacaaaccccgaggcaagtgttaggtgagttttagattcacttgttcctgacgcccaccgtggctgagccagacctggactcggctcaccattgcccacaacactcagtggtgctgtgacagccgaggatgcctcaggagttgccgtgtctgccacgcagccctgggtcgggcgctctcttcagtcgtcccgtgtctcctggcagctctgagaggcccctgggtgcggcacggatccctggagctgccgtgcttccgaaggcagcttttctttctttcttccttttcttttttgagacgtagtcttgctctgttgcccagactggagtgcagtggcacaatctcgcctcactgcaagctccgcctcccgggttcacgccattctcctgcctcagcctcccgagtagctgggactacaggcactcgccaccacacctggctaattttttgtatttttagtagagacggggtttcaccgtgttagccaggatggtctcgatctcctgacctcgtgatccgcccgcctcggcctcccacagtgctgggatgacaggcatgagccactgcgcccagcccgaasgcagcttttctaatagctgggagagggcgagggctttcatgaaggatggttgtgcgtgagttatcttaaccctggggtaattattcagaccatgtataatctgactttcgtgttttaatgatcttctaaagggttcataaagaaaacctgttgcgggccgggcacggtggcgcatgcctgtaatcccagcagtttgggaggccgaggcaggcggatcacggggtcaggagattgagaccatcgtggttaacacagtgaaaccccgtctctactaaataatacaaaaaattagccgggcgtggtggcgggcacctgtagtcccagctactcgggaggctgaggcaggagaatggcgtgaacccgggaggcggagcttgcagtgatccgagatcgcgccactacactccagcctgggcgacagagcaagactccgtctcaaaaagaaaaaaataaaagaaaacctgttgctaaagagctaccttgtgcctccctcagagaccacactgccctgccagctcctggagagaagcagagtgtgcagccttggcatctcctatctttccgtggggcactggttgtcctggctgcccactgtgcaaycctgaaatgtttttggtccatttagcaatgccctccaaggcaggcacactgcacagtggtctaggccacaagcaggggccagcaaacgtttcccgtgcagggctggcagtgaatatgtgaggctttgcagccgcatgcagtccctgtcacagattcttcccccaccctttaaaaatgtagaaaccttggccgggcgcygtggcttgcgcctgtaattactcccagcaatttgcgaggccgaggcgggcggatcacgaggtcaggagatcgagactctcctggctaacacagtgaaaccccgtgtctactaaaaatacaaaaaaattagctgggcgtggtggcgggcacctgtagtcccagctactcaggaggctgaggcaggagaatggcgtgaacccgggaggtggagcttgcagtgagccgagattgtgccactgcactccagcctgggcgacagagcgagactccatctcaaaaaaaagaagaaaaaaaaatgtagaaaccactcttagctgtcaggccctaaagaacaggcaggcacaaggaggctttgtggaggtgcccagtaaayaccagctaggaagrcgcgtggctgggcacctgggctttaccatcacgtgtgaacctttgtgtgtacatgttcccctgtgcacacatgggtgcctgcatcacctgtgtgcacgtgtctcagtggtggtggctcacaggtgtcctcatcattgcctgctgaccggcggtcggggccaggagctctattggcacggtgctggccctcctgctcctctctgagttaacggctgcctctttctcctggacagggatgggatccccccatacaggatccgtaagcagcaccgcagggagatgcaggagagcgtgcaggtcaatgggcgggtgcccctacctcacattcccgtaagtaccggctttgcggycctcagcccatcgtcctccccgctcagcgtgggcctggtgaactggtccgcgggaaaggcacttgcctggcctcccacgagccaggcttacctctaggcgtaagcgtgtgatcccagcaacatctgcaagtggccagtccctgagggcagcaggggacatcaagtctcaggcagcatttagggcccagagggagctgttcattcagaagagcccccatgccccaaggccacaccctccctggtggcaggaagtgtcttgccttgtgaaggtggatgcttcccctcaagagggggagctctgagcctttctcaagactcagagcccaggcctggcccctgcacagcccttggggaaaacttggtgtttttgtggctgaacagtggtcgtctccaggtaaacgtcttgactttaaagctgccttggctttcgctgttgcatagaataatggcacctttgcccagtctcgggcatgggggcttggctgggcagtaggtcatggagctgagtgctagctggagcccagcacagcctgactccgtctacagagcattcctgcgctgatgaacagattaatgatctttccttattttgatgggttgactttgaacaggaaagatgttacgggaagatgagaaaagtgttttctttttttttttttgagataggagttttgctgtcactgcaagctctgcctcccgggttcacgtcattctcctgcctcagcctcccgagtagctgggagtacaggcgcctgccaccacgcccggctaattttttgtatttttagtagagatggggtttcaccgtattagccaggatggtctcgatctcctgacctcgtgatccgcccgtttcagcctcccaaagtgctgggattacaggtgtgagccactgcgcaacgcactgttagccgcggtgtctgaggttaaaccacgtgaccatctgagtgtctgtgcagggaagtaggcattttgagagcactgacacagtcttggtcaggatttcttagccttttagcttttctgcagacatcagtttccaagtcaggaatttctttatggttgaaaagaaaggatgttggtttgttatcacttctgagaagatgccagccaacccttgactcaggtttggctaaaactaggcactgatggtgtctacttaacaaaaagtggctgacactgtaggctgtgtgtgggtgcgtgcgtgtgtgcgtgcttgtgctgtggaagatctggggccctgcctgccaggcatggcccaaggctatcatgaggtcacagcccaagtcgagggcacctgcacagccaccggcctctgattttcaagtcacaggtcctgaacgtcaagaacccgcggagccgctgggatgacggaggcccgagagacaagacagctgagcaaccacaggcccggaacagccctctgtgcccatgaggacggggcttgagtgggctgaggcccgcgggaggcttctgtccacaggggtgccccgattttggggtgctggtcagagtcttcgtgtgtagaaagtgcatgccacagactctggatgagggggcatcaggcagacaacctcccctcagaagggtcaggaaggacagaagctgtggagtgcgttggtgcctggaacgtggacctggaaagacctctcaggatgcaacacagagaaaagaggatgcctatggcgagtccctggtgtcgtcgtcagaaccttccagaaccgagggaagcacagagccctcaggtcctggagggtcacatttgagtcgccaggaagatgaaagccaacagaggcggcaggcacagacaggagcaggccctgctgcgttccgcacccccagagggcccttgtgtggtggggtgggggccgcagtgtgcgtttctgtgtgaacagtctgcagcaaacaacctcatcggaggctctgtaggaacctgcatcaggtccatgtggcctgtcaggtggggctgtggttggaaccttcggtgggaggtccctcagccagaggcccaagtgagaaacccacatcacgggcacagctgcccggggcctgctcactgctgctactgggaaactggacccgaggatggtggtgagcagaggcggggggaggcccaggaagccgataagctagcaggacgtgccgtggttgcactgcccacttctgctctgttgagggccttggttttgcaaaagctatgccgtttctctggtgagtccatggctctgcagcagggacagcaggaggggagtagcttagacgctcataggagcagaaccctgttgtggctgcacccacggaggcccaggctgtgtgcaccttgtgagactctttaacacctgcccatcagagttggagcaggttcatcccgaaaagccccctgcccccactgtccatggaaaaattgtcttctacaaaactggtccctggtgccaaaaggttgggggccgtggctttacagcatctggtaccagaatgcgtgccctgcggggaggggcctcttcatctttagcctttacaattacttggaagtttcacgttttcatttacttggctttttcctttatgatatttttttctgttcctctaaagctggagaggttgccattctctgtaaatctgatgactctgacagttttgctgttctcagaaccgtggtgacgcagcctgcaaggccacctggagtctttttatggagctcgcgtggcggcatgagtgctcctgttggcccctcagccgtgctgctctctgggcctgatgatgggcttttcatcctgcccttggtctctgtggtgctgactgttcagaccataagcgcgtctgtctgcgcctctggctgtctgcagacacagcagccgtggtccctgcagtgctggcagctcccattcctgtgtgtgccactcccacgtctgcgccttgcccagcactgggcacggaaaagccagcatggccccccagccacccagcctccaggccccgggtgcagcgggaaagggtggcttgttagttccttgccatctgtgtggacgccctgccgtccacacacccggacacaccggcccacatccctgctggtgccagccccagccttcctcatcatcttccagaagcactggatgctcctccttggctccgggacagaccccttcctggcgctgtgcacggcccagactccagcagtgacttttcccagctctgaggcatcacccagtgtcctgggcgtgcccttggccccttcatactccacgttccttgaagtgaagnctgtggctccagggccagcctctctctgagcctcgtctactgtggaacatctgagcctggaggaggccttttgtgtggcccctgtgtccagtctcaccccatccttctcaggtttagatgctgtttctactctcattgtgtagatgagaaacgggtgcacagagccaggactgcgccagagcccacggcgggagggcaggaaggccacacacacggagggtcccacctcccatctgccaccctgcttgcttgtcacaggggagctgtccctggctgcatccctccgcggcttagacactggcggcctggattttaaaacatgttttgctatgaaggatgttattggagcagctggcaaaattggaataagatctgccacgtgatgttattgtatcagggtcagtttttttaaccatccatatttgtactgtggttaggtatgagagcgaccttgcttttgttaaatacactctaactggttcagaaaagtgagcgtgcctgtgtgtgtgcgtgtgtgtgtacgtgtgtgtgggtgtgtgtgcctgcgcatgtgtgggcatgtgtgtgtacgcatgtgcctgccggtaaggggatgataaagcagttatggcagaatgtgagcccttggggaatctgggtgaaggtggacgggaattccttgttctatttttgcagctgttttgaagtttgaaatttaaaatgaagtacccttgaaagttacacagggccaggcgtggtggctcacaccggtaatcccagtgctttgggaggcctaggtgggaggagtttgaggccagcctggacagcaagacccccatstctatttttaaaaaaagctataggggggccgggtgcagtggctcacgcctgtaatcccagcactttgggaggctgaggcaggcggatcacgaggtcaggagattgagaccatcctggctaacacggtgaaatcctgtctctactaaaaatacaaaaaaattagccgggcatggtggcaggcgcctgtagtcccagctactcgggaggctgaggcaggagaatggcgtgaacccgggaggcggagcttgcagtgagccgaaatcgcgccactacactccagcctgggygacagagcgagaccctgtctcaaaaacaaaaacaaaaaaaaccaaaaacaaacaagctatatggtatattactataaaatacattgcagatgtattgttattattttgagacagggtctcactctttcacccaggctgcagggcagtggcatgatctcggctcactgcagccttgatctcccaggacttatgcgatccgatcctcccacctcagcctcccaagtagtcggaaccacaggtgccaccacacccggctaattaaaaaaaawttttgtttgtagagatgaggtctcactttgttggccagactggtctcttaatttctgggctcaagtaatctgctcgcctctgcttcccaaaatgctgtgactgtaggcgtgagccaccacctggcctttagattcttttaaaaaggaaagcctgcctttcccagacctcccctgtcctccaaatcctgggcgtccttccctgccgtggggcctcgggggccttctgctcacaccttctgcaggcgtctcctcgagtgcttctctgaagtgggtggggagcgccggctgtgtgtcctgaagctgccctgctcaggcctcttgatctggtagtcgggagacgctggaaagaagcagccctgtctcctgggtccgtggggaatgaaggacagactggccggacacgaaaagggggaccgtgaggaagttgattcccaactgaaaggaggaaaaagtaaactcttgctttaaaatacaacaaaggccgggcccggtggctcacacctgtaatcccagcactttgggaggctgaggtgggcagatcacctgaggtcaggagttcgagaccagcctggccaacatgacgaaaccccatccctactaagaatacaaaaattagccaggcgtggtggcgggcacctgtagtcccagctacttgggagaccgaggcaggagaatcgcttgaacccgggaagcagaggttgcagtgagccaagatcacgccattgcactccagcctgggtgacagagcaagagtttgtctcaaaaaaataaaataaaatacaacagagatagcacacgctctttcccttcacaaagaaatgtttagcctgtgacctttcaacccccgtgcctcacagtcctgtccctcgcagcgcacgtaccgggtgccgaaggaggtccgcgtggagcctcagaagttcgcggaggagctcatccaccgcctggaggctgtgcagcgcacgcgggaggccgaggagaagctggaggagcggctgaagcgcgtgcgcatggtgagtgggccgcgtcggtgtcgcgctccgcgtcggtgtcgtgctgttttcttgccgccgggatgtcctgatgttcttcatggggatgcccggggctggccgaggcctgctgacccatgaggcctcccggctgagtcccctgttcccctttctctgcagcygagccccagctcaagatgggatgtcccagcggccccatgccaccctcagaggcccagagacccaccttggtcacctgcattgaaggggccgggggtgacacggctgcctgctgtgtacctgatcctttgtgggtggcagggccacaagctgagactgcagcgggtgatctcaacttcttcaccccgtgtggctggcaagtgagatgagcatgtgcagagcaggaagggctagtggcgtgcagtcgggggctgcgatgcctgagactttctgccacctcctggtcacttttggttccttgaggccatggtgcacggccctctaggcacttgtgttgtaggactctttgcttagttcagctaaaaacaggtccctttcacatggccacgaaaaattaggctcacagacaattcgaagggtgagaaggacagagtttattgggtgaaaaggtaaaaagggaaacgggcgggcgagtggctcacacctgtaatcccagcaattttgggaggccgaggcgggyggatcacctgaggtcaggagtttgagaccagcctggccaaaakggtgaaaccccatctctaatgaaaaatacaaaaattagccgggttggtgtcaggtgcctgtaatcccaactactcaggaggctgaggctggagaatcgcttgaacccaggaggcagaggcttcagtgtgccaagattgcgccactgccctccagcctggatgacaagagtgaaactctacctcaaaaaaaaaaaaaatcacttcccgcaaagccagagttctgctagtgtgcttcccgcctcgcagattgaatcccaggttccacctaggaagacgcggggcctggctcctccccgctgcaaatggtgcagacttctgtggctccaccccagtgtgcgctcctcccagtgcgcaggccggctrgagtttctctggagaccccttcccacctggtcgtctcacttgcaaggctgcctttgctggccgggcgggcagtgcacacctgtgaccccaacactatgggaggctgaggcgagtgaagcacttgagccgaggagtttgagcccagcctgggcaatgtggcaaattcctgtctctagaaaaaatttcaaaattagctgggcgtggtggcacacacctgtggtcccagrtattcaggaagctgaggtgggaggatcacttgagcccaggaggtcaggtctacagtgagccgaggctgtgccactgcactccagcctgggtgccaaaaaaaaatgcctttgcttttctcttagccagattaattcctatgggaggtcagtgggcaccatcgagtcgggkggtggtccttcattctcctttcaatgttcgtgaatatgaatacttagaaaatgtatacacttctgagcgtttccattcacctgatcyttgatgtaaaatgcagaccttcagctctcctcagaccacaggagacccctcggtacactcactctttcacccgctacccgggtgagctgtgccctgaagcctggagatgccaccgtgagggtggacgcagggtgccgctggtggtgcccatctgggaaaccgtgcgccgggcactccattgagatggcaggcagaccttacatagctcgttgagcagctgggattcatggcggggaccaggtgtggtcgctgcagatggtggagctccccatgaaggggtttgtgtggaaatgtctcacacacagacgtcgatttgttttatcctcagtaaattgttttgccaccatgtggagctgcatcctctcgtctcccctggccgttggtctgagggtgaccctcatctgggtagggcacaggtgtgggtggtgccagctccagggctctgcaggtgccaagttcaccttctccacagtcccccaaggaaaggactcagggaatttgtcctccaatatcgggaacctagccggggccgcagggctggcaggagcagcatcagtgccgcgtggtccctgtggcggtgagagtgaggcctcgccttgcagacctggtggtcactggagcggctcgcttgcttcctggggtggccctgaggaggctggctgtgcgcacctgaggccagcggcattggggcctgcctgggagccttactgggctgttgtctgaaaaccaaacattgggaacagagttaccaagaatatggacatgtccgcaggccacatccgggcccacgggctgtgacgtcagcatcatcatttgggtggcaggtgaaggttagcagcccttaaacaaacatgctcacaacagaaacgtaagaaaggaagcctttgctgttttgctgccgtgttggccgctgtcattttctgcagaagcctttgctgttttgttgttgtgtcggtcgccggccgctgtaattttctgtggaacgctttgctgtcatgttggccgtctgtaattttctgatctttgcgccttcacccgttcgcagggtgtgcttctagtagggcaggttcccattttgagtgagacattttttaaaaaaaatatttttgtagagatggaatcttgctatattacccacactggtcttgaactcctggcctcaagtgatcctcctacctcagcttcccgaagtgctgggatttcaggcacgagccaccgygcctggccttaagcaagacatgttaaaggcaggcgtagccacaggtgctgagtgtgtggctctcacctgtgactctcaaggcttccccaccccatggagtcctggctctgtcccagcaacagggagcatggcagtgcccacaggtgtgtggatccagcaccaccagggcccaggagtggtggtccttccctaaaaggaataactccagttttttttttttttttgctttgttttgttttgttttttgaggcagagtctcgctctgtcgcccaggctggagtgcagtggcacgatctcagctcactgcaagctctgcctcccgggttcacgccattctcctgcctcagcctccccagtagctgggactacaggcgcccaccatcacgcccggctaatttttttgtatttttagtagagacggggtttcaccrtgttagccaggatggtctcgatctcccgacctygtgatccacccgcctcggcctcccaaagtgctgggattacaggcgtgaactccagattttttaaataacctattttcattgtgaaatttgggaaattaaagcacaaagaagaaaacaaaaaccattagccgagtggttaagttaatctgtaacatttcacagccccatgatagaattcctgccgatgtggagctckgccaaggcagygaacggcatcaaaactccaaacacttttagtccctaggaagaccctcggttaagatttctccccagagtgcccgggccctttagtcctacaaaaccaaggaaagggaggcagcatagctgcatccgccaggggatgcccaccacccacctgtcccccggctctgctccagcatccgtctgtcctctttagtgccatatttcaccctcagccccagtgcaggtgcccgcagccaagcccacaccagctctggggcacgcctgttccagttgcatttggatacttttgcaggtgtgagagttgggtgctaaacgttgggaggtttgtttatattaaaatatagaggtaggtggggcacagtggctcacatctgtaatcccaacactttgagaggccaagacagaaggatcacttgaggccaggaatttaagagcaggttggacaacatagtgagattccccatctctacaaaaaaaaaagaaaaagaaaaaattaatgggacatggtggcatgcacctgtagtcccagctacttggcaggctgaagcaggaggatcgcttgacccctggaggttgaggctgccttgagctgtgatggcaccactgcgattaggtgtggtggctcacacctgtaatcctagcactttgggaggccaaggtgggtggatcacctgaggtcaggagttcgagaccagcctggcaaacagggtgaaacccagtctctactaaaaatacaaaaaatttagctgggcatggtggtgggtgcctgtaatcccagctacccgggaggctgaggcaggagaattacttgaacccgggaggcggagattgcactacagcctgggacacaagagtgaaactccgtctcaaaaaaaaattaaataaataaaaataggccgggcacggtggctcacacttgtaatcccagcactttgggaggccgaggtgggcagatcacgaggtcgggagatcgagaccatcctggctaacacggtgaaactccatctctactaaaaatataaaaaattagccgggcgtggtggcgggcacctgtagtcccagctactgggcaggctgaggcaggagaatggtgtgaacccgggagacggaggttgcagtgagccgagatcgtgccactgcactccagcctgggtgacagagcgagactctgtctcaaaaaaatgaaaataaataggccggttgtggtggctcactcctgtaatcccagcactttgggaggccgagggtggtggattacctgaggttaggagtttgagaccagcctggccaacatggtgaaaccccgtctctactaaaaatacaaaaaaattaggcaggcatggtggcacactcctataatcccagctactcggtaggctgaggcaggaggattgcttgagcccgggaggtggaggttgcagtgagccaagatcgtgccactgcactccagcctggctgacagagcgactctgactctaaataaataaatacatacatagatacatggtaacttagttccctctctttcttttgtattgacaccagatttactcaayactgttttagtttgtcagtccaataagatgagaaaataagtatgagatgcaacttggaattaaagtgatcaratgtttgctctgacagataagcttcagcacctgttaacttggagaatcaagtgaaactccaccggcttcatgtggaagctcgtcaggcagcatcacaacatgtacataacccaagagccgttctgtacaaggttctccttaaaatataatgggaggccgggcgcggcggctcaygcctgtcatcccaacactttgggaggccgaggtgggtggatcatgaggtcaggagttcgagaccagcctggccaacatagtgaaatcctgtctctactaaaaatacaaaaattagctgggtgtggtggcgcacacctgtagtctcagctacttgggaggctgaaggaggagaatcacttgaacccaggaggcagaggttgcagggagccgagatggcaccattgcactccagcctgggtaacagagcaagactctgtctcaaaaaatatatatatatacaggccaaggcaggcagattgcttgagctcaggcattcgagaccagcctggccaatatggtgagaatcgcatctgtccccamagtacaaaaaaattagctgggcgtggtggcacacggctgtggtctccgctattctggaggctgaggtgggaggatcgcttgagcctaggaggcggaggctgcagtgagctgagatcacaccactgttctccagcctgggcaacagagcaagaacttgtctcaaaaaaagaataaaactaaactaaatctgtgcagagctctgcccacagccgatacatacgctgcattccttgaggccttgctgtctccgctccttctgtctatgccccgtcctgcctctccatcctcagggacaggaccggtggcgaggggcccccggccaccctgggctgggacggcatctgctggggctgctgggtcaggcctgatgctttttgttttccccaagtgtgcagctggtgctgagaggtgatggtgctgcttgtccccacacaggaggaggaaggtgaggacggcgatccatcrtcagggcccccagggccgtgtcacaagctgcctcccgcccccgcttggcaccacttcccgccccgctgtgtggacatgggctgtgccgggctccgggatgcacacgaggagaaccctgagagcatcctggacgagcacgtacagcgtgtgctgaggacacctggccgccagtcgcctggkcctggccatcgctccccggacagtgggcacgtggccaagatgccagtggcactggggggtgccgcctcggggcacgggaagcacgtacccaagtcaggggcgaagctggaygcggccggcctgcaccaccaccgacacgtccaccaccacgtccaccacagcacagcccggcccaaggagcaggtggaggccgaggccacccgcagggcccagagcagcttcgcctggggcctggaaccacacagccatggggcaaggtcccgaggctactcagagagtgttggcgctgcccccaacgccagtgatggcctcgcccacaggtgagcgtgcgcctgtcagtgaggagggggcttggggtgaggctgtgtccctgcagaaggccagaacctcctcataaaactcaggaaacccaggaccgccagcaacaggcaggaggcccctctgctggagggagtggactgggccctgggtcaggggagtccacgccgtgacctcaggtgggagatgaaggttaggggacacagcccgaccctggctcccgctctggccctcagtcttcagggggtgagcagtgactgcctgtgtgtttagagaggaaaccaacccccagacagcaccaggacagcgggcaggggacagcgggtgggggacaagckggcrggggacagcgggtgggggacaagcgggcaggggacagcgggcggcggctgcaccaygggagccttacagatgccaggagggggcctcgcagacgaggaaggggcacagcctcrgccaccggaggccagggcgactcgcagctcttgcccttgcagtgggaaggtgggcgtggcgtgcaaaagaaatgccaagaaggcygagtcggggaagagcgccagcaccgaggtgccaggtgcctcggaggatgcggagaagaaccagaaaatcatgcagtggatcattgagggggaaaaggagatcagcaggcaccgcaggaccggccacgggtgagcaccccgcacgcagccagcctcgtggggcctgctttgccacccctggcctccgcacagtctcagtgtgtgcagcttcagtgtgtgtggcgagtgtcgcctgtgacgcctcacacttcccctgtcactgtggcaccctcccgggcaccctccagcaggctccctgggccccacgtctccaggaggaaaacctcatgtccccagagagaggctgtccctgaagccccgagcaggagggaagctgacgtggctgtcaccccgcaggcagcacagatgctctcgggaggtcatttccagtctgacccccacatgagaatgacctaagtcacctgggaaggcccccactgaccatcactcccgaggtgcccacggaggagccttctgtgctcacacctggccgtcctgctgagggctggggaaggctcttgtgtagcgtgagcacttctctcctcccagaagggcagaggcctcgtgtgtggtgtggagcaaggccccggcgccacaggtccagcccctgccgctgcccgccgggccggtcttggtgttgctcctgctcgccccctgggcctgcactcgtgcccggaacccagcaggagggccaggggccccacagaggtggtaccccccaccttcctgtcgtggtcagaggcaggtcagctgggaagtgttggccctggtgggtggatggccccagcttcctcagacttaggtcctgatctgccccccaccctcacccaggccctggccaggacgcatctccctccacattacttgatgagaacttgtgaggcagctgagcgcctggggcgtggccctcctgcctgtgttggaagcctgtcccgcaaggccttggggtccccatcggtgctgactgaggtggggacgggctcatcgtttttctggggctcccgagggaacaggggtgcacagcaccttgcctggctcattttttgtagagggggtctcagtgtgttgcccagctgggtctcaagcttttgggctcaagygatcctcccaccttggcctcccaaaatgctgggactacaggcatgagccaccattcctggccttcgagtcttttttttgagacggagtctagctctgtcgcccgggctggagtgcagtggtgcaatcttggctaactgcaacctccacctcctgggttcaagcaattctcctgcctcagcctcccgagtagctgggattacaggcgtgagccaccacgcccggctgatttttgtatttttagtagagaccggggcagggggtggttgccatgttaggctgatctcgaactcccaacctttggtgatccgcctgcctcggcctcctggagtgctaggattacaggcgtgagccaccgtgcccggccgaatcctttttttaaatagctgtatatactaaatattgcatgtcccatattttaggataagtattaatacattccactttgagacatacttatactttttattcattaagactttttttttaattttttgcgacagagtctccctctgtcaccctggctgaagtgcagtggtgtaatcacaccgttcactgcagyctcagcctcctggactcaaagctatccgccggcctctaggattagtatataatttgtatcccagtaaagctgttaaaaataaaatgtaaaaaaagaagcctcatcccagcactttgggaggccgaggcaggtggatcgcttgaggtccggagttcgagaccagactggccaacatgacaaaaactccatctctactaaaaaaaatacaaaaaattagccgtgtgtggtggcgagtgccagtaatcccagctactcggtggctgaggcaggagagtcgcttgaacctgggaggcggagattgcagtgagccgagatccgaggtcgagccattgcactgcagcctgggcaacaagagcaaaactctgtctcaaaaaaagaaaaaaaaaaagtctccatgaaagaattttttttttttttttttgagacggagtcttgctctgttgcccaggctggagtgcagtggcctgatctcagctcactgcaagcctcgcctcccgggttcatgccattctcctgcctcagcctcaagagcagctgggactgcaggcgcccgccaccacgcccggctaattttttgtatttttttagtagaggtggggtttcaccgtgttagccaggacggtctcgatctcttgacctcgtgatccgccctcctcagcctcccaaagtgctgggattacaggcgtgagccaccgcgcctggcctttttttttttttttttttttttttgagatggggtttcgctcctgtggctcaggctggagtgcaacaggccagtgtcaacgcactgcaacctccacctcccaggttcaagtggttctcctgyctaacccacctgagtagctgggattacaggcacccactattatgcccagttaactttttgtatttttgtagaaacagggtttcaccatgttggccaggctggtcttgaactcctgacctcagatgatccacccgcctcggcctcccagcgtgctgggattaccgcgcctggccattttttttttttttttttttttttgagatggagtctcactcttgcctaggctggagtgcagtggtgcaatctcagctcaccgcaacctctgcctcccaggttcaagcgattctcctgcctcagcctcccgagtaactagaattactggtatccaccaccacacttgggtaattttttgtattttttgagtagagtcatggttttgccatgttggccaggctgttcttgaactcctgacctcaggcgatccacccaccttggcctcccagagtattgggattacaggcaaatgagggttggttttttgttgtcttttttattcctgagactgagcctcactctgtcacccaggctggagtgcggtggcgtgatcccggctcactgtaacctccacttccccagttccagccattctcgggccccagcctccagagtagcagggatgacaggcgcccagctaattttgtatatttagtagcgatgaggtttcaccatgttaggttgmtctcgaactcccgacctctggtgatctgcccgcctcggcctcccgaaatgctgggattacaggtgtgagccaccrtgcctggccgggatgtttttattgtgtggtctgtggaggacgtccatgtggcttggtggccaggccccagtgccccatcccatcctatccctcaaggaggctgcccttgtgagatgagtgtagccccaccaggccacctggccagggtgtcggccacagtcacaacttgttctcttgttccccaaggtcttcggggacgaggaagccacagccccatgagaactccagacccttgtcccttgagcacccctgggccggccctcagctccggacctccgtgcagccctcccacctcttcatccaagaccccaccatgccaccccacccagctcccaaccccctaacccagctggaggaggcgcgccgacgtctggaggaggaagaaaagagagccagccgagcaccctccaagcagaggtacggccgcgtcgtggggtggggtgggtcttgggggttaccacagcaccactcctggggctgaagctccccgaggcctgaggtcttcaggggaaaaacggccctctgggtgtcccccagccatactgggcccttccatccactgagaaccactgaggggccacgtggcaggccaccctgcggtggacggaggctggggctggagctttcacacacccgaggccgccgcgctcattgctctggaggcggggtccctcctcaacctgagcccagtctgcagggaggctgcagggccccagtgtgtggggaacgccggtccccagccagaggctgctcrctgctgggcagcctgggctttagggcagaggtcctggaggcatggcggctgcctcttgacagttgcgtcccaggagccctgagtggctctgcacggtcggaaagctacgtggttctgaaagccgtgcagatgtagaagtgtcgtcctggacgtccagcccacagccctcctcgctgtgtcctcttgtcatcctggatgtccagcccacagccctcctcactgtgcccttctctcatccgggacgtccagcccacagccctcctcactgcgccctccttggtcttctgggctccgtagccagaccctgttctctccctagggcagggaggcttctgtctgggctgcagggaggtctcccctttgtgtgggcagcattttcrctccaggccagaacctggcttctccattttcagcttgctcataaggccagttttctcggccatcctgggtcattggaattccccacagatcagtgtctctttgagggtcctgggagcctatagctcacccaggccctggggctgtggtcacagaggccatggttgccttcagaggtcaccagctcctcctgtccaccttgggtcacctggggcctggggtccaggcccgcctcccgggcctccagctttggggctgtgccactccagggaggctgtggctaggggccttattctgccgaaccagcatcagggttcagacccttcccagctgaargcctgtgtggtctcaagtcattaaaggttcctgagcttctgccaggctgtgagcctaatgacagctctggggccagaaagggtcacagttacctcaaacccaaagggtgaccactttatgaccaaacatctgtgaccctgtgatcgtgttcggccaacaaggagctggagccccctgccatgcaggagcctggagtgtggtgctcggagccggggcgtgtgactgggctggcagatgagccgtggngggcatcgtgtgcagcaggtccgaggccctgggcgtgtgtgggctctcctgccggggcttcctgagcccatccttgctgggctgagcaggggtctctcaggttgcgtctgcsctttcccctggtacccgtggccccacatgatggcaggggatgccygctgagccgtgggaccactcccgccgttctgagacacgaccctcccgcccgtttggctgctgggctccagcatccccccatggggaaacccagagttgctgggtttgtccgtccaggggatgtgggtttttgcgagaagctgtggagacrgagtgaaggcccagaggcaggttgggtgctgggccctgtcaggatgtcagagtagaaaccaccatcaaggtcgcccagtgtaccccggtggaggtgtccacgtgagaggagctgctgtgctgccccaggatggcctcagttgtggcgccggggggccctcagcctccctgaggtgcagaccgagttgccacgcaygccccagagccagtgtccacgctatyggtggggaattcatgccaagagactgaaggacagactctcgggacgagatgtcatcccaccagaggggatgaggtggtgggatcccagcacccctgatcggaagctccccaaagtgcggtccagggaactcagggggttggtgccgggatcatgaatgtggggygcgctgcagtatcgggtaccaccraggcaggcctaggaggggactcggtgtcttgtctaccctgcaaactggagcctgcgcagggtgggttgttcgggcccttcacgctccgtccgtccctgcgcagcagcattggtcgaggctccctccccagggctggtggccgccggcacagccacctttgacgcgggttgttccctaggtatgtgcaggaggttatgcggcggggacgcgcctgcgtcaggccagcgtgcgcgccggtgctgcacgtggtaccagccgtgtcggacatggagctctccgagacagagtacgtgcgtcctgagggtcctcccggtcctgcccaccccagccctggcgtcccaagccaggtcccatcgtagagccgccgtcccggggcttgagctcgggtaccacgctyagaagcagctgtggcaggagagggtcccgtggcatcagactcgaagctgcccgagagccttctcctgtctccatcaaaggagacgctgactgtccagcatgatgacaagtgaccaaaaggcccggctggaggcctgggcacagccagcccctgcatccacacaggtgtcacggccaggcttcctgtggggcagagacctgcctgcgcctccacccggcttggaacgggccggtccctgccaggcctgacttgaccaggctcggggctgcaggtgctgaggtgcccggggtgcgtctgcttgcagtgtgggtctcagccatgcgtgtctgtccagcccgtgcagtcagtgagtcggggctctgctcccacctacaatgctgactgctctgaacccgtgagaaagggctcagaccatgtgatcccacatgggccgtgtcgacggcgcctttatgtgctcaaggtggcaggaggagggggcacaccccaaaaggggccttgagaacaagggtcccccaggccttgccaggcttgccccagatgcaggtttgttgtggccctcatcgtgtaggcggtcttggggcagccttcacctgtccctggggcagcccccacgtgttggctcttctctgatgggcctggctccaggaggctccgaggatgtggcactgggaggacgtctaagagcgcacgtggctgggggcctggtgtgcaaagaggatggtcacatggctcaggtggccatgaggccttcctgccctggtgttggctctggaagcctctggtgcacccagccaggaggaggcccaagggctgaaccccagtgggccaggggcagcttctggagtcacttgaaggacaggtggcggcggggtagccgagtggggggtgcgagagcaaccaggccccgcccgtcatcccggcacggctgtggaagcacagcacctgtcagaggagggcccggctcagcctgggcaggagacggtgccagccctgccccctctgaagggcctgctggccacccccgccccagtcctccgacaaacttcgctgcggggtcaggcttatccagaaatcgtgcacagttctgtttgtccaatccctgcccttcagatgtttttaaggtttgggggccgtaggtcttcctgagataggagccctgcagcctgccctgccatcctagaggtrggagctgcagtgcacctggcagccaggccctggccagtcgagggtggggctgtgaggcagcagggagaccttcgtgctcccagtgagcggagccgactccactgctagcggactagatcccagattgagatgctgtgcgggggctgcgggccccaggtgtttgaatrgggtgctgctcacccctgcaggcctgccccgccttacactggcagcctgaggccrgcaggagggaccctgtgggacctcagtccaaaaccaggtaccaccgctgcatctctttccccaggacaagatcgcagaggaaggtgggcggcgggagtgcccagccgtgtgacagcatcgttgtggcgtactacttctgcggggaacccatcccctaccgcaccctggtgaggggccgcgctgtcaccctgggccagttcaaggagctgctgaccaaaaagggcagctacaggtgagtgtgagggctggggtgcccmctccccgcacgagtatgtgggtgcccaacggtatgaaaaagagggtttccagccgggcacagtggctcacgtcctaatcctggcactttgggaggctgaggtgggcggattgcctcagctcagsagttcgagaccagcctgggcaacatggtgaaaccccgtctctactaaaaatactaaagaaattagccaggtgtgctacttgggaggctgaggcagaattgcttgaactcgggaggcagaggttgcagtgagctgagatcacgccactgctctccagcctgggtgacagagcgagactctgtctctacccccgcccaaaaaaaaaaaaagaagaaaaagggcttccggccatttcagctcatgtccctcatctgcaactaaagccacttctccaagccctaggctgagggtggcatcaggctttcggccccacaggactgagagggtccaaagggacccccgtccagggccctcatcttcggggtgggaaaacagaggccagacccctagacgacgatggtctgaaccttgtgttaggctcccctaggccgaccttgtctccaggctctggactcatgtgcttttgcctgactgaaaagccaagccccctcctaccaaggttcattcgccctgggccactcagccctgcagggccctgcgtgcagccagccttggaggctcccgagtgagcactgggcggtgagcagagggggcctgaccccaagagcctggcagagcctggcgggtggttcccaccgtccacaagccactgtgcaaacaccccatgactgcagatgtggtgctgagggagggccccagttggggtcacctccatgacggggctcagcccttgggaagcagacaccccacacccgtccacttcccccctgcaactcctgagaggctggggcaggtactcccagggggatgtggggtgctcccagcaggcagtgaactcaccccccatggctgcccacttcacccacatgtggtcattgcactgttcactgttgccctgggagggggcgcacatgcagtgggggccgtggggcatggacaggaggctcctcgggatggggtgtggacacgccgtcccctgccacaggcctccttcccatctgcggtgctgcctgctcactgccctcctcacctccgtcctgcagatactacttcaagaaagtgagcgacgagtttgactgtggggtggtgtttgaggaggttcgagaggacgaggccgtcctgcccgtctttgaggagaagatcatcggcaaagtggagaaggtggactgataggctggtgggctggccgctgtgccaggcgaggcccttggcgggcacgggtgtcacggccaggcagatgacctcgtactcaggagcccgatggggaacagtgttgggtgtaccacccatccctgtggtctacccgtgtctagaggcaggtagggggtccctccaagtggtccacaagcttctgtcctgcccccaaggaggcagcctggaccactcctcatagcaatacttggagggcccagcccaagtgrggcagccgaggtccctgctgccagcttcaggtgacccccccccatcccccggcacctcccttgggcacgtgtgctgggatctactttccctctgggatttgcccacgtacccaggtctggstggggcccaggcccggatgcagaggcctgcagggcctctgtcaattgtacgcgccaccragtgccttcaacmcagcttgtctcttgcctgccactgtgtgaatcggcgacggagcactgcacctgcctccagccgccggctgtgcagtcctgggtcctcctttctgagggcccgtgtaaatatgtacatttctcaggctaggccagcaggggctgcccgagtctgtttttcatgcgatgacacttgtacaattaattatcttttcaaaggtacttggataataatgaaataaaactgtttttgaacctgccctggctgtggtgtgtctgctgcgggtggggcctggcctaggtctcccagcctcagcccccgtggtaaaggagggcacactggcctccagcaggcatggggatcacctgtgactcagaggctggcagggctagagcaggaacgtgctccaccttcctgccctggagcccccagctgggcagagctgcatcaggccagccttgctgagggaccaggcacacagagtccagaaccaagctcactctttattcacaatgcacagctccctctggtacccaagggggtggctcctgtccagcagtgatggcgggggtgacacgggggcagctacagttcctccttggaccccatagtggagttggccggtggctcctagaaagggtcacaagtgcagctcgaagctctgctcccagcctacccctgcccccgcccctgccagccctgtgtaaagaggatttgtgcagaggcctggagccctggcttagggacacccaccgggaacggggctgctggctcctccgggggctcctccgtgggcagcacgcccccgttgtccaggaacttggagaaagtctccaggtccctggtgcttttgtattcaatcacctgagaagaggcagggggatctggaggacacgtggggcccagccccatgcccagcaagatggcaccccggcttcctccccagccacctgtccgccataccttccgacctggccctgctgggaagtacttgagagtagggaagccgtgcacagcgaaggcatccagctcgttggccgtggcatccagctcagcaatgatgatgtcctcgtggtcttggtacttctcagccaatgcctcccaggcaggggccatctccttgcagtgggtgcaccacggggcatctaggatgggagccgttgagcacagccatctgggcagcccctgcccagcccacaccacccctgcctccctcaacactcacagaacttgacaaacacattcttggtttcgtcaaaagccacctgctcaaaattcttgcccacgagggtcttaactggccgctgatcccaatcagggggtatctcctggctcaggagatagggctgggggaaaccaggacaggcgctttgccaggggtcctctgcagggttcaggaggtcctgtgcagggcctggggggtgggggggaggtcctgtgcggggtcagcggcagggggaggttctgtgtggggggggcggtgggggggaggtcctgtgcggggccgggggcaggtgggggggagatcctctgcagggcctgacagggaggtcctcttcaagtttgggagaactgtggggtttagtggggggagggagaactgtggggtttggtggggggagggacctctgtggggttggggttgaggttggggttgggagaaccgcggggttggagaaccgcggggttggggttgggagaaccgcggggttgggagaaccgcggggttgggagaaccgcggggttggggttggggttggggttggggttgggagaaccgcggggttggggttgggagaaccgcgggtttggggttgggagaaccgccgggttggggttgggagaaccgccgggttgggagaattgccgggttgaggggggcctctgcggggcctgcaggggcagggggctctgagagctgctgttcccaccccctgccaagctggtgggatgaggtcagggttccccttccattatgagcagtctgcagcggaccttgacttggccgttgaggactgcatggcagaaagcagtgatggacgctgcggtgacagggcccccatccacaggcgcatacttcttagtggtttcaaggttgaccaagcgcagagtgggggctgcctcagccttgagtccaaagtactgcagcacgtgctcattgtcggccgccacgtccaccaccacgaacagcacctgtggcagggagtccatgctggcaccggccactctcccgctgcccctttcccccagccccccagtacctgcccccggaagcggggagctgcctccccaaagcccgctaggagctcccggtgcgcagccagcgtctggttgacaaacagcagcaggtggttgaggatcctggccgcgaagatcttggcagacgtctacagtagggagggtgctcatgactccacaggacccccagcctaggcacccccatccctggacgactctaccctgggacacccccagcccaggcactgcagcctacgcacctggctgttgaactccgtgaccaggcgcatgctgtgtgtgaccaggaagcgcgacagatcccccaggtccaggccaagctcctcgtccacggggaagtctgcccgcccctcatcaaactggacagcagcaggtgggttagcgggcgctgcagccggaccccaacccacacctgggcctgacctaccttcttgaagagaaccacagtgtccttggtgaggccaaactgctgaaagagccgcggccggtctgtgaggccaaaggtcatgtccagggcgtcctgggccaaggccaagaaggtggccacgtcctcgtcctgcaggtcctgaggggcctggccctgtgaggccacccggtcccacccacagtcactgccctcatggcccggccccccatgcccagtggctcacctggaagaagccaatgaccactaggtcccggccaccgatcagcgcctgggcggccgcctcgtcctccagccgcatggcactgggccccacccgccgtcgcagccactcggcaatgccctcagcgtcccgtggtcctgcagggagtccccctcagcctcggcctggccaccgcccccccaatgaccggcctgcccctcacctgtgtactcctccgggtgcgtgcggttcccattgcggaagaacttgagcgtagggtactccgtcacaccaaactcctcagccagctcgcgctgcgcgggcccatccaccttggccagcgtgaccaccattgactcggccgcgagcacggcagctgccttgctgtactcgggggccagggcctggcagtgcccacaccacggggcatctgggggatggggccgtgagtgccccaggccaccacaaccccaggagcaccctctccacacctgacaacccagcagggaacaagcgtgctgctccattctgccctgagccctggccgtggacaagccgagcaccagtgcctcttcgtggccccccaggctgcagcacagggaccagtaaggcttgggagagcttgaaagaccaccccccctccccccacagccaggctcagtggctcacgccagtaatcccagcactttgggaggcagaggcgggcatatcacctgaggttgggagttcgagaccagcctgaccaacatggagaaaccccatctctactaaaaatacaaaaaatattagccgggattggttgcgtatgcctataatcccagctactcgggaggctgaggcaggagaattgcttgaacctgggaggcggaggttgcagtgagccgagatagggccactgcactccagcctgggcgacaaaagcaaaactccatctcaaaaaataaaaataaaaagacccctccctttcgtgccttgtatggctggggctcccgggcccatgtggctgcctgtgaaggcctcctaggcaagaacagttcctatgtgtgtcaagggttgcgaaaagaccacagggcacacacgtcagggacctccatgggcccccaaagcctggatactgcccgagcctctgcagagtctgtgggatgcccctggcagctggaggagtggccggcaaggtggtgactctggcaccgtggccgctggccgagcagggaggcacaggtgttctcaagtcctgtgggtacccccagtactaccacactgctcctgcctgccccaaccagacccccaggcccctcctagagagctcctgggcacagtgggggcaagtgcctgcggggaggcccctcttgggcacatgccctgcatttgccggcaaagggtggggcccccaggtgggctctgccggtcccccgccggtccccagccccactggccccagcactcacagaattccaccagcagggcagggtgctcccgcagggccaggcccagggtgtggcggctcagcaccaagatcccatcctccttggggatttcctcctctggaggctcctccgaggggctcctcgctccctgttcctgaccccatgggcacgaagccctgagcagcagcagcagcagtacaggcagaagctggcggctcatggtgctgccagggcgcgtggggcgggggcagataagggggccagaagccaagcagcagctgccacgtggcacacaggcccagtcccagcaaagacaaggcccatgcggccgcccccggcccccaggggaggggaggcagaaagagacgacacccagggcaccgagacagggccatgtttaatgggacagctcaggggacagcgccaggcccagggggtcccgggacagagcaggggcagcaggggcagcaggggcagcaggggagggtctggtcactcacggggggtgctggggatgcttgggggtccctgtgcaacaactgagggaggtaggggagacacggactgggggttcagtccttccagtcctggcagatgcagagaccccactcccaggacaggtggtgcgtcctgtcatcgtcggtgaagagggacaccaccagataggggccccgcaccagcgcacccctcggcgcttcctccaccggagtcacaaactcatactcctgggcgctcgggccatagctgcccaccatgtagacggtcttgtccactagggagggcgagggcatcagagctgtcctctgtctgcccccgcttcccccccccgccccgttccccccaccgctgccctcaccgcgcaggccccggcggtaggtgtggtgcagacacttgaggccgctgacaatctccctgtggacctgggaacagaggcattaggggttcctctgggggccaggcctctggctgttgcccccacccccatcccctccgcccattgccccggctctcaccttgaaggagatcttcactctgtaatcaacaccttccttcaggacaaacacctggtccttcagaacagccaggtcccctattggggaaacctcagctagggtcggaactcccctacaggctgagacctgctccaggagcccccacgtagggtgtggtacccatgaggtgtgcgactgtgatggcccagggctcggaactcaggggtgcagaagcgtgcctgggagggccctacctgtgttcagggtgcagcatcctgcgagttacctgtgagatccatgacgacgggccccggagcctgttccgacaggagtgtcagcctggtcacctgcacattgggcaggcttgggtctgaggagaaactggaagtctgcaggatgccccccacccccaccaggctcctcaccagccccccagacccagccctccaagcctagacccctgccatacccacggccggtggcaggggccccagcagcacccgcttgtacttggccaggctcctgtcgtccgggtccagctgccggatctccaagaggctcttcctccccggcgcccggtactcgggcacagcctcatccaacacctcgtccactgccggcggcccaccctccttgtcagccaggaggactgggggtggggaggggcgtgagcagcagccactagcggaccctggcattcgagcaccaggctggagccccctctggccagctgtacctcccactatccaaagggactcaagggaagcctctgggggctcagggagagagcgagcagagagagcagggcggcctggggaggtgccgcaccgcacccagaccttcaggaggggcctccagagaccgccaggcctgcagctcctctggcccagatgtccacaagggccccctccctgactcggagaccaaagggcgggggagcgaagacttcagatgagggca

SEQ ID NO: 96931 - DNA, 14772 bp, Homo sapiens
  misc_feature (1)...(14772): n = A,T,C or G
aaagtgagaggaattcaggtgaaagtggaaacaaactcttccaatttgctctggagaaagaataatcatagtaaaagtaccagctcccatttatttacttactgttcacctaccacatgcaatagaccttccatagatcctttcggtaatctgcaggattggctggcgttataaaaccggttcagaagcctaaaaggcttgttcaaggtcttagagctcaaaagccagaaatttctagcgttggctgcacctgacgctcgctcaccagaagcttacacttgtgtcaaagccccacccagactaagtaggtctgagtctcacaggtgtgacctgggcaccgggggaagctctggaggctcggaggctgagaactactgttaattaccataaagagtggacggtgggccctgcatatgaccacaggacttcatgatcctcaaatccctggaactggaggtcaaacatcccatggatacagggagaaaaaagcctgtggaggcagagtgtgaggtgctggatatgaaactgcttcttccctgcatctccccaatcttgcatccttcaaaatgatcttacccccagactagacatccctggcctctcactgacccgccgtataacctcaggcacattaagtaacgtctctgtgcctcagtttcctgatctgtaaaatgggagtaatagcaattggaactattttgtgggctggcagaagtccttactgtttccccagccccagagcagtgcctgcctgcaaacaatcattgaataaacagtaaatgctcaacaagcagcctatgaagatggcgtctgactcacctttctactccgctgcttcccaggtcctgtgaacacgaactctttgcatgcatcatcggctagaaatggaccccccagatctctctagaaaagaccctgcctctcattttcctatcagccgttgggaccaagacaaaagtgctggcagacgctgaggacattcctttcccgtctgcagccccagctgctggcttctctgcagactcaaagggacacaaagacacactcagccaagtgcacttcagttgtcaaggccaggggttgccatagcaacccataaagccggagccgtgggcctgtgcagatggggttaacagggccccattcaggggcagtggcacagggacagaggctttatctcacatccacttttctcctccgacttcagctgcaacagcctcttctgactttcccctccgcatgggccccagccctctctccctgcaggcatgacttcctatcacctgcctcttgggcatcataaaattatcagtgacttgtatagggagacagaaatactgttcttggaaacaggcaaatgtccattcctaagaaagactgagaatgatgtggggaaagtaacaagagccagaaattgggtctaaagtgtggctgggccatatatattacctaggcaagttgctgaactcatcagtgccttagtttctgcatctgtaaaatgggaagaatgaaatctatttgtggggtcaggaggcactcaactggcttagggtcaattgaagaaagtacataggatgtggaagagatgcctgttgcaggccattttctgtttccaaagagctctttaaaattgtgcattttggctgggcgcgatggctcacgcctgtaatcctagcactttgggaggccgaggcaggcagatcacctgaggtcaaaagttcgagaccagcctggctaaaatggtgaagtcccaactctacaaaaaaatacagaaatcagctgggcgtggtggcaggtgcctgtagttccagctacttgggaggctgaggcaggagaattgcttaaacctgagaaccgaatgttgcagtgagtagaggtcgtgccactgctctccaacctggcgacaagagtgaaactccatctcaaaaataagtaaacgagtaaacaaaaattgtgaacaacttctttttttccttctccttctcctcctcctcctccttctttcttcttctttttttagacagggagagacaaggtctcactacgtttcccaggctggacttgaagttagtaaaggcacttcttctatggcctgatgagctgctaaagactattggcacatgcggtggtcctgctaccagcctcaacatccagatttcatgagaaagaagctgatctgcctcatcctcatgctcctgtctcagagtcctctctgcccacctcaatcaggaatccagggagaacgaacacatcgttgctagcaggcaggtagttacccagcctgtgaaaaaactggagagaaaaatgaacagacagggcttcacatccaagcctccgaatgtgagacacagatagcctttgttctggaggtaggaaataatatggaaagaaacatctgcaaaaggataagctagctttggatttctgatcctacaagggaggaggagtgaaagaatggaattggcttagaaaggatgcttggacccatgctgaagtagctacccgggccaacgccacagaaggtccggcttgtaaaatctgtttgttcagttcaataaatgctttctgcacacctgtgccgagccccagagattcctcagtaaacaaggacacgtcctgctgtgttctgtgggatctcgtgttcccgtggggaggcccaacaagcaacaaacaaatcaggtcggtgtgattggaggaaacgcacttcccgttcagagaaaacaaaccactttcacggactccagaaaccgctaagtacgcaaaaatcacagcgtataacaagtgaaacatttatatttccttcaaggaccacacagctccagacttggaaacactttgttggtggctggagtcacgctgtgtgcctggcagcattcctacatgcacttgcaaagaccttaacttttctgtaattcaaagtatctttcatttatgcctgtgtgtgcaggtatctgctctgattttacgaatgaatgccaatcgtgtcaaggtttcacatacaccgtcttatctactcctgggaggcaaatacttctattcctgttgttctctaaaaccctgccccctgactgaggctgccatttaggggtcatcttcccagaggcaggggctggctcaggggacctcagagaccagctctgggaagcatgtacctggagggtgccctccatttccagggtccagaacggtgtctggctattgtaggtgctcaaaaacacttgttgaattcaatcatggagtttcagccctatactctgacaactacaggaactgaactgaaaagcaacctctgagtcccatccgtcagattaatgcaatgtttctcaaactttttttcattgccattcccctaaagattctttattagctacataccccatgaaattttaattccacagataaattgtacatctgcttatgtattgtattttatatctgtactttattcataaagagtaagatttcttttctttcccataaatgttcactctcttgggaatactgatcccactaagaatgcagggattaagcgcacacctgccatgtgccagttgctgggttggacatttgttctgcttcatcttattccattcttgcaacagtattacacagtatgcatcatcagcgctatgagactgaggatgagactgaggttcagagagggttgtggcttatcctgtgtcacacagcttgtcaacggcagagccagtcttcaaactcgggtctgtgaggctttaaagctagtgctgttctgtttccttgcacagagaaataacatgcccaagctcacctcatggagaagaggtgacctgggacctgatgtgtaatcccagcatgttgggaggccaaggtgagaggatcgcttgagcccaggagattgagatcagcctgggtgacagagcgagaccccatctctaaaagaaaaaaaaaaagaggtgatttgggattttaatttaattcttaaattagtccttctgattccaacttcagtttctttttacccaatacgttgcctcaaaaatatctttaggctacttgacaaactcactgggtataaaaatcagtgtcttggactatcttaagagagaaaggaacagaaaagaaggaacagaaagaggtgcctgatggattgattgggagactctggtctaagctacagcaccagggccagtgtgtattaatgtaacttagaaatcaattcactgcactgtcacctgctggtctggtttggtttggagtcacaatgaaggcacaggtagtatgctctaagacagtactgcccaaaagaaatataacacaagctttcaatgcaaaccacataggtaattttacattttctggtagccatatgaaaaaagcaaaaacagctgaaaccaatttttttcatgtatcttatttaacccattgtatctaaaatgtaataattttgatacataatcaatatagttattattattacttttgagatggagttttgctcttgttgcccaggctgaagtgcagtggcacaatctcggctcactgcaaccttcgcctcccaggttcaagcgattctcctgcctcagcctcccgagtagctgggatgacaggtgtgtgccatcactcctggctaatttttgtatttttagtagagacaaagtttcaccatgttggtcaggctggtctcaaactcctgacctcaagtgatccacccgccttggcctcccaaagtgctgggattacagacgcgagctaccgtgcccggccatcaatatagttattaataagatattttgcatttctttttcggatgtgtgctaagtcttcaaaatctggtgtgaatttcacactcacagcacatcacagtttagaatagccacgtctcagatgctcaatgaccagatgtgatgaacggctactgtactggcctgtgcgggctgacgcattgcatcagaattggagtgtggtcacaggaacatacaatctgacctgctgaaatgccacggcctgcctgggcctgtctgctgcaatgacgtaggcacaagtagtttagtctaggagaggctctcaacgggatccaataaaaagggagagcagacagggctggctacatgatgtgtgggacccagtgcataaaataaatattcgaggccccttgtgagaaaatggttacgaattgcaagtcagtgacatggggggatcttctgaacacgggaccctgtgtgaccatatagatcacaaacccatgaagcacgccctgggtacagaagaaaaaacacccttcaggtttccccatcactggccaaggtgagggtgctgggatcacgactgcagcaacaaatacaattagcagcagcaacagcagacacttgctcagcgcttactttaggccaaaccctgttctaagttctttatatatcataatacccatcagaacaaccttctgatattataattatccactcgtagcaaaaaaaagaaaaaaggaaacagatcacagagaggttaagtgatttgcccgacatcacacagccatgtagtatctttagtactaaatttcacaaaacagggggtgggggcataatgtggcctgggcttacaactagctgtgcctctgttttctccactggaaaatgggtgtgatagagctctcccatccccaagctgctctgaggatgaaatgagataatccacgcgcaaagctaagcagagtgcccagcctgggcactggaaaatcttcagacccacataaaagttatgaacatagttccacagccgcttgtaatcctcgaaactgttaacattttgccacactcgtgcccactctattatctgtcttctgaattatttgagttagttgtggacattgtgatatttcatccttgaatccttcagcctgtatcttctaagaacaagaatgttctcttacataacctcagtacaaatgatctgagatacaaagtcactctcatgaaggtaccattaataaaatactattatctttttttaatttatttattattggcatattcatgacataaaaatactataaatactattatctaacatacaatctatattcagatattcccacttatccctaaarcttctttaattgttttttttttttttttttttttagagacagggtctcgctctatcacctaggctggagtgcagtggcatgatcatggctcatggctcactgcagcctcgaactcttgggctcaggtgatcctcttgcctcagcctcctgagtagctgggatcacaggcacacaccaktatgtctggttagtttatttttatatttattttttgtagagatggggtctccctatattcctgaggctagtctctaactcttgacttcaagtgatcctcctccctcggactcccaaagcactgggattacaggtatgagccactgagcccagcccacaagtgttttctgttcccctgatccaggcttcatcctaggatcaaacattgcatttggyctcatggctctttaatctcttttaacctggaaccatttctcagcccttttgccttttaaaagacattggcgttttaggaatcccagccagtcattttgcatgtagttgcgtgaatagtcttctttatgtccttgcaaaatgaagtgcagctcacgggcaaatgtggagaaagaggtcggttggacangtgatgtcagagggtccaagtgatttctgcaggtagaggagggcgtatagtgttagctgttcttgggtygaagttaaagatttccgggaagcagtgacgggatgtttaacgataattagagcttggcaggtagacaagggcagccgtggcagacagaggccagggtaggggaagggggatggcagcccggaggaaatgcaggcagcagcaatgtgtctgagggtgagcgtatcgcgtgtgatcgggtctgttcctatttgaactggaaactccctgaggccagtccttgtctccggctctgtcctctccgccagggtgcccagtgcctactccagagtcagggttcacttagagcaaccggctgccaagtttcccaaatacccagggacatgcaaagcacagaggacccccttcctccggcagcggcctggctgccagcttgcacacaccaactgcaggatcttcagcgccaacctttcaggattcccacatcttgccctgcaaatgaaattgcattttctaaaattgctttcttctggttgcctcttggggcataggctgcttctgggaaaaaattcaaaatgaacttctaatcagccacaagatgtgaagagagcggctgtccagagcttcctgacatctactcttggcgtgagccgccctggctgtcaactgagattctcactgcaaactctatctgaaatgcccagtgacagcgccccctgagccttccattcccctgagtttcaaagagaaaggggtgtgtgtgtttgtgctgttcttgtccttagaacgaagggaaaggatttatttagcggcttgaacaaaaatgccttttcaaggtgaccctcacttcatttcctaggaccagatgcaggcggactgtggtgttgcaagcctattgataagagcaattccttatctcatcatttctatatccatctttcattattttgtccccactttaaagggtctcctcctgctgtgttcacaaagtgtccttgaaaaatctgttaagtacatttgtgtgtcctacacacagagagccaggcacatgtgcacgcatgtacacagatgcacaagggtgtgtgcccccccgacctgcacaccccaacaccacagataacaggcactgacagacactggcaccacctccccatggcagcaaatacatacacatgtaaggatgcacacagagacacacatacacatttgcactcacggtgcctggtagtcggagtcctgcggcgagctcagctcgcttgcttaaaatgccttctgtatgccattctgcagagrccaggaacgcagctggctgggttcatcctaagaggtgccgttgggcaccagctccctcctcaggagggtgtcccggatttccaggcagtccccaaaacatggggacaggtggaggagacagaaaagggccccttggaagcagagcaggtttgggaaaaggatgcactcagctggtacccggcaagtgcgcaagggagagggacggagggaaggtgaaggaggaggggaaagacagaatgtgagagactgaaagatggattcagaaagacaagggttttcagacagaaacaggatgcaactacacagaaacaaagattaacagaggcagaaggagagcgataaacagagagaaaaaaatagaatacagattttttttaaaagatgttttaagcccagcttggtttaagccagaaggataagacacatcatttcagaccttgtaaaataggctatctccctcccctttttccttccagggcctcttcctagatttttttttttttttaacaggctcaggaacccctgaagwgacaaagcagaaatcccgggcttcagattcctaaatggcttccccaggactctgctgatgcagtgttgtggacgcagccacagccatgacggggctccgggrggcgccaagtcatctccaagacacccaaggcagaggggctgctctggcgcccacgctccacctgaccccgcctcgggggttggggaggaacctaccgggagcgattacccaactcccccattgtagcccatgctgggtcaacgcaggtccacagggggcccagaagaggtaatgagggtgatcacaagatggggagggggtatggggttgggggggcagagagctttcggtcacatgctgctcatcagttaccatgacgacggcaagggggtggaggcacccagaatggaggctgcaggagagacacactggttctaaatcaccgtgacagcgcttcggttgagctattacgccgttgccgaggcaaccaatgggatcaaatcgcagaggaaatctataattattacaagccagataccggcatcctcggtgcagtaatcagcacgttagggcaattcaacctgaactttgagagggagaaacgtcagcccccagcccccagcccccaaatcggggcagaacaagggccaaaggggactccacaaagcagatctgttgatgctacagattgggaacctggaaggatctttttggccaaataaaacataaattgaggggaaccacatgaaattgacaatattcaccagtgagccacggcgcctagaccatttcccatgattttttatgaaactttccaatgcacagcaaagccgaaagaattttacggtaaatacctatatacccactactagcctctaccattaacatgattaccacatgtgctttatcacatcctgtttttgatgcatttcaaagttaactgtagacatcagtatccttccccccaaaatatttcaacctgcataaaagtaagcacttggtaatttttaaaacaaaaatagtaatttctttcttttctttttttatgagatggagtcttgctctgtcatccaggctggagtgcagtggtaccatcgtggctcactgcaacctcagcctcccgggttcaagtgattctcctgcctcagcctcccaagtagctgggattacaggtacaagcaaccacgcccagctaatttttgtatttttagtagagacggtgtttcaccatgttggccaggctgatcctcaagtgatctgcccctccccccccgacctcccaaagtgctaggattacaggcatgagccaccgcacctggccaaaaatagtaatttcatatggttcaatctaaagacaataaagtctaggtttctgttttttgtctgtctgttcattcatccatctatccttctctccctccatctctccatccatcttcccatccatttttccatccatccatccatccatccatccatccatccatccatccatcttcccatccatccatccatccatcttcccatccatccacccatccatccacccatccatccatccatccatcatcatccatccatccatccatccatccaatcatccatccatccatccttccacccacccatctctgggagagctcatggacactcacggtttccacaaatgattcactatccccaaatcctctccctggttcagcagggtgtcctgcatatcaagtgcaatacgttctcacagtcatcatcttctcttcactacacctatctcctttcctatgttgagcatctccattaacagacccactgcctactcatttgttcaagccagaaactcaagaaatctgattcctccttcctgttatcttccttcaccaccacgccacggaatttgacttccacggtagctctgggctccaccctctccctccttactttgtccttgttcaggtacccatcgtttcctacctggacagttgcccccacctcctgacggcctcccagctgctatctcacctttcctctgctttctccacactgaatttttatcatgaaatatttggccatattcacgatgcaggggaactggcacttcattcattgctggcaggagaggaaattcatacaaatggcttggagagcaatttgtcaaaatctgtaaaattgtaaatgcgcaaaccattgatccctagcataattctacttgaaggaatttgtctcattgatataaattgaaaataacctaattgtccatgagtgggaactggttaaaataaacttgggtacatccatcatgcagaataacctgcattcaacaaaaagaatgcgatggcgctttatgtactgatatgggaaagtgattaacgttggttgctggttgtaataaatgtcggtcttctctcttgttctaaagactcctgtagaaaccacctaaccagagagtgaagtaaacacagaaacaaactttggaggcttggaaagttgagagaatccagagggttggtacaagaaggcctagttctagttcctgctcagatgtgaaggtgcttgctcctgagcctatttcctctctctctctctctctctctctctctctctctctgtctctctctcagtgcagccttaacctcctggactcaagtgatctttccacctcagcctcctgagtagttgggagactacaggcatgcactaccacccctgggtaatgtttttatttttttgtagagacggggacttgctgtgttgcctaggttggttatgaactcctgggctcaagcaatcctctcacctcgcctcccaaagtgctgagattaaaggtgtgagccactatgcccagcctctcatctctctaagggcttgatcatacctcccaaggtcattctgaaggtcaaatgtcaacatggaggtagaaatggcatgcaaaagtctatcttgctaaaccaatgagagttactgttattcatttgtcttcagggtttacctagcccccttctgaatactaaacatccctaatacatgtaacaaaagctataacctttatttgtgtttgagcacctattttgtgcctaggactgagctaagtactttccatgtattatctcattgattgaaacaatgcttttgtgctggggatttttgcttccatttcacagatattagtggaggcacacaaaggttaactggctgggcttggtggttcatgcctgtaatcctagcactttgggaggccaaagtgggcggattccttgagctcaggaattcaagaccagcctgggcaatacagtgaaagcaggtctgtataaaaaaatacaaacatacaaaaatcagctatgagtggcagcatacgtctgtagtcccagctactcaggcggcggagggaggatggcttgagaaccgagattgtgctaccgtgccactgtactccagcctgggtgacaaagtgagagcctgtctcaaaaaaaaaaaaagttaactgactgctctaatagcatacagggagtactgctaccctgataagcccctacatctttctgattgccaagtccacgcttttctcactccttaaccattcctactttctatatcatgtctttagacctgtactattgaaaataaatataggctgggcatggtggctcacgcctgtaatcccagcactttgggaagccaaggcgggtggatcatttgatgtcaggggttcgagaccagcttggccaacatggtgaaaccccgtctctactgaaaatacaaaaattagctgggtatggtggcaggagcctgtaatccctgatactctggaggttgaagcaggagaatcgcttgaacccaggaggcggaggttgcagtgagctgagatagtgctactgcagtccagcctgggcgacagagtgagactccatctcaaaaataaataaataaataaataaataaataaataaataaaaatgtgagtcacatgtgccaattaaaaatttctagtggtcacatcaaaaaagaaaagaaacagatgaaattaatcttttggaacacatggaaaaaggcaaaagttgaaaaaagataaataatacattaaaaaataaagcactgaaaataaagaaattaatgttaattctatttaacctgacgtgtcctcaaaatctcatcatttcaacaggtaataaattagcataaaactaattagtatgaaaactaattagcgaaatgttaatattttgctatcctttttggcatagcaagtcttcaaaatcggatgtgtgttttatgcttacggcacacccccattcagatgagccccatttcgggcacttggtagccaggcgtgactcattggcaaatgtagctcaggtgggactgacatacacctaaagcgagtgtaaaccttaaataacaatactggccaccgtttattgagcacctgctgtttattctcatgagtctgtggagtaggtgctcttacaagctacagagggaaaaaataaagcccaggtagtttagaacatgcccaagatcccggagctatttatctggggaactgcagtttgaaccaaagcccaaagctcatccagccatctggcttctcctgttcttgccaatgaatgctgaatatttattacatgtcagtcatgtgtctgtaacatttaaacctctaagaaaagaatttaacttgtggcacttaattttaaagaatttgattggccaggtgcgctggctcacacttgtaattccagcaccttgggaggcagaggcagggagattgcttgagcccaggagttcaagaccagcctgggcaacaaagtgagacacacaaccctgcccccgagccacctgcgccccccaccaccccaccactgccatccctgtctctacagaaaataaaaaaattagctaggtgtggtggtgtgcacctgtggtcccagttacatgggaggctgaggcaggaagatcctttgaacccgggagtttgaggctgcagtgagctacgatcatgccactgcactccagcctgggcaacacagcaagatcctgtctcttgagttaaaaagtctgcaactaactctgaacttcttaccagcgtgagaccttcagaactgataataaaccaaacaaattctctctcccagcaagactccttttgtctagatgggctgagaattagagggaatgatcaagttcaggcttccaccctccagagcagctacccataggaacacaagacggacttcactctttcatgggatcacatatcaggaagtccactggttccagctttctcctcctactcaggccaagactgaccactgattttaatcatgacatgcaagtactagagagattctcttggagatggggatggtggtgatgatttcatgagtttcatgactggttctgggatgataacctggggttgccaatatccctaactcctggccgggtgcagtggctcactcctgtaatctcagcactttgggaggccaaggctggaggtttgcttgagctgaggagttcaagaccagcctgggaaactgtctctacaacataaataaataaagtttaaaaaaagttccctaattcctggctaggatgcactggagttaagtccagctagcttttaggttccacggtgtggctgctgttttagaaatgtaagcttctctcttgcctcttgcaaactgacgtaaaggtaaatcccattttagctctcacttcttgaacataaccacaattacatggtcatcagcttgagggtgaaattagggaaaggaggaagaaaagggactctcatttgcctctaaaatgtctctaactctgggctgggcacattggctcatgcctgtaatcccagctctttgggaggctgagatgggaggattgcctgggcccaggagctggagacctgggcaacatagtgaaaccctgtctccgctaaaaaaaaaaaaaaaaaaaattaccctggcatggtagtgtgtgcctatagtcccagctgctaggtaggctgaggtgggaggatggcttgagtctgggaggtcgaggctgcagtgagccatgattgcaccactgtactccagcctgggtgacagagggagacctggtctcaaaaaaacaacaaaaaaagtgattattctgctagaccaccatgggcattgctcactagcacagggagagagtcatcttccagcctccactcccctagcctgtcacttcttagctcagtggtggctcccagcctttcatgaggcatctgggaccttgcctaacccacctctgcctgcatctcttttctgagtactgacatgc

SEQ ID NO: 96932 - DNA, 24340 bp, Homo sapiens
  misc_feature (1)...(24340): n = A,T,C or G
tcagctcgctgcaaccaccacctcctaggttcaagcaattctcttgcctcagcctcctgagtagctgggattacaggtgcctgccaccacacccggcttatttttgtattttcagtagagacgaggtttcaccatgttggccaggctggtcttgaactcttgacctcaggtgatacgcctgcctcagcctcccaaagtgctggaatcacaggcatgagccactgcgcctgacctgagcaattccacttctaactctaacactcacacatgtgcacaaagctgtgtgcacaaggctggtgggagcagatcagaaaaaccttgtaaatgtccatttataaagaatgactgttgcagagtgaaatgaatgatggaggttcatgtcgctccacagagcacttgctggacatgatacagaatgaaggggacctgctgcatttctggagggattgcagaggacttcaaggaagcagggatggtgattcctaccacatccccattcaactctcctatttggcctatgcagaagacagatggatcttgcagaatgacagtggattagccaggtgatgacttaagcttaacgtaagcttaactaggtggtaattccaactgcagcggctgtaccagaggtggttgcattgcttgagcaaattaacacatcccttggtacctggtgtgcagttatttgatctggcaaaggccttttttctccatccctgtccataaggctaccagaagcactttgaactggcaaggccagctgtactctgtcaccatcctgcctcagtggtatatcaatcaactctccagccctatgtcacaatttagtccacaaggactttgattgcctttcccttccacaggtatcacagtggcccatgacattgatgatattatgctgagtagacatagtgagcaagaagtagcaactactctagacttattggtgagaaatttctgtgtcagagggtaggaaataaattcaacaaaaattcagggatcttctacctcagtgaaatttctaggagtccagtggtgtgaggtctgtcaacatattctttttttttttttttttttttttgagatggagtctcgctctgtcacccaggctggagtgcaatgatgcaatctcggctcactgcaaactccacctccctgttcaagcgattctcctgcctcagcctcctgagtagctgggattacaggcacacgccaccatgcccagctaatttttgtatttttagtagagatggggtttcaccacgttggtcaggttggtctcaaactcctgacctcatgatccgtccgcctcagcctcccaaagtgctgggattacaggcgtgagccactgcacccagccaatatattccttctaagatgaaggataagtagttgcatctggcccctcctacaatcaaaaaagaggcacaatgcctggcacacctatttggattttggaagcaacacattcctcatttgggtatgttacacatgcccgtttaccaaatgacctgaaaagctgcaagttttgtgtggggcccagaacaggagaaggctctgcaacatgtccaggctgctgtgcaagctactttgccacttgggccataggacccaggagatccagtggtgcttgaagtgacagtggcagatagggatactgtttggagctcttggcaggccgctataagttagtcatagcctagccctctaggattttgttttattttattttttgagacagggtcttgctctgtcacccaggctggagtgcagtggcacaacacagctcactgcagccttgacctttcaggctcaggtgatcctcccacttcagcctccctagtagctgggactgactgcaggtgtgcaccaccacatctggctaacttttgtattttttgtagagatagggtttcccaatgttcccgaggctggtctcgaactcttgggctcaggcaatccacacgtctcagccccccaaatgaaatttggtgagcctcctttaggattttggagcaaagccctgctattctctgcagataactaccctccttttgagaaacagctcttggctgggtgtggtggatcactcctttaatcccagcactttgggaggttgaggccaacacatctctctcttgagcacaggagttcgagaccaccctgggcaacatggcaaaaatccatctctacaaaaaaatacaaaaattattaatagctgggtggggtggtgcatgcctgtagtcccacctactcaggaagctgaggtgggaagatcgcttgagcccaggaggtcgaggctgtagtgagctgtaattgtgccactgcagtgcagcctgggtgacaaagtgagaccctgtctcaaaaaaaaaaaaaaaaaagagagagagagagaaacagctcttggtctgctactgggtcttagtagaaactaaatacttgaccatgggccaccaagttacatcattcctgcccatcatgaactgggtgttacctgactaaccaagagtcggtgtgcccagcagtgctccatcgtcgaatggaaatgggaaatatgtgatggggcctaagcaggccctgaagacacaagtaagttacatgaggaagaggcctaaatgcccatggtccccactccttctaccttgcctcctttctcccagcctgcaactgtggcctcatggggagttccctacaattagttgacagaggaagagaagacttgggcctggtttacagatgattctgcatgttatgcaggcacactctgaaagtggacagctgaagcactatggcccctttctgagacacctctgaaggacagtggaaaaggacagttaataaggggtggacttgtgatggtaaattttgtgtcaacttgatagggacccagggtgccctgttgaatattatttctgggtggatctgtgagggtgtttccagatgaggttagcatatgaattgttggactgagtaaggcagatggctctgcccattgtaaatgggcatcacccaatccactgaaggttggaatagaacaaaaaagacggaggaaggtggaatttgctctctgcgtgactgcttgaggtagaacaccagtcctttgcccttggctggtacttacaccatcagccctttttttgttttgttttgttttgttttttagagacagagtcttgctctgtcacccaggctgaagtgcagtggcacaatctcggctcactgcaacctccacctcccaggttcaagcgattctcctgcctcagcctcctgagtagctgagattacaggtgtgcgccaccacgcccagataatttttgtatttttagtagggatggggttttgccatgttagccaggctggtcttgaattcctgacctcaagtgatccaaccaccttggcctcccaaaacgctgggattacaggcgtgagacaccatgcccagccaacaccatcagccctttggttctcagaacaacaccactggctctcctgggtctccagcttgctgatggcatattgtggaacttctcagcttccaaaatcacaggagccaatccttgtaatatattacatattggttctgtttctcctactggttctgtttctctggagaactctaatacacccagcaattccacttctaattctagtactcagacatgtgcacagagctgtgggaacaaggctggtaggaacaaacaaccaggaaaatcttgtaaatgttcactgatacccaaggactattgcagagtgaaacgaataatgagggttcatgttacagcacagagtgcccactggacgtgacacagaatggatgggacttgtgtgtacctgcaagggtgggggttatcttctacaggatgtgctataggcagggaaaagcaagggggagtcagttacagtgacctagtgcatgtgtgtagtgtgcgcacacacacactatggaaacacagggaactgtatctggaaggaaacaccagaatctgaccccagtggtcattctgggggaatggggatagagatgattgctagagtccatgtactgatgtgttgttcaaatctttttttttttttttttttttcgagagaaagagtctccttctgtcatccaggctggagtacagtggcacgatctcagcccactgcaacctctgccaccaattcaagtgattcttgtgcctcagcctcccgagtagctgggattacagctgcgtgccaccatgcccggctaatttttgtatttttagtagagatgggggtttcaccatattggccaggctggtcttgaactcctgatctcaattgatccacccgccttagcctcccaaagtgctggaattacaggtgtgagccaccaccctcagcctgtttttcaaatcttttatacaaacctgtattcacatattatttgtgtaactctttttaaaggaaaatcatatgcttaaaaacaatatctggccgggcacggtggctcacgcctgtaatcccaacacttcaggaggccaaagcaggccaattgtaggcaacatagcaagacctcatccctactaaaaatacaaaaattagccaggcgtggtgacacacacctgtagtcccagctacccaggaggctgaggcaggaggatcccttgagcccaggagtttgaggctgcactgagccatcatggcgccagtgggctccagcatgggtgacaaagtgagacactgtctcaaaaaaaaacaaaaacaaaacaatatccacaacacaaagtgtttgtgttgggggtaactagaaacaaaaatctcaaactcacatgctccaggggccagacaagtaacctgtaagggagatgggggagttctgctcagggtaaagtgaacagcaactgggctgatgaatgttctctgactctcagcagcggaaggtgagggtgagtgaagggtgagtggggaggaggaggaagactgcaaatctcatcccccaaaactcatcccccaaaataattcaggaacatcacaccctggggctcagaacttttttttttttaaacagagtctcactctgtcacccaggctggagtgcaatggcgcgatctcggctcactgcaacctccgcctcccgggttcaaactattctcctgcctcaggctcctgaatagctgggactacaggtgcacaccaccatgcctgggtaatttttgtatttttagtagagatggagctttaccatgttggccaggctggtctcgaactcccagcctcaagtaatccgtccaccttggcctcccaaagtgctgggattacaggcgtgagccaccgtgcttgaccaaggggctcagaactcttaagagttcagggatcttggcttggaaacagacacctaatgggtcagagcagtcatactctaactcagatagctcacaacttcatacccctgacacacactctcaaacagctcacagatctcacactttggagacatacccctaagtagaccagaggcatcacacgctagaataaagatccccttaatacttggtggtttttcagtattattattattgagatggagtcttgctctgtcacccaggctgaaatgcaatggcgccatctcggctcactgcaacctccgcctcccggattcacgcgattctcctgcctcagcctcccaagtagctgggattacaggcgcccgccaccatgcctggctaatgttttgtatttttagtaaagatagggttttgccatgttgtccaggctggtctcgaaatcctgatctcaggtgatccacgtgccttgtcctcccaaagtgctgggattacaggcatgaaccaccgcacccagccttcagtgttaacaagaagtaatcccttacacacatccactttaagctttcaattttgaggccctgaatttaatgttaaagtccttccatttgcactacctacctgtgtcacctcccacagtcctcagcctgtgccctcccattcctgccccttgatctccaggcgctgagccagaggattgtcgggaggaccctgggcaaagacrcctaccctgccatgctgcgccatctgccctccaggctgccagtcaagatgtggggcaggactttggagaaacaggtgaacaagatggcccctggggatctggggcaagggtgttggcactgaaactggtctagtaacctgtttcccttctctgcgggctcccatttcctgtcctcctctctccctttctctttcagagacaagcagagggcagcagaggcccatggaaaggcccggctctaagccatggagggccctgtgctcaggtgtgcagggctgggccggggctgagggctggctcctcccccagtttagccagggacaggtggagagatacaaaggtggctcacgcagggtgcccccaaagctgtcatgattaaggccatgtggagagaggctaggaaacacagcgctgaccttgagctttaggagaggaattcagaggcccctggcaacctgaaggggaccttgaagaggaccctgtaggaagacagaacacttccctgtagaggaggccaaaggaggaaggacatggtgttccgggcactctgactatagggattttatatgctgtggtgagaaataaaatggattatatttttgtagagtgtgtaaaacggggcttggcacacagtaagccttgtgtgattactatgtctttttttttttttttttttgagaccgaggtttgctcttgtcgcccagggtggagtgcagtggtgcaatctcaggtcactgcaacctctgcctcccaggttcaagcgattctcctgcctcagcctcccgagtaggggattacaggtgcacgtcaccatgcccagctaatttttgtatttttaatagagacaggatttcaccatgtaggccaggctggtctcaaactcctgacctcatgtaatccacccaccttggcctcccaaagtgctaggattacagacgtgagccactgcacccagtcctttgtgtgatgactatgtcttgatcatcattttataaagcaggctttgtaacttcacctccaagagtctgcaggatccagaccctgccttgccctcccacttatctctcactcactcttgggttctgactacgctggccttcctgttattgaagacagccatccctgctcgtccttgaatttgcaaggatggagctccgagtctgcaaagcaggatctggggagtgaatctaagctggcagggaagaatagaataatgggaggaataggtggagtttatttctaacagactatcaaaatgatgcagatgtggccaaagcagtgcttagaggaaatctatagttctaaatgcacagatcagaaaagtagaaargttgaaaatcaatgacctgagcttccctatcaagaaactgggaaaagaatggcaagtggaacctaagaaagtagaaggaaggaaattataacagcagaaactggtgaaatagaaagcaaagatacaataaagccaacaatgttaaaagttgattctttgaacagattaataaaatactagcaatgtctattttctctcgagaaattaagaaaatatatggattgccaatatcaggaatataaacagggtattgtgacagattctacagatgttagaaggttaataagggctgggtgcagtggctcatgcctgtaaccccaacactctgggaggctgaggagggaggattgcttgagcccaggaattcaagaccagcctgggaaacatagtgagccctcacctctacaaaaaaaaagaaaaaagaaaacaaaaaatagttgggcatggtggcacacacctgtaatcccagctactagggaggctgaagtaggaggattgcttgagtccaggaggttgaggctgcagtgagctgtgatcatgccaccatgctccaggctgggcaacaaagcaagaccctgtctcaaaaagggaattaaaaaagaaagttaataaaatttatttcaacatatgactttattttcaatggagccaaaatgtcggtcattttctctttctgcagttcctatgtccatgtggatcttttgtatccaccgggagagcaaaactcagcaactttgctaatgcctcctccactcaggaaaatagaatggtacaggattttttttagctggagctcagtgaaatcaattgtttaaaatgggctggtttcaatggaactaaacgcagtggaatagaaaataataaaatagcaaagggtagaacagaatagaatggaatccaatggaatcgaatcgaacagaatagaaactagtcagactttgtgccaagcactgtccctagttgttgcagtagatatttatttattgaacaaatatgattgaactagttgtttgggaaagagtggggaacaaaacagacagaagtccctgctcttatgaagcttacattctagtcagggagacaggcattaccatctgcaaaggcccataaatgaaaggtacaagggtggtccttatgaggaacaggctaaaggacagtgtagattggagttcaagagcaatggatgaggctgtagagatagggtgtcattgtaactggagtctagattttaacaagatgaccacacatcatcatcatcatcaatcgttttatagcacttgatatgtattaggcattgttctatgcccttaaaaacagtacttttttaaaactctcacaataatcctacatgtataaaatcatgctcattttatagaaggggaaaccaaggcacagataaattagataaattatttaaacgtcaatctggttccagaatcttcttctttttttttttttttagatacagtcttgctctgtcacccaggagtccggttgagtgatcatagctcattgcaacctccgcctcccaggctcaagtgatcctcccaccccaggcccccaagtaaccagaactacacgtgagcgccccacaacctaattttcatatttttttgtagatacagggtctcactgtgttgcctaggctgatctcaaactcctaggttcaagggatctgtctgcctcagccttccaaagtgctgagattacaggtgccaccactagaatctattcttttaagcattatactccattgcctatagtgccagaccacaggtgctttataatcctgtagcatagatactataaatattcaaattactaaataattcaagtcaagagaaagatctgatgggaagtgtgctgagggcgggaaagtggaaggttggggagtggtcctccctctgggtgtcaaggtggatctgtaaacacgcacgcccagaaaccttcatttcttctgagatgcccccttcttgtcttgttctctgtgactgaagctgcagaatgggaaaggagggggctgggtaaaattggccaattcacaggactgggcctcctctgtgtcttgtcacttcttggaaaagagatgaattctatttagggaaaaacaggggagggcattgtcttggtctccactcccctaatcttcacttctggaagaggagaaagggaacaagaaggctgggtgcagtggctcacccctgtaatcccagcactctgggaggccgaggtaggcagatcacttgaggtcaggagtttgagtttaagaccagcctgaccaacatagtgaaaccccgtctctactaaaaatacaaaaattagctgggcgtggtgacacacacctgtagtaccagctactcagggggctgaagcaggagaatcgcttgaagctgggaggcggaggttgcagtgaggtgagattgtgccactgcactccagcctgggcaacagagtgagactctgtctcaaaaaaaaaaaaaaaaaaaaaaaaaagaaaaggaaacaaggaaacagtggaaagtggtcatggtagacatgtgggctctcatgaatccacacatgggcagtaagactctaccagtaagtattctctcaggcctttccccttgaaggggggtgaggaggaagtagtgtaattggggaggtagggggaggtgaggagaagaaaacacaggcgttgacaagtggcaatgtggtctcttctgrcttttttttctttttttagtcatggagggacagcagtcagacccctcccccatgtcttatccgtagacttgaccacatcgtgatgacggtgaagagcatcaaagacaccaccatgttttattccaagatcctgggcatggaggtcatgacttttaaggtaagcacttccccaaatgccaaaattcaggtgggctaaaatttgttgataacactttaacatataacttaactctaaaaggaaaaccacaggaaatctgagagaaaatataaagagatcaatagaggagattccaaactgaatatttggacttccagagagagaatggagaaaaaagagaggaggaaattatcatagaaacaatgcaagataactttgcagtctctacatggaaaaggttaaccaagtatccagcatgttgacacttaacatggatccttctaaaattatagaacatcaaactgaaaaagtagatcctaagagctttcatagagattaaaaagtagattatctacaaaggaaaaaaaaacaaatatcagattttccaagagaccagagaccaaaagataaaaggacaccttcaagattctgaggggaaaattttccacctagaattctatgtccaaccaaactattaaccaaaggtaaatgtaggggccaggtgcggtggctcatgcctgtaatcccagcactttgggaggccgaggtgggcggatcacttcaggtcaggagtttgagaccagcctggccaacatggcaaaaccccatctctactaaaagtacaaaaattagctgtgcatggtggtgcacgcctgtaatcccagctacttgggaggctgaggcatgagaattgcttgagcctgggaggcagaggttgcagtgagctgagattgcactacagcactctagtctgagtgacagagcaagactgtatcaaaaaaaatcaaacaaaaatgtaaatgtagaataaaagcattcttagtcatacgaagtcttacaaaatttcccacttgctttgaaaattacctgaggctatgctatatcaaaatgggggagtggccgggcacagtggctcacacctgtaatcccagcactttgggaggcagaggttgcagtgagcccgagatcgcatcactgcactcccagcctgggtgacagagcaagattccannnnnnnnnnnnnnnnnnnnnnnnnnnnnnnnnnnnnnnnnnnnnnnnnnnnnnnnnnnnnnnnnnnnnnnnnnnnnnnnnnnnnnnnnnnnnnnnnnnnnnnnnnnnnnnnnnnnnnnnnnnnnnnnnnnnnnnnnnnnnnnnnnnnnnnnnnnnnntccagtttggaacaggtgtaagaaagaccccaggaaagacagatccaaggggaaaaaaaagaggtttccagagattgaactacccttgagaatttggaataacttcaaaaaaggtaaatgcagagaaagcaaaaaatgccttactaagatgtgcttcagtaagtgaatggatgtatcaactgtggcacatccagacaatgaaatattattcagtgataaaaacaaatggattatctgccaggtgcagtggctcatgcctataatcccaacactttgggaggccgaggcgggtggatcacctgaggtcaggagtttgaggccagcctggccaacatggtgaaaccccgtctctactaaaagtacaaaaattagctgtgcatggtggtgcacgcctgtaatccctgattacgtggatcacctgaggtcaggagtttgaggccagcctataatcccacacaggcatggtggcgggcgcctgtaatcccagctactcgggaggctgaggcaggagaatcacatgaacccaggaggcggaggttgcagtgagccaagattgcaccattgcactccagcctgggcgacagagcaagactccatctcaaatagataaattaattaaataaaataaatggactatcaatccatgaaaagacatggaggaaacttaaatgcatattactaagtaaaagaagtgggggaggctgtgcatatgtgggggcaaggtgtatatatccctatacctcctgttcaattttgctgtggacctaaaaccgctctaaaacaattaagtacacatgaacacccctcccacacacacatataacttaaatagaaagggcttgaggaatcgcaaacaggagaagaaaaatttttttagacagtgtctcactctgttgcctaggctggagtatactggtgcgatcacagttcaccacagcctcaacctcccagactcaggtgcttctcttgcctcaccctcctgagtagttgagactgtaggcacgtgccaccacacctggccaattttttctatttggctaaaaatgttaaatctaacatggaaccttatgcagaaatgtagtattatgcaacatcagactggatgtgtacacagcaacacggannnnnnnnnnnnnnnnnnnnnnnnnnnnnnnnnnnnnnnnnnnnnnnnnnnnnnnnnnnnnnnnnnnnnnnnnnnnnnnnnnnnnnnnnnnnnnnnnnnnnnnnnnnnnnnnnnnnnnnnnnnnnnnnnnnnnnnnnnnnnnnnnnnnnnnnnnnnnnnnnnnnnnnnnnnnnnnnnnnnnnnnnnnnnnnnnnnnnnnnnnnnnnnnnnnnnnnnnnnnnnnnnnnnnnnnnnnnnnnnnnnnnnnnnnnnnnnnnnnnnnnnnnnnnnnnnnnnnnnnnnnnnnnnnnnnnnnnnnnnnnnnnnnnnnnnnnnnnnnnnnnnnnnnnnnnnnnnnnnnnnnnnnngatgtgtacacagcaacacggacgggtcttgaaaagaacgtgctgagtgaaaaatgaagaaacaatcaggtctacagcatgctacccattacaatacacacacataaaacagtaacacactttttacagcaatttatgaaaaccaaaggatacacatcaaacgcactataatggttgcctaaggtggagatgggaatggataatgaacagaaaaagataaataaaacaagagatagtccttgcgtgggccaatggtgataacgaggtgtatgatgcctcaacctctgtacttggacacaatggagtgaaatttcagaacattaggattaagaaaaatcctaaagctgcagtagtggaagatggatgtatcaccaaccaaagaataaaacgcagatgaacatcagacttcttaacagcaacaccacatttggggaagacaatgaagcaacatatttaaaaggctatgggaaaataagctgcaacctacaactgcacactgagccaaactatcctcaagtccaaaagtgaaataaagttggccagacgtggtggctcacgcctgtaatcccaacactttgggaggctgagatgggtggatcacttgaggtcaggagttcgagaccagcctggacaacatgctgaaaccccatctctactaaaactacaaaaattagccaagcatggtggctcgcgcctgtagtcccagctactcgggaggctgaggcaggagaattgcttgaactcaggaggcggaggttgcagtgagctgagatctcgccactgcactccagcctgggtgacagagcgagactctgtctcaaaaaaaaaaaaaaagtgaaataaagtcattttctgattgaatggatgtggtatcattcatagtgatataaaagagatagaaaaagaaaaaaagaaatggcacatgttgagaggtccaggagagggaggattcatgaagaacatggcagggctgtgagttaatctgtagttgatctacaaaaataaacttgcagccaagcgtggtggctcacgcctgcaatcccaacactttgagaggatgaggcaggaggatcgcttgagctcaggagttggagtccagcctgggcaacatactgagactactgtctctacaaaaaaaaaaaaaaaagttttataattagccaggcgtggtggtgcgcacctataatggaatcccagctactcaggaggctgagacaggaggattgtttgaggccaggaggtcaaggctgcagtgagccgtgattgcaccannnnnnnnnnnnnnnnnnnntgcagtgagccgtgattgcaccactgcattccagcctgggtgatagaatgagactctgtctcttaaaaaaataaataaataaacaaaataaacatgcaaatgggttagttaaaaattgttaaggagctaaaagagaaactaaaaacgataatcaaattgtattggaagagatagtaatgtgaatgagctaaattttcatttgtcatagcagggagttgctaaatcaagaaatagtggtgcagccgggcacactggctcacatctgtaatcccagcactttgggaggccgaggcggggaacacttgagccaggagttcaagaccagcctgggcaacacggggagacccggtctctacaaaaaataaaaaaaaattagccaggcgtggtggggtgtgcctgtggtccctgctactcagaggctgaggttgcaggatcacttgagtctgggaggttgaggctgcagtgagccgtgatcactgcactgaaggctgggcgacagagcaagactctgtctcaaaaaaaaaaaaaaaaagacgccaggcacagtgactcacacctgtaatctcagcactttgggaggctgaggtgggcagatcaccttaggtcaggagtttgagaccagcctggccaacatagcaaaaccccatctctactaaaaatataaaaattagctgggcatggtggcgtgtgcctgtagtcccagctactccagaggctgaggcacgagaatcacctgaaccagggatgtggaggttgcggtaagccaaaatggtgccactgcactccagcctgggcaacagagcaagactctgtctcaaataataataaataaataaataaataaacaaacaaacagtggtgcatcagttagggactttggaggcatgtaggagaaaactcaactaactgtgggttaaacaagacaagagttttcttttcgtttcactgaacaaccagtccagaggtagttagtcaggtcatgggcagtggctgggaagcaagaggaagtgaatgagcaataagggccagcgcagtagggttgggaggttcccagaagccccatccacacctctgcccccatctcattgcctggtccagctaacgtggcctccggacgtgctgggaaatgtaggtttttaaagttgggtacacggttgaccccactgaaatttctgttgtgtttataagaaataaaggggaaatgtatactgggtaggcaaattgctatctctgccttgagtggtataaacactatttggagatatggaaataatttcaaggagaaataaactcgtacacttgcctctagggaatgagccttgggtggggcaaagggctgttgtgtagtagccccattctagtttttattttttttaaaccttgttgggataggtggaaaggcttcatctcacactcatcttggaggtttaattctaggctgttttctctgcccctccccaccaagtaggaagaccggaaagcacygtgttttggagaccagaaatttaacctccacgaggtgggaaaggaatttgaacccaaagccgctcacccagttcctggctccctggacatatgtctgatcacagaggtgcctttggaggaaatgatccagcacctcaaggtgagtgggacttctcttctttttgcaaaagctgctgcaaacgcagtgaaaacagaagaatgacccagagaggtaacaagttttaccacaaccagataatgtctgcacacagttatgtactattttgactgacaattctttcatgtaaataaatgtgtttaaaaaggaaactgtgcattcccattgtaaaacaaacaaacaaacaaacaaacctacatttatgcactgaaatactttttttttttttttttgagacagagtcttgctctgttacccaggctgtagtatagtggcttgatctcggctcactgcaacctccacctcctgggttcaagcgattctcctgcctcagcctcccaagttgctggtactacaggtgcgtgccaccacacctggctaatttttgtagttttagtagagacagggtttcaccacgttggccaggctggtctcaaactcctgacctcaagtgctccgcccacctcggcctcccaaagtgctggccattacaggcatgagccacgtgcccagccctaaatacatttatataaaaagaaaacgttcatccaagtacatgaaaaacccattatatcttggcataaaggaaaagtaactgtaaaaaccaacagctatgaaagcataacaatgtcattagattctagccacttccgttccctgtactccctggccctgacattacaaagggagatatggcaggtggttaaagagatactaagaacttgttagcatccaccttctatgtgtaaaaagaaggactgaaagaagattggagagggaataatttctgatttgttgttatttaatccagtgtctctgtaatacttaaaatgatgtcatctagaagaggcattggttgggcacggtcactcacgcctgtaatcccagcactttgggaggctgaggtggcaggatcatttgggccaggagttccagaccagcctgggcaacatagtgagatcccatctcttaaaaaaaataaacagagtagccaggcatggtagtgcatgcccgtaatcctagctattcaagagggtgaagtgggaggatcacttgagcccaggaggtggaggctacagtgagctatgatcacgccactgcactccagcctgggtgatacagcaagaccctgtctctaaaaaattaaaataaggctggggcacagtggctcatgcctgtaatcccagtgctttaggaggccaaggagggaggatcacttgaacccaggaatttgagaccagcctgggtaacatggcgagaccctgtgtctacataaaatacaaaaaaaaattagccagacgtggcggtgtgtgcctgtagtctcagctacttgggaggctaagaggtgggaggatcgtttgagcccaggttgaggctgtagtgagctgtgatcgcaccactccattctagtcagtgtgacagagcaaggccccatctctacaataaataaataaaaggggttttagtttcccttttgcagaacacggattgaggtcttatatatattctgtgcaaataacctagactccttctttgggaagtgtcagtgaaaaagactggtttggaagtaaaatgggtgaagcataggggttaagagtatggtcgttgacccagactgcctaggttcgaattctggttctgccatttactagataatactaggtactattatccttcccattttacagatgaggagatcgaggtacagggtagttaggtactgtgcccaaggccatctagctgataagtggctggaacggagtgatggaggggaggatggtaggagatgaggtcagaaagatacagcggtgttctaaggtcttctaggccactataaggaattaaattttacaggccaggcgcagtggttcatgcctataattccagcactttaggaggctgaggcgggcggatcacttgaggtcaggagttcgagaccagcctgggcagcacagcaagacctcgtctctatgaaaaatagctgggcatggtggcatgcgcctgtaatcccagctactcaggaggctgaggtgggagaattgcttgagcctaggaggcagcggaggttgcagtgagctgagatctcaccactgcactccagcctgggtgacggagcgagactctgtcacaaaaaaaaaaaaaaggcattaaattttggtctcacacacacattttgacgaacgacttttgtcttttcttcccacttcaggcttgtgatgtccctrttgaggaggggccagtccccagaacaggggcaaaagggcctatcatgtccatctacttccgagaccccgacagaaatctgattgaggtgtccaactacatctcctcgtgatggaggctggacctcctccattctgtcccccttgatgtcgccctctcctttccttcctgcaracccccacccaggcccagagatctccaaagactgaggacttaggcacttcacacatcctgctgaggggggacccaagacaggtttgggaccaaacctacatgtctgtatgtcatcaaagttggcctaataaatgcataacctctcaatgaatacggggtcttcgttactgtattggcgccatgcatgggtgtttatgtagggtgtgagatctctgagctgttcggtcggaggcctatgaccagggtatgacgcctctgagcaccgaatctagggtcatcacctcgggattcaaggcccctgacagatttctccttgtcagtgatgccattgtcttcatcctttcctaacttttctcactcctccagctgctgcctgctgttttctccattcctgggcctcgcagaatcccaggatctcttattcccatcagaccttccaggaccagcaccaggtgatactacctctttcaggagagccttctctagtctcactctcagggtatttagcactttctacctttggatctagtagatcaaagaattcgagaccagcctgggcaacatagtgagaccacccacctccacaaaataaataaagaaataagccaaatcatctcaattgaagcatagcttgtggcaggttaggtgggacaaggtcagatttcctgtttctgccccccctccaccattcagtcaactaaaatacatatgttaaccacctgtgtgccaggccctgttccaggcactggagagacagcattgagcaaaggagataagcatacccctgttggtggagttgccattctagtgggagagaaagaaaataaataaaactaagtaggtaaaatattaagtatgttacaggttggtaaatggtttggagaaaaagaaaacacggaaaagagggaatgcagataaaaactgttggggcaggttggacacagtggctcacgcctgtaatcccagcactttgggaggccgaggtaggtggatcactgaggtcaggagtttgagaccagcctggccaacatggcaaaaccccgtgtctactaaaaatacaaaaattagctggctgtggtggcgcatgcctgtagtcccagctacttgggaggctgaggcaccagaattgcttgaacctggaggcagaggttgcagtgagctgagattgcaccactgcactccttcctgggtgacagagcgagactctgacttgaaaaaaaaaattgctaggacagcttctgatgtctaatgaggcggtcccggaaagtgtgactgagaagtgtcttgagcacagatctgaagagatgagggatgagccacacagatggccagtggaggaagggcacaccaggcagaggcatcggccagtgcaaaggccctgatgcatgaatgtgcctgctgtgtgtgaggaacagcaaggacgccagttggggaagcaaggggtacagatgggtgcggtctggcaggccagggcgaggactttgtcttttactatgagcgacaggcagctgaaggagggttgtgggcagaggagggatgtgatctgatttaggatttaacaggctccctctggccactgcggaaaatagactgtcagggcgagggtggaaacaggcgaccagtgagggggaggcccctgcagtggtccacgcaagtgtgatggcagggacaggggaagtgatttttatttgtttgggttttttgttttttttggtagagtcggggtctcgctatgttgctcaggctggtgtcgaactcctggcctcaagagatcctcctgccaggcgcggtggctcacacctgtaatcccagcactttgggaggctgagacgggcagataacgaggtcaggaaatcaacaccatcctggctaacacggtgaaaccccatctctactaaaaatacaaaaaattagccaggcatggggcgggcgcctgtagtcccagctacttgggaggctgaggcaggagaacggtgtgaacccgggaggcggagcttgcagtgagctgagatcgtttccctgcactccagcctgggtgacagagggagactctgtctcaaaaaaaaaaaaaaaaaaatcctcctgcctcaacctcccaaactgctgggactataggcgtgagccaccgcactcagccaggagatgattttttttttgaagttaaggcaacatttatttgatttccttataaccatattatctaaggcagaagtggtggttacttggcaagaatacaatttcttttaatgtcttctatagttgagttttagttcagaaatacatatttcactggtacaaatctgagagaccgtacttctagcatgggctcctattcatgatcaatgcatttttgtatcaccatggcttgaacaaactcaatcactgtttcaatggcaggacatggccagttgtggcagctgctctgaaggtcacttgttttactgtggcctggccaagtagaataagagtgggtcacagtgagctcactggtctcttcaggctgtgctctgaatgatgacagcaataccttggccacctccaatgcaagctgatccaacggcatattttccacctcgacgccttaattcatcaaccaatccagatcctcccagtgggtgacccaaagcaatggctcctccattcacattggttttacttatgtcaagatccaaactcttctcaacagccaagtactggggagcaaaagcttcattcacctctaccaaatccatgtccttaagactcagtcctgctttcttcagtgccccactgatagcaaggacaggaccaatacccatgatagagggatcacatacagatacaaagtagcccacaattcttgccagtggtgtgaaattatggttcttaacagcatcttcactagctatgataacagctccagcaccatcagctatccccgatgcattccctgcagtgacagtaccatctttcttgaatactggaggaagtttctgtaactattccagggttgtttggggcccagcatgctcatctacctgcattgtctgttttcctttctttgtcttcacttcaattggtgccatttcatcattaaagtagccagcatcattagcagctttccatctctgctgtgactgcaggccgtatttgtcacattcttctctgcttattttatgttttacagcaagattctctgcagtcattgccatggggagctggacatgctgatctgttaatcctatccataaagaatcttccagcttgatatctgatccaagcttggttccaaaacacacatttctgacacagtagggagcttggctcatgcttttggttcctccgcataaaacaacttcagcttctttaacacaaatttcctaacacctattcacagtggactgaaaaccagaaccacagagcctattaatcgtgagagctggggtctcctttgggattcccacacgcaaaccaacatgccttgccaaaaaaatatggaacgcttcacgaatttgcatgtcatccttgcgcaggggccatgctaatcttctctgtatcgttccaattttagtatatgtgctgccgaagcaagcatggagatgatttttttaaaatggttagattctggagatattttgaagatagggactggatgagttcaacaaaaaagaggatgtcagctagagaagaggcctgaggacattttgggttctaaaacaagagaagggacagacagatgagtcaggcaagtgggaagggaagtgtgtggattcctgagtgaaggagtgatggatggaggagcatgcgtgagagtctcctgaagtaaaggagcccctggtcttctggactctggtcgctaaatagtcttcagacggtagttcagccagaccctgtgactgaaccgccaaggagccccaagagtgctgcgaagagagggagtgtgaggatatgagttttagcaagtaaaaggctttcctaaaacctgtagcattttctggcagtggaaaaaaagaggaaaggggttttctgcctcattctaaaagacaatttgccatggacccagacattatatgcctgaagatggatgatttatggatgaaaggaaagagaaaatgaaggaatagaagaaggaaggaaggaacagatgggtggatgggtgagtgggtaggtagatgaatgaatgggtagatgctctgatatttcctccctcctcccccgagaaactccttcacaggtgtgcacagagagaggaatatgagtttatgaattgcagatttgctataatagggaaagaaactagaaacaatgcaaatgttcatcaacagattagtggttaaacaaaatgtggtatatccattccatggaatattactttcaataaaagggaacgaacttatgaggccagcattactctgatgagaaaactagacaaagatatcacaagaaaaactacagaccaatatctaagtatagatgcaaaaatcctcaaaaaaatacaagtaagtagaatccagcaacatataaaaggattatacaccacggccaagtgggatttatcccaagaatgcaaggtttggtcaactaatgaaaatcaatcaatataatgcatcatattaacataataaagaacaaacaccacatgatcttttcaggagatgcagaaaaaacatttgacaaaattcaacattccttcatgataaaaacactcaacaaactaggaatagaagagaacttcctcaacctgataaaggacatccacaaaaaacccacagctaagatcatacttaatggtgaaagttggaaaggaacaacacaaggatgccccttcttaccatgtcttttcaacactgtattggatgctctacctggggcattaggcaacaaaaagaaataaaacgtatccatattggaaaggaagaagtaaaactatccctatatgcagatgacatgatcttatacatagaaaatgttaaggaatccaccacgaaaccattagagccccattagtgcataaccattagagcaaggttgcaggatataagattttgtatcatatatgctagcaattaacaatccaaaagtgaaattaagaaaactattccatttacaatagcttcaaaatgaataaaatacttagtaataaaatgaatgaaagaagggtaagacttatacactgaaaaccataaaatattattgaaagaacttaaagaagacctaaataaatggaaagacatcacatgttcatggattggaagactttatagtgttaagatggcaatactccccaaattgatctacagacttgatgcaatccctatcagaatcccagcttgcttctttgcagaactgacaagctgattcacatgggagtgctaggggcccaaaatacaacaatcttgaaaaagaaaaacaaagttagaggactcacaccttccagtttaaaaacttactatacagctacagtaatcaagaccatgtgctactggcataaaaacatacatataaattaacgaaatagaattgaaagtccagaaataaattcatacattataggcaactgatttttttgagacagggacttgctctgttgcccagtcacaaacatagctcactgcagcctcaaactcctgggctaagcgatactcccacatcagcctcccaagtagctgggactacaggcatgcaccactgtgctcagctaatttttaaaaaactttttgtagagacagggtctcaatgtgttggacaggctgaactcctgggttcaagtgatcctcccacgttggcctcccaaaatgctgggattacaggtgtgagccactgtgtccagctagcaattgatttttgacaagtgtaccaagaccattcaatggggaaagaatgctcctttcaacaaatggtgctgagacagctgagtatccacatgcaaaagaataaagtgggaccccttcctcataccatatacaaaaaacaactcaaaacagatcaaagacctaaatgtaagagctaaaacgataaaacttttagaacgggggtccccaacctccaggccacaaacccatctgtggtctcttagaaactgggccacacagcaggaggtgagctgcggcttgctgccattcatgaagctgagcccgcctcnnnnnnnnnnnnnnnnnnnnnnnnnnnn

SEQ ID NO: 96933 - DNA, 14203 bp, Homo sapiens
tgaaggaaatagagacacaaaaaacccttcaaaaaatcaatgaatccaggagctggttttttgaaaagatcaacaaaattcatagaccactagcaagactaataaagaagaaaagagagaagaatcaaatagatgcaataaaaaatgataaaggggatatcaccactgatcccacagaaatacaaactaccatcagagaatactataaacacctctacacaaataaactagaaaatctagaagaaatggataaattcctcgatacatacaccctcccaagactaaaccaggaagaagttgaatctctgaatagaccaataacaggctctgaaattgaggtaataattaatagcttaccaaccaaaaaaagtccagggccagatggattcacagctgaattctaccagaggtacaaggaggagctggtaccattccttctgaaactattccaatcaatagaaaaagagggaatcctccctaactcattttatgaggccagcatcatcctgataccaaagcctggcagagacacaaccaaaaaagagaattttagaccaatatccttgatgaacattgatgcaaaaatcctcaataaaatactggcaaactgaatccagcagcacatcaaaaagcttatccaccatgatcaagtgggcttcatccctgggatgcaaggctggttcaacatacgcaaatcaataaacgtaatccagcatataaacagaaccaaagacaaaaaccacatgattatctcaatagatgcagaaaaggcctttgacaaaattcaacaaccttcatgctaaaaactctcaataaattgatgggacgtatctcaaaataataagagctatccatgacaaacccacagccaatatcatactgaatgggcaaaaactggaagcattccctttgaaaactggcacaagacagggatgccctctctcaccactcctattcaacatagtgttggaagttctggccagggcagtcaggcaggagaaggaaataaagggtattcaattaggaaaagaggaagtcaaattgtccctgtttgcagatgacatgattgtgtatctagaaaaccccagcatctcagcccaaaatctccttaagctgataagcaacttcagcaaagtctcaggatacaaaatcaatgagcaaaaatcacaagaattcttatacaccaataacagacaaacagagagccaaatcatgagtgaactcccattcacaattgcttcaaagagaataaaatacctaggaatccaacttacaagggatgtgaaggacctcttcaaggagaactacaaaccactgctcaaggaaataaaagaggatacaaacaaatggaagaacattccatgctcatgggtaggaagaatcaatatcgtgaaaatggccatacttcccaaggtaatttatagattcaatgccatccccatcaagctaacaatgactttcttcacagaattggaaaaaactacttgaaagttcatatggaaccaaaaaagagcccacatcgccaagtcaatcctaagccaaaagaacaaagctggaggcatcatgctacctgacttcaaactatactacaaggccacagtaagcaaaacagcatggtactggtaccaaaacagagatatagaccaatggaacagaacagagccctcagaaataatgccacatatctacaactgtctgatctttgacaaacctgacaaaaacaagaaatggggaaaggattccctacttaataaatggtgctaggaaaactggctagccatatatagaaaactgaaactggatcccttccttacactttatacacaaattaattcaagatggattaaagacttacatgttagacctaaaaccataaaaaccctagaagaaaacctaggcaataccattcaggacataggcatgggcaaggacttcatgactaaaacaccaaaagcaatggcaacaaaagccaaaattgacaaatgggatctaattaaactaaagagcttctgcacagcaaaagaaactaccatcagagtgaacaggcaacctacagaaggggagaaaatttttgcaatctactcatctgacaatgggttgatatccagaatctacaatgaactcaaacaaatttacaagagaaaaacaaacaaccccatcaaaaagtgagtgaaggatatgaacagacacttctcaaaagaagacatttatgcagccaaaagacacatgaaaaaatgctcatcatcactggccatcagagaaatgcaaatcaaaaccacagtaagataccatctcacaccagttagaatggcgatcattcaaaggtcaggaaacaacaggtgctggagaggatgtggagaaagaggaacacttttacactgttggtgggactgtaaactagttcaaccattgtggaagtcagtgtggtgattcctcagggatctagaactagaaataccatttgacccagcaaccccattactgggtatatacccaaaggattataaatcatgctgctataaagacacatgaacacgtatgtttattgcggcactattcacagtagcaaagacttggaaccaacccaaatgtccaacaatgatagactggattaagaaaatgtgacacatatacaccatggaatactatgcagccataaaaaaagatgagttcttgtcctttgtagggacatggatgaagctggaaaccatcattctcagcaaactatcgcaaggacaaaaaaccaaacaccgcatattctcactcataggtgagaactgaacaatgagaacacatggacacaggaaggggaacatcacacaccagggtctgttgtggtgtagggggaaggggggagggatagcattaggagatatacctaatgttaaatgatgagttaatgggtgcagcacaccaacatggcacatgtatacatatgtaacaaagctgcaggttgtgcacatgtaccttaaaacttaaagtataataataataaaataaaaaaattaaaaacttctgggctgggtgcagtggctcatgcctgtaatcccagccctttgggaggccgaggcgagcagatcacgaggtcatgagatcgagatcatcctggccaaaatgatgaaaccttgtctctactaaaaaaaaaaaaaaaaaaaaaaaaacacgaaaatcagccaggcatggtggtgcgtgcctgtaatcccacctacttgggaggctgaggcaggagaatcgcttgaaccgggaaggcagagattgcagtgagctgagattgcaccactgcactccagcctggcaacagagtgagactccatctcgaaaaaaaaaaaaaaagttctgttaagtttatggaccacatagggactatatctcaaaactcttcatgacaaaatagacttatatagtattctaggccccagatgcctcaatggatagtgttatggccctcattctcatgatggcagactccccaccagggttgccttccacagtcacccctgttttattccatttgactgttataccaaagtatcatagaccgggtggtttacaaacaagggaaatttatttcttacagtgttggaagcttgaagtccaagatcaaggtgcctggcctctcttctgatttattcaaaagaaatcaagaatttctttttggcatagctgttaaagtatatggtaagagtgagatctggtggtgctgagatctttgaggctggtgatgccattggagatagggtagactagggaaggagttaagtttggggaaagaaatcaagaatttacttttggcataagatacctgttaatgtaagtggtaaggtgagatctggtgtctagtgacagcccattcctgatttatattaatagataactgtatttttgctatgtactcacatggcagaaggaatgaggggatacttcgcattttattaaaaatttctttttatttttaatttttgtaggtacatagtaggtatatatatttatggggtacatgagatgttttgattcaggcatgcaattgtaataattacatcatggagaacggggtattcatcccttcaagcatttttctttttttcttttttattgttttttgagatagagtcttgctcttgtcacccaggctggagtgcaatgccacaatcttggctcactgcaacctccacctccttggttcaagcaattctcctgcctcagactcctgagtagctgggattacaggcaagcaccattacacctggctactttttgtatttttagtagagacacggtttcaccatgttggccaggctggtctcaaactcctgacctcaagtgatctgcccgtctcggcctctcaaagttctgggattacaggcatgaaccaccacacctggccccctcaagcatttttgataaaggcacttatcccactcactacagctccaccttcatgacctaatcagttcccaaaggccctgcctccaaatattatccccttggggattcggtttctacctatgaattttggggagacagaaacatcagtctttggcacctccccatatttggaggagagccccagcattctgtctgccattaattgtcttatctcaactacagcagaaggaaggaagggtgtccaagggagagaatacagttatgggttcttagtttctgtttctggtggggtcactaaagccccttccttatcccttttttccacttatcactagagacagaaactaaaaatcatggcttcaggctgccaaaagcctaaaacaaaacaaaacagaacgacaacaacaaaataaggagggttggacaagcttggcaaggaagccgtaaggtgagaaccatgaaagtggaagtgatcacctgaaacttgacagcatttcagatagagaggtgcatttcaaagacctcgaggtggatgaatgcttggcttgtcccaggaacaattaagatatgagtgcagctggaccagagtgagagagtaggacagcagtgacagatgcagttagagaatagatgggaccagatcatgcaatgagggatagactatgggaagacaggagtaaaagcaggaagaccaattaaaagaggtgctaggccgggtgcggtggctcacaactataaccccagcactttgggaggctgaggcaggtagattatgaggtcaagagatcgagaacaacccagccaacatggtgaaaccccatctctgctaaaaatacaaaaatcagctgggcgtggtggcacgtgcctgtagtcccagctacttgggaagctgaggccagagaatcacttgaacccaggaggcagaggtttcagtgagccgagatagtgccactgcactccagcctggtgacagagtgagactctgtctcaaaaaaaaaaaaaaaaaaaaaagatgctgatggcttggtctaggatggttgcttgagatgggatggggagatattgttggattctggatacatttcacatgtaataataggtgggatttgctgatgcatttgttctacagagtgagacagaagaattcagagcatctccaaggttggtctgagaaactttgaggctggaggtgccattaaagataagatagactagggcaggagttcagtttggggaaagaaatcaagaatttatttttggcataagatacctgttaatgggccgggtgcagtggctcacccctgtaatcccagtgctttgggagaccgaggcaggcggatcacgaggtcaggagttcgagaccagcctggctaacatagtgaaaccccatctctattaaaaatacagcactggtgtttggaatatcagtaggtagcatagtgcagtggttgagatcatggacttttggcctcaactgctggggttcaaattctagctttaccacctattagctgtgagaccatgggcacgtcacttaacccttatgtgccgcagtttcctcttctgtaaaagggggacagaattacctcatcaggaggattaatatggagattgcttggaaaattgcctgatgatcacacttctggagctatttgacagcgaagaccctcgggaacgggactactttaaaacagtcttacacagaatttatggcaagtttctcggtcttagagcatttatccaaaaacagattaacaatagttttctaaggtttgtttatgaaacagaacgcttcaatggtgtagctgaacttctggaaacattaggaagtattatcaatggctttgctttacctcttaaggcagaacacattttctggtgaaggtattgatccccttacacactgtcaggagcttatcacttttccatgcacagctggcatattgtacagtacagtttctggagaaagatccttcactcacagaacgagtattagggggttaatgaaattttggcctaaaacatgtagtcaaaaagaggtcacgtttcttggggaactggaagaaatattggatgtgattgaaccttcacaatttgttaaaatccaagaacctttgtttaaacaaatcgccaagtgtgtatctagcccccattttcaggtggcagaaagagcactctattattggaataatgaatacatcatgagtttgatagaagaaaactctaacgtcatccttcccatcaagttttccagcctttatatgatttcaaaagaacattggaatccggctattgtggcgttggtgtacaacgtgttgaaggcatttatagaaatgaacagcaccatgtttaacgaggtgacagccacacacaagtcagatcgtcagcatgagaaaaagaaagaaaaggagtgtgaagaatttggaaaaaattggaggatctggagttaaagagaggtcttagatgtgatggaataattccaacttaacaaaaacaatgacaacaacattactaacctgtggagtcacacatttatgtagtagaagatggagcaacagttttccatattgtgcagctttacagtagatttcacatttgtttcattattacaacagcactgtatatacctgtctctaagtaaaggaaaaaaaataaggacttcagtccaaagtttggacagcagatggacttctcaggactttgcaaacataatcattgttctaaccctctttttgaaaaaaatcagtcctcaaagttctgttgatgaaattgctatgttaaaattccattatcgggagttccttatttatcactagcagagagtatgatacaattttcaaatgtgaacaatcttaaatttagcttgtctttctgctaagctgttaaatgtatttatagtaaaggaagaaaaaaagactcatttccttataagtttgtgtaacatcctcctctggataacttgactgtaatttgacatcttttcttttgcacatcttcctgagttgaatgtccatgtggaatggggtcatgacagaactgataaaagttctgtttactgggatgaacatctttctagtaaccaggtagtcctggtactcctttagttttaaaactaggagttaaaagagaacaggtgataaacatagtaaggaagggaattttggattcatgcatcagtttatggtgaatccaaatcaatgtcttgaatcctttgaaaacaggcactgggacatcacaggcttcagtacctgaccagtattagttgcatatatcattgaacacacataccacagatgttttagaaatgcaagaaaaacatccttttggaccatttgaaataagaaagacaaacactaaacaatacaaccatgaaattgatcgccgggattgcaaataaatctaattgggaaaagagttgagcaaacagcttggactgtttggagttgttgccttactttttaatgtatatttataaagtattccagcaaaagaggatgtagcctctgggaaaaaacaaacatgttacagtgttttttgtagattctcattctatatctcatcacagcaccagccctcttttttgccggaaaggattcaggataagtattattatgcattctgaattggatgcatattcctaactactgtattggttaccaaaagtggttctacaaaggctactgaaaaaaatctggaaattcctaatgtcttgagtattaataataaagtttaaaaatggttttatatcaaaggtgcatcgtgatcaaattgtttaagaaaaaaacaaaaaacaaaatctagggctgtattatatatatgtatatatatgtgtgtgtatatatatatatatcttattgactcttcgctttgtatttaaatgaagaatcttacatcttgggtaggtaaactgctgataaaacttgtgtacagtatgtacttacctaatgcagttgcattattatgtactgaaagatatgtgtttgggggtttatttccaggatgattttgcttgttatggacatggcagcagtgagttggtaatcctaaaccatcacttccagcagtattcgtgctatagagctgattctgtgttcatgcattgaattgtgatagtagcaaacatgaacatatgaactattgttgctcttaatagaaatacaatataaatacgggcttgtatattttcttccttacatttaaatataaagtagaatatacagttttattgttttcaagaaaaaggaaaaaaagctgctgacctttctcctccatgaagtttttcaggattatcaggtcacagtgtgtatgtaagagtcagctaattatggatattgttatctcagtaactttgtaaaaaaacaagaacaaaactggcattgttaattaaaaaaaaaaacccgcagtaaaaaaaaagtcatatgcaacaccagacacaacatggtttaatggaattaatagtatttttttttttaaaaaaaagaacattgatgaggattcactgtaaagttggtagaggctgccaaagacaaaacaactgactttaaaaatgctggaacaaagtgataaaaataaatttgttacaaatctcttttttagccctcgtcattttagccctttagtttcaactctacgttatatttatttttgatgatataaacttttgttttccattaattcatctttttaggtagaggatattaaaatcacaggtttatgaagaatctctgcccattggaatgaaatgcagtcatttgaaacgagcaaggccaggatcctttttcgcaccttaccctgtcttcaagagtaaaggtgaaaacttacagctctcctccttgatgtcaattttgtatgttgatcattccaaactgagaagaataaagccacattttagacatatttaaagtatcaattaaagctatatgtctaaaattcatagggcaacttctgagaagaaacgctgtctttttcttttttaatggaaagtgacaatgtgacattagtcatgttgtgtgcggtgacggagagtaactgaggtaatctgactgttgcactgtgtgacatatttcaggacatacttgctgcatttgcagcagccctctgtccctgtcccttcccacaattctgctgttgctgcaacttgagttaattgtgacaaatgaaactttgtgttatattttgtttgcttcataatttccagaactatagataaatatattttttaaatagcaaatattgtagttagtaagtgatgatgactccaaccttatccttaccatattgatttcagggatatgattaaaagtgtctttggaagagaaaaatatacacaaccctgtggtttagaatgatgctgaggccttaggctgtgggcctagaacagctatgtgagtgaattcccccatctcatacttggaatcaagcatgcgtccctgtttttcattgtgcaagtatccccagttgttttccttcagtgttgagtttttgtccttttaaattttattatatgttgctctccctaatatttgactgttctttataaaagaaaagaaaaaataagaaataaataataccctcaatgccgctggatactcacaagcagggttatgtagatcttgggcttgtttgcctaaatgaaagggtttaatttattttgtacctcctatgtgtgggatagtccaggatgcagagccaggacttgcttgtaattgcacctgctatacttaaatgtatagccttaggctcaatcacactgtggaaagaaacaaaaatattatatttagagctttaaaagcatttttatttttttgtggggatgaaggtgggatgggaaagtgatgtatggatgttattggaatttttaagtgtttagagttttttggggtttggggtttttttccttgttttccttttttccttttaattggatgcactgacctgcccaggaaatgaagagattctcttttgatgctcttaccaatgttatcataaggtgacagtcacctgcaacaaaagggtggcaccagacatgatcactgatgttttatttgcacatcaatatttttatttttgtactctggctcagctgcttctctgagtggagttaaggaatgagccacaagggattttttgtagtaggcatattggcattgcattttatattcctctatatttaattttgaaaatctaaaaggatcgtgcatcttgagagaaagttgagcaaattgtgttctagcggaatgtgaatttgtagtgcttcttgtgcatgacagcagcagtagtatctctcttggaaataaatatcctatattatgatgtctatgaatataggtttccttttcttccgtccctccctcctttcttctcccacctttctcttttttctctttctctgagcctctcttttcctccctccctcttcccttcctctttctttactttttttgaaatcacttattgtaaataagttgtaatccaaacctcatgtataaatggggaactttcaaatataaatattaccaatgcgttttctggttgttgtctgatttttgattgaagtataatgagaatgacatgtctgttacttttggtttgaggacttcgctttagcttcataaatcttttggtattttagtatttcattgttttagcagagagggcagcaaaagttcattttccctgttagtaatgctgtggttcatgatcagttttaaatttagctgtgtgtgtttttttaaacagcatctttgtgagtacagtaaaaatgaaacatttttgatacgaaaagttgcatatgaaaattatagactggttcggccgggtgcagtggctcacgcctgtaatcccagcactttgggaggccgaggcgggcggatcacgaggtcaggagatcgagaccatcctgactaacacagtgaaaccctgtctctactgaaaatacaaaaaaaaaaaattagctaggcgtggtggtgggcacctgtagtcccagctagtcgggaggctgaggcaggagaatggcctgaacctgggaggtggagcttgcagtgagcggagatcgcgccactgcactccagcctgggtgacagagcaagactccgtttcaaaaaaaaaaaaagaaaaagaaaaaaaagaaaattatagactggttcaaccagacagtgaagacttctgatccacatcaaacttaaaatgccacaaaacaatcttccacctctggctaaaacatgctactttcttttcaaacacaacaaaatgcaagctgagtcttaaatacttggaatttaaaatgttttcctttggaaatgatttgctttcttcaaagttgtaacagaaacaaaaatgaaggtgctccccaaaaagaaatgtaaccttcccctttcatggatgtgtgagaggttctgtactgtgggtgcatcataataaagaagcagtgaagagtcaaaaaaaatgcaaaaattagcagggcgtggtggtgtgcacctatagtcccagatacttgggagactgaggcaggagaatcgcttgaatctgggaggtggaggttgcagtgagccragatcacgtcactgtattccagcttgggcgagagagcgagactttgtctcaaaaaaaaaaaatacctgttaatataagtggtaacattaagtacttggagtttaggggagaggttgggtattaatttagaatccatcaatgcatatatgacattgaaagccttagggtgtatgagatctcctgtgtggaagtgtatataaaagagagaaggcaggtggggactgagccctgggcactatggtgttgaaaaatctgaagaggccaggcaaggtggctcacacctgtaatcctagcactttgggaggctgaggtgggtgtatcacttgggctcaggagtttgagaccagcctggacaagatggcaaaccccatctctacaaaaaatataaaaattagcctggtgcagtggtgcacgtctgtagtcccagctacttgggacgcttgagcctaggaggtcgaggctgcagtaagccaagattgtgccacgtcattctagcttggacaacagaccaagaccctatctcaaaaaaaaaaagaaaatcaggaagactacaagaatgtaacaaaaagtctaagaaggagtagcctccgaattaggtaggagggggagaactgagaaagcggtattctggaatccaagggagaaaagttaagaaagagagagggatcagctacatcaaacattgtcaaataagatgagaactgagaattctattacatttagcaatgtgtagccactgttgaccttgacaatagaagtttcgctccagttgtggagaagaaagtccgcacggtgagtccaagagagactaatatggagactaattggaggtacacagaaagttattgaggattttgctctaaaggaaaagcagagaaattagttggcagctaaataaatatgtgagatcaagtgaggagtttccccaaagaggatatattccagcatgtttaggagaaaaaaacaaaagggcaattgcaaaagcacagttcttatcttataggcaagaaggggtaagacaaatgcactggaagattggccgtgagttggagcagagatccaccaccattgtaataagggagaaggtgggtggataaagatgatgagtacacttggtagtaggaagatgaagtggtccttttcagtttgtttctaattccccaatgaaatgtgaggtcaggttagtgcagtgttctcaaagtgtggtcctcagaccagcagcaacagcatcacctgagaatttgttagaaatacaaattcctgggccccaccccaggtatacccaaccacaacctggagatggggtccagcaattggcatttgaatgagccttccaaggccaggcgccatggctcacgcctgtaatcccagcactttgggaggctggggcgggaggatcacctgaggacaggagttggagaccagcctagccaacatggtgaaacccccggtctactaaaaatacaaaattagccaggtgtggtggcaggcgcctgtaatgccagctcccagagacacagaatcatttgaacctgggaggcagaggttgaagtgagctgagatcccaccactgcactccagcctggggaagacagagcaaaattccatctccaaaaaaaaaaaaagacaaaagaatgagccttccaggtgatgatgacatgtgctcaagctagagaaccaccggattagtgtgaagagggagagagcagggaatcagaggtttgagaaaatacaagaagaaatagtttctctagctcatggaggagtgggatgactagggaattgttatgggattgctaagcagggttgaggactcacttttgtggtcattaatttaaaaaatgagaccaactagcaagattggttttgtttactctttctatattcagcttttcaggggcaagagtggagtatgcagagctggattttcaccagggttggtgttttgctggacaattgtgacaaagggaaggagagcaaaaaggtggaacacgtgagcctgaaagttgagagtgcaagcaagagagtgtctctgaagatgagccagagaacacaaggagagtggtctgtgtgtgaggatcagtgggttggatttctgggtggagtagaaggactcttggagggctggttttagaaggaatggggcaaaaaggtgggatgtggttgtcggacccagattttggagaattacagtgagtgacaatggcatcttggctatgcctgaggctgcgagttgcacaggtgggtcaaaagcaaccatcagaga

SEQ ID NO: 96934 - DNA, 13504 bp, Homo sapiens
  misc_feature (1)...(13504): n = A,T,C or G
actgtgcacaaatattacaacaggagactgaaatctggatgatctggggtatatgaaactgacgactctttacattgagaaaacaattattaaaatttgaaatactctgttaggcctataactatattgggttaaacaaaatgtgttcatgggctcatccaatggttctaaaactcggctgtgcattagaatcacctggggagcttttaaaagtcccaacgttcaagtcacatgcctgggcagttaagtcaatctctggaggcagattcagtcatcagtattttttttttttttttttttttttttttttttagacagagtcttgctctgtcacccaggctggagtgcagtggcgcaattttggctcactgcaacctccggctcccgggttcaagtgattctcctgcctcagtctcctaagtagctgggattacaggtgcctgccgccacacccggctaacttttgtatttttagtagagacggggtttcaccattttggccaggctggtctcgaactcctgacctcaagtgagctccctgcctcggcctcccaaagtgttgggaatacaggcgtgagccaccatgcccaacccagtattcttttttttttaatgtctcaggtgatttcaatgtgcagttaaaattaagaaccactgcttttgatgtgcatcggtttgtgagctctgattatagggcatattttggcagaaggatgttgtgaatgttctgctccacctagggccttctgttaattggcaggtgtgctgtatcacacatgttaagtgctgcagatgagatttcagaggaaatcatcaagcgctctcctgttctgtttctcttgagggcctcaactcttcatcatgaaatgtaggctgttacagtgatagcagaagaggtcaccaagaaactcatatgccattatactttacatgagtgccgaagctcctgtcgcagtccatattatctgtatctaacatcttgtcctgggtacagtttcccattcagccacttggctgtactgtctgtatgttgcatgataattactaggcattatacatgtgcagtcacatagcaaccatgtgacaatgcccacttcttgtgtaggtgtgcacaagaaattctcttcaaggtctcagaaggactgagtacggcaggcctcacaagacacagccatggtgggcaaatagcagtgcctgacattcctacccccatcctcagatagtggagtttcccacaatccccctccttgactctgttctctctcggctcacgttccttggctaacactctcataccacttaaatctgtgctgccagtgcttatctgtctactaagttcaatcccagatttccattggctaattagacatctctacctgaatgtcttaaggacctatgaactcaatgtgttcaatcctgaattcattattgtcttcaataaatttgtttctttctttctcttccccacccccgccttgtcccatttgctttgcttaaaaaaaaagctttgcttcctttatgtggaaagacacataaaggaagaactgaaaaaccagggctcaggacagaaggcaaggaacttattggccaacagctgtagaaacatggacagccttctaagatgctgtatttggatggctcctttacaaatgcctcaaatccccctgtgtctctgctcaagattcaattcctgagagacataaactgatcgatctatcttgggtcctgtggccatccctgactttgactcaggtgagtgggttagattgggaacccaacagaatcagatgaaatgaggtagaagtaatccctcaaagataaaacagagtgctattgccaggaaacgaaggagaactacaaaatatggggaaaataattttataaaaattgtctcccttttgtggatttaaacagtatataaaagtgacatataaaatataagtaaatgcatttgtgagaaaccaatgttttacctcatttttattttaataagtaaagtaattcatgctcaaaattaattttagcaattcagaagcttataaagtgagaagtaaaaattttccttcctttaatttatgcttctctaagttcctagtgctattccctaggggtaatcacttttggcagttcttatatgtcagaagatatatttttaggtaagcaagttgggcctatttctaggactactttcttttcaggtcccaaaaacattacaatgctcattatcatgtgtgtcaagccacttctataaatattatggtggccgggcacggtggctcacgcctgtaatcctagcactttgggaggccgaggcaggcagatcacctgaggccgcgagttcgagaccagcctggccaacatggagaaaccccgtctctactaaaaatacaaaattagctgggcatggtggcacatgcctgtaatcccagctactcgggaggctgaggcaggagaattgcttgaacctgggaggtggaggttgcggtgagccgagatcgtgccattgcattctagcccgggcaacaagagcaaaactcggtctcaaaaaaaaagaaaaaaaaaattgtggcaaaattagtggtaccaagggatgaatgattgcccaaactttaaataaatgtagtactttataaattattgtcattaagttatttctgaacttcctgactcccataatttttcatctttcatataacaaaggccacgccaatttttaaatcagcattttatagatcataaatctgacatagaaactttgtgttcaaaaatgttcttttacaatattctgctaataaggagaaaacaaactattaatagaagctggcttgtcaaaatccaggtatgataagtatttctggaccagaacatgcagtgttatgtaaataattccctgagtgatagagatttgtagtttatttcttatttgaatcctggtggagtttgttcttttctttgctcccatcaatattttggagatagagaggaagttagaattgaatgatccaagccttatgcaattagccatttggaaactgctatataaacagtaaagaggagaatcagctggcatgactgccagtgagcagttttttgggagaagaatggtcttgattgcctttcattgggcatacaggaaagcagagttggctttcacctcttcatttggccccctaggcaagctccaagcagatcatgcagaggtattgtatcttgctacacaaatcttttccttctgaaagggtttatctgaatgcaaaaggattcctgtttccttggcatgctaaggactcccttgctccccaaggccatggagaaaagcagaacggaaagtggagagaaataacaaatgtaattattctgcagcttgttctgggataaatacttgatgttctgacctgtaaacgaagcatggggacatttctagtgtgcagcatatgttccctctagacccctgtgtcttcctaattgaacttcagagattaatgccacaagaatttgtcatggaatggcacagcctgcttctaaacaaactgtcccacttccaaggcgtcggtccaagagaatggcttcccactaattgctctttgtgtataaatttctactgaataatctggaggtaagtcagaaatgggcagaattttagcagatctactgtgatgaaaatgaagaggaaatcactgagattatgggggagacgtggaatttccatctgccagggatttgccttgacccaaagcacaaggggcaattgacccccctgctatgttcttgagggaatgtgggtttcccttttgtggaagttcagatgatcaacagtagatttttctcctttcctcttcttcctctctaacctgaccgtctctgaatatacagtcagtacccaagtactggccccagattaaaccgtaaactcggaaccaggccttgcacacaatagacacctgcttgaccaacatctgctgaactgagcggcaagaattcacagtcacaatagaaaccttctacttggagtcaagtaatcagggattcctctccaatttgcttggtttcagcctgcagggctaggtgaaagtgtgttgtttacttgcactagctacaggcggtgtagccagggtgggtaggcagaattagctgtcaaacttaaagggcaagatggagagaaaataggaggataaatgggtattcctgtagctcagtgtttatgatgtaggacagaatctttgtacagaattgactggggagagcagctcagaacccaccctgtgatggctgagtgctggcagtcttctggagggtgtgtggggcggctgacatggtggcctgggggagtgatggaaggcccatcatctatgtactttgacttctcataaactcctgtggcatgtttttaataattgatagaataagtaaacagaaagtcaataagaatatagaagacctgaacactactactagccaacttgacctaagtgacatttgtagaacactgtatcctcaaacagcagaatacaccagaatatacattcttctcaagtgcatatgggccatctaccaagatagatcatattctgggccataaaatgagccccaagaagtgtaaaacattttaggtcacacagagtatgttttctaacaatggaattaaatcagaaatcaataggaaaattcttgaaaaatccccaagtatttggaaacgaaataatatacttttaaatagcttatctgtcaaagaagatgaaaagggagcttagaaaatattttgagctggatgaaaaggaaaatacaacataccaaaatttgtgggatgctgcaaaaaataatacttaggaggaaatttatagcactaagtgattgtaatagaagaaagatttcaaatcagtgaccttagttcccaccttaggaaataagagcaattaaacccaaagcaaacagaagaaaggaaatcatatgtatgtgttaaaataaaacattacatgcagtaaaactgaattttggggggaagtatacagttctttgaggtgtttgtttgtttgtttgtttgtttttgagatggagtttcactcttattgcccaggctggtgtgcagtggcacgatctctgctcactgcaacctctgcctcccaggttcaagcaattctcctgcctcagcctcccgagtagctgggattacaggcatgcgccaccacgcctggctaatttttttgtatttttagtagagacggggtttcactatggtggtcaggctggtttcgaactcctgaccttgtgatccgcccgcctcggcctcccaaagtgttgggattacaggctttagccactgcgcccggccagttctatgagttttaaaacaaatgtagaccaccacccaatacattgtaaccaccagcacaatcaggatacaaacatgtcccaccacttcccacattccctcaggctgtcccttcatagtccaaccgtcccctaaccccaagccctggcaatcactgatctgttctctcacactatagttttgccttttctggaatgtcatagaaatggattcatacagtaagtcccctttagagttggcttctctcacttgcataatgccttttggatttatccatattgttgagtgcagcggcgtgatcttggctcactgaagccttgacctcccaggctcaagaaatcctcccatctcagcctcccatgtagctgggaatataagcggaggccgggcggaggtcgcagcgccgcagccagcgcagccagccccagggggcgccatctccgccgctgccgccgccgccgccgccgccgnnnnnnnnnnnnnnnnnnnnnnnnnnnnnnnnnnnnnnnnnnnnnnnnnnnnnnnnnnnnnnnnnnnnnnnnnnnnnnnnnnnnnnnnnnnnnnnnnnnnnnnnnnnnnnnnnnnnnnnnnnnnnnnnnnnnnnnnnnnnnnnnnnnnnnnnnnnnnnnnnnnnnnnnnnnnnnnnnnnnnnnnnnnnnnnnnnnnnnnnnnttcctagccaaagccagaggagatttcctctacagatggggaaaccccgctcaaaacaccgccagctcggatcagttcgaacggctcaggacgctgggcatgggctccttcgggcgggtgatgctggtgaggcaccaggagaccggcggccactacgccatgaagatcctcaacaagcagaaggtggtgaagatgaagcaggtcgagcacatactgaacgagaagcgcatcctgcaggcgatcgactttccgttcctcgtcaagctccagttctcctttaaggacaactcctacctgtacctggtgatggagtacgtgccgggtggggagatgttctcccgcctacagcgcgtcggaaggtttagcgagccccatgcctgtttctatgccgcccaggtcgtcctggccgtccagtacctacactcgctcgacctcatccaccgcgacctgaagcccgagaatctcctcatcgaccagcagggctacctgcaggtgacsgacttcggtttcgccaagcgcgtgaagggccgcacttggaccttgtgcgggaccccagagtacctggcccccgagatcatcctgagcaaaggctacaacaaggccgtggactggtgggccctaggggtgctcatctatgagatggccgtgggcttcccacccttmtacgccgaccagcccatccagatctacgagaagatcgtctctgggagggtgcggtttccctccaaactcagctctgacctcaagsatctgctgcggagcctgctgcaggtggacctcaccaagcgcttcggaaacctcaggaacggggttggcgacatcaagaaccacaagtggttcgccacaaccagctggatcgccatctatgagaagaaggtggaagctcccttcatcccgaagtacacaggccctggggatgccagtaactttgacgactacgaggaggaagagctccggatctccatcaatgagaagtgtgccaaggagttttctgagttttaggggtgtgcttgtgcccctgtgggttttctttcctttttgtttttggtggtttgggggatgggagggttggattgaacagccagagggccccagagttccttgtatctaatttcatcctcaccccaccctccagggttgggggagcaggaagcccagatatttggaggaacagaaacaccagctgctccctcaccccsscccatgccttcctggtccctctgtgcttctctctttctcctcccacagggtcccccttgccccagcccccttctgcctgttttaaacgagtttctcagctctattcaggccaggtcttgctgttgtatcaagggacacggtgtggaaagaggggctcaaacttaactccagccctgaacaggcaccacttactaagagaggatgaatgaaaagcacacctaccctttggmgtaatcctgcctgggaaggagagaggtttagtgccatgttcagtgggctgtttgctagaataaaaaattaaaacaaaaaacaattaaaatcttatttaagttccaccagtgtcccctttcctccttcctctacttccacccctcccacccttcccaccttaccgtgtctccccattccattttaacaaatccaggaagccgactgactttggaaggaggctctggggtttgaacttcccccgtgaactgctgatttccccctcccccctccccaggggcatcctctatcactcttgcaaaggtctcagttcttttaggaagctccactctcttcttccccagcagacttttcttcacccttgggctttgggagccagaaaagcagctgccctactccctgccaaagaggagttgtcccccaaaaagacagagtgggagttccaagcccaagtctttcttcacagcagcatttccccgaaactccttaattttattctcagccagattgtgatgcccagcctctccttatgggaaggcagtcctgcaaaaggacatggaagaggcccagcccctccacccccacctcatcgcccagggttcaaggctagggttgctggggaggggctgcctgttttattcacccagcagcttctgccttctcccatcctgggtgcccctctccagcttagctgtcagccatccttcacctcttctcccctgccaccccgtgctgttttcaatttttttttttttttgacatgaagtctcactctgtcacccaggctggagtgcagtggtacaatctcagctcactgcaacctccgcctcccgggttcaagcgactctcctgcctcagcctcccgagtagctgggattacaggggcccactaccatccccggctaattattgtatttttagtagagacgaggttttgccacattggccaggctggccttgaactcctgacctcaggtgatccagctgccttggcctcccaaagtgctgggattataggagtgagccaccgtccctggtctgttttctttcttaatagaaaagtgaggagctgctggcaagccacctcattcatcttcatatttccccctctcatcacttctccccatcccaggaggagctctcaggcctggggtgggtccccaggtgggctcagggtgattcaacctgcttgctgtgaaaagatgagatttcctcttgaacagtgtgctgttgtaaacatatgtcaaaactattaccaataaggccgggtgctgtaatcccagcactttgggaggccaaggcaagtggatcacttgatgtcaggagtttgagaacagcctggctaacattgcaaaacctcgtctctactaaaaaatacaaaaatagctgggcgtagtggcatgcacctgtaatcccagctacttgggagactgaggcaggagaatcgcttgaacctgggaggcagaggttgcagtgagccgagatcgcatcactgcactccagcctgggtgacagagtgagactctgtctcaatacaacaaaacaaaaaaccaactattaccaataaagttttgttaaaaaagaactggcaaaactaatctatgatgctggaagtcataatagtgacctttgaggatggcattggtggagaggggacatgaaagagccagcaggtggccaggcacggtggctcacgcctgtaatcccagcactttgggaggccaaggcgggcggattacgaggtcaggagttcaagaccagcctggccaacatggtgaaaccctgtctctattaaaaacacaaaaaattagccaggcatggtggcagctgcctgtaatcccagctactcgggaggctgaggcaggggaattgcttaaacccgggatgcagaggttgcagtgagctgagactgcaccaccgcactccagcctgggcgacagagcgagactctgtctcaaaaaaaaaaaaaaaaaaaagccagtaggttagctgcaaatgttttctatgcgctttaggtgctgggcacatgggtctacacatatgtaaaaattcactggactatacaattcatagctgtgcactctagcatatgtaagttatacctcagtcattaaaaaacggttgaaaatgttgaggttttttgagacaggtgagacaacacaggcaggccacgggtgattcaagtggggatagagttttgaggatcacagcctcatggtattgaaacggcttttgagttaggtcttaaaataaaggttcttaacatttcttgggtccaggtcactgtgaatttgataaaaagtatagtctttctcttcatgaaaaaaaaaacaccccatatacacaaaagcatacccaacttgtgtatatgatttcatggccctattaacatttatctatgactcttctagaaatcagtgggtcctaggctaagaaccctgcttaaatgggtagatttacaaatgggaggggggaagagtgggattcacctatgaaaacccatgtagtaagggagagtggtagcacatatgaatactagagagaggcagaggatcctcaatcatccacttctgcagaattccctgttgacatcctaacctaggatgtaagacatcctagctttccagcactgactctgcaggtgaaactgctacttatgctgagtaactatggctctgggctacatttacaaaagtttacagcatgcttgcttacaagaatcagcttgttttaactcgaagtatttaacactgagcatcttactcatcaggaatatctttctgcagccttgatcattttgctttctaatgatttttctctcaacctcttacgtctctgttgctagggacacttaccaggtggtgtaaactgtattaattaattaaaatattcattgctgagtccattcccatgtgagaagtgtacatcccacacctttgactccagacctgtcaatgtcactcatgttggtggatggaatgcaagtagaaatgctgtcagctgcactgagacagaagctttgtgagctctcattggttccaccattgctctttttctctgccatgaaagttgcctgtcccacataggggctgctctggaccccagaatgaagaagactcttggagcagagctgcagctggtccccacatgtgagggagacgtaaaactatgttggtgaaagctcctatgatgttgggattgtttgttaccatagcataacatagtgaaagctgactaatataccaggacatttgggaaagtctttggatgagttcagcagaagctgctattgaagtttttcccatttttatccatcatgaaattcagtttatttaggatttctgaatatctcaaatgaggagtatttgggttatttttaataaaagaagaaatggaaagaccataaatcactggaatcgatgtaccaccacaattgagaacaaaatattttatttctctcacaaaactatagtttacagtagtatttactaaataaattatataatttctcttttacaagcaataaactagatcacaaatatttcaaagacaatgtatgtacacgacataaggccttttataaatagctttgcttttctcatttcactagtaaacagtgaaaaaatctttatagaagctagttttctataaagtgaaggcagacctagtatattgatctttaaatgaaaccaatttaaactttcaatgacatgaactataattttgcaaaagaatttatacttaatttaccatgtgtgtggatggatttttaaaaatatataagcagattacatatgttgcttatgtataatcactggatgcatgcacaatgaaataatgcaaaagtccataggaaaatagcacttccaactccaaaaaggtgattggcaatggtacagaaagcagcttaaatatagttcatgcagttcttcacagttcagcaagcaacagcaaatgatagaatagggtagtatttttcacatcccatctgctgatcagcctgaagttgacatcttgaaaactcttaagtcaggttgatgatttctctgtgtgtagtggggctcagccaagttgctgtggataattctggtgcggagaaacttctctgccataactgtgctcacgtctcatccatgtgcttaggtgatcaccattttcacttactggggggagcaaaaaagcaggtgtgagactagattttggcatcaatttgtaacctctccccatgagtcgcaacataagttcgttatttctcccaatcacttgtgtctggaaaatggggtgcattatgtttgggattcttctgcaatgatcagcatagcatatacttctttggtggacctgaaacctgttaattacaccaatgtttatcaagattgagtcctgactacatcacagcactgtgctcgggacttggaaggaagcaacactgactaagacaccctcctgccctccaagtgcacagggatgaggggatgtgctgtggtatattagatctgaagccaaaaagaacaacttgaacatggccttgaacttgtaaatgtttttttccaaacaatatcactgtggctgggtggtaacaatatgttcagcaaatggtagctatttaaatggtagctatttaaaatcagagccagctaactcaacctgtgacagcagcactatgatatatgtggggaaagcaatattatattcagcctttagagacagacacattgggtcaaatcatctgatttcctattttttttttttttagatggagtctcactctgttgcccaggctggagtgcagtggcaagatctcagctcaccgcaacctctgcctcccacgtacatgagattctcctgcctcagcctcccgagtagctgggactacagctgcctgccatcacgcctggctaattttttgtatttttagtagagatggggtttcactgtgttagccaggatggtcttgaactcctgacctagtgatccgcccaccttggcctcccaaagtgctgggattacaggcgtgagccacctcacccggcctgatttcctaattatttcatctgtagaatattatgcaacatcttcttggaaccttgttgtttcatctataaagtggaggtaacaaactctactttatagggtggtggtgagggataaatttttccatggggaaaatgaagtgttttacacacacacgatatacacaaatcatatatttataattgagtactgtacctggcatgtgctagtacccccaaaattgtagtgaagaaggttggagctgggggtcacagagactggtgcagctcagcacctttaattggaggcttgaaaaaacttgagtaaaaagtttgaaataactgaaaattattaggaaagagaacatgtcacatacagggaattctgtttaacaattaatattttatctgagcctattgtgcactgtaatttttatgaacttactattttgttttatacgttggccgctccctctcattcacctaagctagaaaggtttgcttggctaaatgcacaacatggtcacgctgttactcaaaaataatctgtaggaagaggtgagtgtaaggtgctataagctatagcagtgggcaagtgggacgttgcccacattcccaggatagctgtctttaaggtggactggtggatttcattcagcctcagtctgataactttgatgtatggtgcaggtctctcacaaaaccagtgacatacaaaacaacccacataaaatgatgaggtcctactgattagatttagaagtcctgcgttcttaaaaaacaaagcagaataaaaacaaaaagaggtgatagttttgctttcctcgttctatagatcacactggagttctgtgtctcacttccagtgccagactctgagagggacagtgtacatcacctgagtgatgcctgaggagatccaccagtgaagggccctggagccaggaccccaggggaatggctaaaggcctgggctttttggtctagaaaataggagaggtagagacagggcataatagttgtctttgagtctctgaagactagcctcagggaagaaaggctt

SEQ ID NO: 96935 - DNA, 16564 bp, Homo sapiens
ttccctacctcccacaaagcctcacttcctaaaccaaagtgaccttctgaaatctggccagtctgcctcagctcttggccccatgtccctcctatgcaacagcttctacacaccattagtttccttccaaagtccccactgacttctcattcacagcaatgctcttcctgttttcgaaacaagggtattggcccatgtgcctggtaaacagaaactagagtgcatagggctgtgagaagttctaaggcatttgtgtattgcaccggagactgaaagaagggtgaggttttgggggctctgatgtgcaaggtaaggcactcagtgttcagaacaatcctcatggatctgtcatgctcaaaggaacagtgttgaaagagtgattatggtttaagataatttggctgtcaaccaaataacatgttgttgcttactgctatgtcagacacttctgctgattggtgaattttttttttaatttatttttatttttttatttttcgagatggagtctctcttagtcgcccaggctagagtgcagtagtgcgatcttggctcactgcaagctccgcctcccgggttcaagccattctcctgcctcagcctgctgagtagctgggactacaggtgcccaccaccacgcccggctaatgttttttgtatttttagtagagatggggtttcaccatgttagccagggtggtctctatctcctgacctcgtgatctgcccatctcggcctcccaaagtgctgggattacaggcatgagccaccgcacccggcctgatgggtgaatttttaagaggaagaataataagcaaatagactagtttaaaagcaaggtatcatttccttggtggatctcttgagaaggagatggaaacagtgatgggggactttggcttggcctccactgagtcccagaacttttctctctagaggtgtgaaccatacccctccagcgtatccattttcccatcagtttcatactgtctgtgaactttggtgaatcatcagtctctctcttctgcagtgttgccacctttaaatggccccttactctcataatcagtgctgagtagtggcaagggggagaaaatggaaaagttggcatgggagagaaggcagatccagaagataggatacagctcaggtaaagggccaaaaggtctcctgaaatgactcttcaaggcaacttcttagtgtttgactgcctctttcttacattctttttattttgccccagccctgagaatgtggcctgattttctcttctgttattacaactgctcttctgcttgagtttcttctacaccttcaagatggctgaagaacaagacgctttctctccatgtctatgctgtttcactgtgagtaaagcaagtgtacatctgctttcatttctttttttcaaaaatgttattactactagtgagtgtggggaaagagggcatactgcaacataaataggagggaaactgcaagtaataaaaattgtttaaaattacaagtaattggttttagtgattcttggtcatttttgaggcacagaaggggaataatgcttatatagcagtgatccatgtggtttagaactgaagcagaaagaagacattcatgcaaccaacaatcatatgaaaaaagctcaacatcactgatgattagagaaatgcaaatcaaaaccacaatgagatacgatctaacaccagtcagaatggctattgttaaaagtcaaaaataacagatactggcaaggttgtggagaaaaaggaatgcttatacactgttggtgggagtgtaaattagttcagccattgcggaagacaatatggtgattcctcaaagacctgaagacagaaacgccattcagtccagcaatcccattactggatatatacccaagggactataaatcattctatcataaagacacatgcacacatatgttctttgcagtactattcacaatagcaaagacatggaatcaacctaaatgcccatcaataataggctggataaagaaaatgtggtacatatacaccatggaatactatggagccataagaaagaacaagatcatgtcctttgcacggatatgggtggagctggaggccattatcatcaaactaacacaggaacagaaaacatatttactgcatgttcccatttatagtgggagctaaatgatcaaaacacatggacacaaagaagggaccaacagacactgggtcctattggagggtagagggtgggaggagggagaggatcaggaaaaataatcaatgggtactaggctaaatacctgggtgatgaaataatctgtacaacaaacccccacgacacaagtttacctatataacgaacctgcacatgtacctctgaacttaaaagtttaaagagtgggcacatacccctgatatagatatagcttaatatataatctccatatatatatgactacactcatagcacatattacaaagcacataaaaagtaaagatcaaatattttcagaaaaaaagaaagtatgcacaacaatgacaaccttcataacttcataataacacatgataacttagcatcttttgcttacagtattatgctgattttgtgttattactgtaaagtacactggtggcttatatttgcagactagaactgtctcaagatgctatgatgctcaattgtgttaaccagtttataatcaattaacctaagcttgatgatggcaactgaatttccaggtatacaaataaatttgagggtgaagcatagttcctaaaaacgatgctgatctctgtttttatctgcggcattgtatgttatttgacaatgcgagggaacaccctatcttttcaacctaatttttcttataattaaaattaccattttaagcattggtaatttcttaccagcgagtaaagttttaattattcataataaaattttatgatgggcaaaaagaggaactgaagcagagtcacagtttaaaaaattataattatttagtaatgtatatttaataataaacataaacatacaaaataacctcaacttcaccagtatttctctctcttttgccttttaaatttgtttgtttttatttgtacagatttaggaggtatttcaggtacagttttattacacagatagactgtgtggtgttcattagtatttcttagtcattttgaaggagaaatatggttccctgtgatacttcatatttccatattgattttttttccttttctcgtctccttcccacagatgctgcaaatattcccagccttttccccttgatgcccaaaataaattcctcaaataccctgagcccaggaactattcttaatttcacataaattttatgtaaagggactgagtccttccatccccctgccacttcctggattttgctcttccatacctaatttctcaccaaaaacataccaccaccaccatcacaacaacaacactgctgtggaatgacaggagcctcctcaaagggcactggaggggaaggaactgtctgacaaactataaggcaatggttctagtgtactttattggcatggaggaggaaaaagtatagagaaacttatttactcatgtgttgatgtgatcacaagaatgaggcctgacctgtcataatccccagtctaatttctgcctccatttttgtctaaaacagagaagcccaactgtctgatgggcagttccgattgagagtactcttcctccatcacctgattcttaacattatcctggggctttaccatctacctgttcctgggacccaactcctagtgcagacctttcagctgggggtcctgggtcttccacagatttttggaattgtaacagcaatgataataacaatattggtgatggtgattatagataaccttcacagggcactctctgtgccaggtactatgataaatacttaacattgattgtctcttctgattttcaaagttctaagagaatttttttagttatctactgctatctaaaaaatggccacaaaacttagcatatttttaaaatatactttttttaaacttttgacctcttttatttgttaaaatagtgacatccataaacatgaaatgatttgatcataatgcattcattgattatggctcttgccatcttgtggcatccaggaccctggctgaaacgttttatctcacagtttctgtgggtcaggaatccgagtatgacttacctgggtcctctacttcagggtcactgagtcaaggtgatgcttgggagcagagtcatctcaaggctcagtgggatgaggatttgattgcaagctcacgtggtcattgacaggatgcagttcctcatgggctgacggactaagggcctcagttcttcagtgactgttggccagaacctgccctcaattccttgcctcatgggcctctccaatatggcagcttccttcttcaaagggcgtaagccaagagggcaatagagagagtctgctagaaagatgaaaaccacaatcttgtgtagcctccacggaagtaacttccgatcaccgttaccatattctattgattagaatgaagtcactaggtccagcctacactcaggggagaggattacttacacaaggacatgaatatcaggaggtgggatccttagggatcatcttagaaatattccatctcacagtttggggaaggagggaataagagctgttttaagattacaaagacaatatcaagactagaagatcaaggtagttcaaggtcgaaattgaagctaagaaaggtaaaggctaagggttggaatggagaagtgccttatatagtttttgatccatagtgtgtacctctctaatatccgtgtctcccagccctaacatgaaggtagagctaaggagatggtgagtgtgagactaaaggttatatgagggattattagggcacgccacaaaaaactgctgctctcattgggaaagtaaatggaaaataatggtaatggagtagtggagtggaacagcagcaaagaggaactgaagataagctatcctgagtaaaagcaacccagggttcctatgggaaggagacttttggcagagacatgccacattatcaaataaaaaagggcagagccagggcataaagcacgtctgaaataagctatccacaatcaaagacagtcaagctaaagaaaacaaattccagccaggaaacagaaggctggttccggaaagattttttgaggcaatgctacatagagcagaggtgtggaggagaggacagggaacatttttagcagcatcctctaaaacgaattctatttcatatgtactttatgaaagggggaaagattgcaggaattacaggcccaaaatccccccaaattcccgaggctctgtctattatagtccttttctccagcactctccttcccctcccactcaggctctttcgatcttgtcaacagagcaggaaccacgaagttcacactctgaacttctgtcttggaattatgccagtatcatagtgtgggggcaataagtggggattcattgagggaggcaagacaaacatgttaacagccttgaagaaatgcctttttagtacagaaaaagggagaaggaatcaggaagggatttcttaccaaacctcaaagaagatcgttctttaaagagtgctaacttctccagcttttagtggggaattgccctccatggggattaagagaccagcgccttttaatcaaaggagggctgtacgttcaaataactgggaacagctgagtgtcccacccaactctgaagaacaaaacagctacacgaagccactcctgcctgcagtatacaatgctatgttttttggctaattctccaaggatattacacttactttcaatggttaatgaatagcttctaagtgcctgtttcatttagttgtccaaaggccagtgggtcccagagcatataaagctgcaagctggctaatgagctcattctcttggagcaagcagggaagcagaggagcagcagggtcagggtgctgggttcctaaggtgcaaggatgcagaacagaactggcctcattctctgtgctcttgccctcctgatgggtttcctgatggtctgcctgggggccttcttcatttcctggggctccatattcgactgtcaggggagcctgattgcggcctatttgcttctgcctctggggtttgtgatccttctgagtggaattttctggagcaactatcgccaggtgactgaaagcaaaggagtgttgaggcacatgctccgacaacaccttgctcatggggccctgcccgtggccacagtagacaggtacgtgctgacaggcagagggaccaagaagggctgagatgggctgagttgtgtaagatctgagtaatttctgatcctactatggagcgacttacatgtcccatgggctgtctgtctagaaccaaagctttattgtcagggaattactctggggttgttattaggaagagtggcgccatctttggggaaaaccatgacgcaggggcaactcatctcagagaaaccctaccaccacccccagtgaaaacccacctaagccaatttagaaacccaggctcttttgttatatcatggcagctgtcattaattagtggcaggtgatggttagttacttcccataacctggctatgaggttctaaggaaagcaagtcccagaccaaattctgccacacaacaaatgaagaagcaggcataaaatgagtcctggaatctctgtgagctcagaraagtcccagtttactgtccttttaggtgttgtgatctcaccttgcataaaacattccttcaggggaaggtgataatattctagaggcaagattcattctttctcgccatctcatacattaggatagttatcatcaaaaaacaaaaccaaacagctagtgttggtgaggatgtcaataaattggaacgctgtgcattgctggtgggaatgttaaaatggtgcaaccactgtggaaaacagtgtggagactcctctatacattaaatattgaattactgtttgatctggcaattctacattctgagtttatacacaaaggaactgaaagcagggattcaaatggatgtttgtacaccaatgcttgtagcaacatttattcataatagcccaaatgtccatsaacaggtgagtagataaacaaaatgtggtatatacatgcaatggaatattagccttaaaaaggaaggaaatcctggcacatgccaccacttggatgaagttgaaaacattatgctaagtgaaacaagtcagttacaaagggcaaatattgtataattccacttacatgagtacttagcgtagtcaaattcacagacacagaaagtagaacagtggtcccaggggctggtggaaggagagactggggacctattgtttaatgagtagagagttttaaggtgatggttgtagagcaatatgagtgtatttagtgccactgagctatacacttaaaaacagtaaattttatgtcatatatattttaccacaagaaaaaaaagattcagttaatcttatagtcagtatcaggcaacaagaaacctcctaattcttggctagccacaggaccatttagggataacaccctaggcatcattctcaagatacaggctacaagactataattattttgccctcttcgtgcaagagtagaaagtatctaaaatattttagctactccatgtatcttgaatataagtaatcttacccatgagcatccacttttggcatcctttatgctaattaataagataataattatgaaaaccaaaacttatttccaatgttatactaaccagcagagtttctgggtttgattaaaaattaagagaaatgaagtgattgtagaagatgcctctagagtgatgatttctttttgtataaatgttagaggactacctctagagtgtgaatttctgataaatgtaactgattgcctttaggatatagcttaaattgactaacactgcataatattacagtatactgaaatgtttgaaagtaaattatggacatcgtaacacccccattttactgcctcttctcgctgcatgtaataagatgcttatcccacgcagaatggctggcaagtcagcctgggaagtcacatttctccaaagcatttgcactcaaaatggatacccaggttgagatatcaaagcaaatgggtctccgatgatggaattcaggggactgggaatatggatggcagttgaaggagggtggggttgggagaggtagctgggatttggggcaggcagcagtcatcctggaacctttcacatcactccagggaacatctcacctttctgtgtaaaatgcctttacacatgtgccccgtgactcagccttggctattctgagcgaaggctgagatttatgccttatagtagacagcttcttcagctactggctttgggcctggtaacatttggaatggagttgtggctacaaatggcagtccctgttctgttgtggttacacaccataaacactccctgtaggcactggaaggatcactctataaatacacaactcagccaagctcaccggtctctcttcctcccctctccccttcccccaaattcattcatgatggagaagccaggaggatttagcaattagaaatgccaggcaagatgaccaatgagtacatcagccccygaaygaatggctgctttagcctactggcatagaaagggctacaactgaaatctgtgtaaagttgtcagttgatatcatttgagaaatgaatatgtttgtatattttctttgaaactagctactgagtctcgaaagggtgttaggatagagacatggcatctggtatagttcagggatcagcacagagttggttttcattcattattttgttggctgtgatgatcagagaaagtgagtgcaattgaggggatgatgccatgcgagaaagggagcaaggatgtggatggactaagtactcggtagagagaagttccctatccaaagcccccacctcctctaatgttgacaaggatctcacactgaatggccctgttttcatgagtgaatgagcaatagagaaggaatagcttggcataacccactgggaaaaaaatgtgactagaggcaggcatcctgtggctgataaaaaggttcttttggaagagcagcacatttttaaaaaactggtgatgccaggaagaagtacatctgtttcaaaaatccatgtttcttaacagtttagcttcgcacaatttgagctgagagaggcagccgtctgcctctttggcattaatgcctaaataacgcacgcatgtttatgctgttttgtcccctaggccagacttttaccctccagcttatgaagagagccttgaggtggaaaagcagagctgtcctgcagagagagaggcctctggcattcctccacctctatatacagagacgggcctggaattccaggatggaaatgactcccacccagaggccccaccatcttatagagagtccatagccggcctggtggtgacagcaatctcagaggacgcccagaggcgaggccaagagtgctgaggcagagaaagctctccagcactcatgatgccaccactgtggggagcagctactgataataaaggcaaacgagggactgtgggaggaaaagccacaccagggaccccacaagagagcttggggaggggatgacagccctgaattccagacataactggccatgccagggcagggcaggccaggggccctggaagggtgtggccaacaccaagcagacatttcagagsattcacactaatcttaaccccggctggccttgggtccccaaaggtgtcactctgagagctctgcttacagagattctttctgctgtcactcaatttccctcccatcacctcaactccagccagggaggaatagatgctggttgtcaggacagccacatgccttcctgttctatatcacctagtaatctcaaagcgaaggtttgttgtttaatttattgattgttcagccttttgttttgttagcttgtttcctagttacctccagctgaccatactaccagagtgaggcagtacttcacatcctgggagatatgccctcggaacccatgaatgttattttgtattattttattttcatgatatgtattttttctatgtaaaaggaaaatgactgtaatatttgccttcaagatggttcaaacacaaaatattaaatgagctgtttcttaaaagaggtccttaaacaaatagacatgataagaatgcttatagacccaaatggaatagacagaatacttaattcataatacatggaattccggggtgtagggtggaatttgtactggccacagatggtattaatataccacttgatataaatcttataaaggttaaaaatatttgtatgtaattcaaagaatccccatataaatctctagaatttgaaagataagaaactctaatgatgtacgttcatcattaacaggaaatttmttgtgtctcaagatacagatcttgacttttagacttaggacattcatttttaaatccgatggtttctcctcaactttattatattttattgtttttttaaatacaagaggacaagtctggttgcagggtggtagacagagatgcagcctgatgcttttgaacttgggccaagaatcttcatctctccgggcctcagttttctcctctattaagtgaggcattcatgctggcttcacagttgtggaatgcctgttatatggcaggctctgtgccatgagctttccatgcgtgttagccctcattccatctttaagagacaggcattatgattattcccattttacatatgcataaaactgacattgtgagaagttaagaaacttttccaataacacaatgacttctaggagggtgaagaacggttcctagaggaacatgggaggactgactgacttcacacttttgagctaggtagccctgtctaacttctctccttctaggagacagtttggatttctctctcccttcagaaaatgggctgtaacagaaaatggagccccagggttgctgcaatatcttaaagcccttggagaagtggcagagattgctttagggttaatcggcttcttttaaaatacgtaaaatgtcctccaggttttctgcctagaaactggtcccttgcctcatagcagagtttccccctgatcattatattgatgatgaagaatgattcccaatggagatagcccttggtgaatgggcacaggaagggctttagacagttggtgagaaggatgtacatctttcaaagaggaagagggtggtccagatgggatggagcctcctctgtggcctcatcttctccatcattgctgaatgcatagattaagtatatcctgaaaaatgcataagaagcttcataaaaggaaatccttgtccatgaagcatgaatttgggaatctgttatttgaatccttggcattgagggcataaagatatgaaggtcactcatggttgtccaatagggaagtgatcatttattagtaatgtaatttattattcctcttgtcatctctttctatctctctactaagacagttatcctgaaattctccctggtggtctgagcacatttactgacttgaacaaggaccatcattggtcttttgtccagaatttgcatttgtaatagatagtttttccaactactggtagtcaagtgaaacaaatgttgattttggtttacataagaaatagttttaatctctttaccgcaataaattttgtacttaaatttctcttttgccattttttttttgcatcagaaaaaaaaatcaataaaagaccataagtcaaagtattattctctggttaaactaacacagtgtcagaatgagttgatctttctgcaaacccaaacattattgaactctaactgctgatttggaaaataacttgggtgtgtctttttgaaaataaaataccagtagttatttgttcatttttttaacatttcatgtaaggcagaaataatatcttggcaatgtgaatcagagcagtttccagcgactgcatatgtactctgaatcatgtgtcgagaacaagggtaggacacaaagcaaattctacattcgagagacccagcaattaaaatccactggacaaatcagacaaaaatatccgattgtggttcataataataatatagtagtcatcccctagaggattcactcaagataaatagatactgcctctgctcttccttctgaagcttataaaatttacggtcaaggattggaaacagcaattccatgaatgacagggagagcacatgcagcataagaaagtgaaaagagaaaaatccccactacaaagagtctttgctcattctcttctctcacctgtggatggtaggttcatatgtcaatggggaagggaagttctcagggttgaaggccctccagtattgtaatctcataatgtccctttgagcagaaagtttgagtaggccttaccaccactccagaaggtgaggataaggtcagttatcctcaattatagattaagttatactgtgtcttttgcatatctgagatgtactgtgttcattttcgaccctccatgcaaaatcttaccagtgcttttactgacactcctgtctatcatttaagattctatttaaatatactgtctttggtgaggcattgctctagctcacctacattgtagggcacatattaggtgcagataggcatggaaagatgataaagacatggacttataatctatatcttctccaaattctacaaggttccatgacaacctaggctgactcacataccaagtgggctgtcagctgcatgagctatttcttctagtaaggactccagctggttggagtggaacaggcattctgctaagctctgctgcttcggataatctcttgctgtttgtaactgtcaaagggccaaaggctgatttactggcagttacgttatttccaaaggcacaccgtttctcagacccttctacactcagggatgggaagctccttaagacatgtgtctgggatttcagtgtccacatgttttgagagtatccagtgcatgatccagcaatggaatggagtcacacagttatgtcattaccagctcctgcaggtgcttttcaaattccctacacccatctgaacgtcaaagtaaatcccatgccttacactgatccatgagaccgtgcatcaagcttcgacttcctgtgcagaaagcctgcatgccacgtgcaagcccttccacctataacgtcatgcaacacgatttgtcccgcaaatactgcggatgtatgctgcacttagatcagtaaaagttgacaaacgatctcattttaataatgactgcctatccattttcaaggacattgaataaactcaagattcctgggtgacacaaaacaaatttttgttctgggggactggctgacacctggaaggatatttagcgtgtttggtttcctactactgccactaaatgcctctctggcaaatacacacacatttccaaatacccgccctggttgaaaaccagcatgtgatgtatagtgttgcttgccatttttctgcagacacgtgctgtaatgagtgaacccctctgtaacagcagatcaccagagttgccctggaagttgccacactctatccatagtttcctctgattgactcttgcagttcccatgaaatttggggcctttaaagtcatttcctgttttttttttttttttttttttttgagacggagtctcacattgtcaccttggctggagtgcaatggcatgatctcggctcactgccgtctcccgagttcacgcaattctcctgcctcagcctcctgagtagctgggattacaggcacacaccaccacactcagttaattttttgtatttttagtagagacagagtttcactatgttggccagactggtctcaaactcctgacctcgtgatccgcctgcctcggcctcccaaagtgatgggattacaggcacgagccactgcgcccggtcaagtcatttactctcaaagatcagtggctacagtggctacagctcttttttttttttttttttttttttaatagagtcttgctgttgcccatgctggagtgcacactgctccattttggctcacggcaacctccacctcctaagttcaagctatttgcctgcctcagcctcctgggtagctgggattacaagcatgcaccaccacgtctggctaatttttgtatttttggtagagacaatgtttcactatgttggccaggctggtctcaaactcctgacctcaagtgatccacccacctgggccttccaaattgctgggataacaggtgtaagccactacgcccagcctagagcttcatctttaagaacataaagaacatcatatggggaacagtgacttcctgcctctctcctctcccgagaattaggcaagaggatgtacacatatagttcggcaagagaagtttggatttcaagtaaggcagaaataatatcttggcaatgtgaatcagagcaggttccagagaatgactgtgtcctagacccaccaaaagaccttcccttgacaacatagctgaaaaaactctgtcaaaataggcagctatgtagctgcttcttccggtggctgggcccaaggctttgctctgcctgacattcacaaccctgtgcctgcttcaaccccatgcatccaagccaactcctcaggagaccccaagcaagtctcctctccagccatcctaaccctcatctcctagtctgtcttctgacttcactcatccttgatgaaattctgtaaatgcttacaaatcccaagcaactctactcttgtggaaaccactctcgtgccaccgtctctgagtctattgcccctctctgtgtagtcccacagcacattatttgtgtctctcataacatttttgtctaactgattatttgtgtatgtttgtcatagcctcctactcccaaattataaacttataagatcaggaataatgttttatccatttctttgccccatctaaaacagaactctgcctagaggagttgctcaaccaatgtccacagaatgaatgaatgaacacatagatggatgaatggatggactgatggctaaatatatatttgggctactgtccacgcatgactccatatcaaaataaagaaatataatttttatgtaaggactaatttacatatgaacttacaagttagagatcattaaaagttcagcaacttgagaaaataaatattttcttacctagagctgatacacctaagaatacatctgagcgtcccaaccaagacatccgtgattaatgaacacatggatggctagcatagatgtccactcttgagacaagaacctgagaaccaaagctatgacatgaatttgattccactggtgatcaatcttgaaatggttttgttttagaatctcagctcaaagccaccttcctattattttgaaatgaagacagttacagtggaggtctagatgccatttcagtttctgctgactcccaaaggcagttttgagtaacttaccttttctgttccatttaatacatgtctcttgccataatagtgaaaaacagcccttgcaggttttctgaaaggcagatttatcaggataggtgaccagtactggagtttctcaactggtgagacaaacaaataagtaaaaacccacaatccttggataaggttgaaattaggaatttcttttttattggccactaaagtcctagcaagtttctgacagaagcacagacagaaaatggaaacaaataccttactgggaatgtttccttgcttgcactaaccttgactacagcaataacgcattgcttaacagtcaaagtgcaccaggtcatttccgcaaatggcagggtgagtgactgtgccgttcccaaggaagcaaaacagacacaaacaggtcccacgcgctgggtgtcctggctgagtacagaggaggctgctagaccggcagtacccttttcccaagtgaggaaagccagctgtgacactctgcttgccggcaggggtccccaccctcccctccaccatctggcccatagctgtaccaccaattacattttcttccagcttccacttcatttcctacttttacagcatttcatcctctccttttgcagcctttacaaataagatcagaaatgtgtccaaacaagtgcattaagataggcccctattggccaagtcaaagagctctcacacatggtggtctttttgccttctcaagaggaacttgtataaacccatgtaccaacatacttgatgtaatcaaggaaggatcccctccaaattttaagcatttaattgcagagtcttgtcaagaaacttcttcccaactttacaactgaatggctgaatttgaaagaaggtatccagcttaatagctaaaataatactatttacaaaataagagaggaaaac

SEQ ID NO: 96936 - DNA, 17972 bp, Homo sapiens
gcagtggcacaattatagctcactgcagccttgacttcctaggctcaagcaatcctcccacctcagcctcccgagtagctgggactataggcgtgcacaactgtatccaacttcacatacactttcgaaaagctttttagggtagaagttccgctttcttagctcatcttcatagaatttgaatctaaaaaaaaaacaactgaaaaacatttgtctttaccatattattataataaaaatgacactttgtgaaacagcagctgtatttttaaagtactatcagctgatacacttttattttatgttattttattttattttattttattttagagaccgagtttcacccttgttgcccaagctggagtgcaatggtgtaatctcggctcactgcaacctctgcctcctgggttcaagtgattctcctgcctcagcctccacagtagctgggattacaggtgcctgccagtactcctggctaactttttgtatttttagtagagatacggtttcaccatgttggccaggttggtctcaaactcctgacctcaggtgatccacccacctcagcctacctaagtgctgggattacaggcgtgagccatggcacccagccagtactgttcttttgacacctggcttttcatagtataattctctgttcctgaattgtatttttttttttttttttttttgagacagagtctcactctgttgcccaggctggagtgcagtgacatgatctcagttcactgcagcccccacctcttgggttaaagtgattctcctgcctcagcctcccaagtagctggaaccgcaggcatgcaccgccacacttggctaatttttgtatttgtagtagagacagggttttaccattttgaccaggctggactcgaactcctggcctcaagtaatccgcctgccttggcctcccaaagtgctgggattacaggcatgagccaccgcatgcagccttgttcctaaattctgtcttctgtctcttgtctgtttcaacatttcagagtacttatttcatgactctttcagattacattactatttcaagtcccccctgttcattctaccagtggattctctctggatagtagaattcgttgtgtattttataagtcttttttgatgaaagctcatttctgactatagttatttcccaagggtttcatgtggcttgggctgggaaagcttctctttgaagtgacttccaagttgcctccaccctgactacaggattcattggcttggaagcagagtttttaggttaatttctcaatgcagctcgctgctttcaggtcgtttggatggtatgagcttagactctatactgttaggagttcagaggttaggttctgaaggttaactggtgcattgacctttagtagttgtattgatatgtggttcaatttggggctgccattttatcatttgatttctgttcgttgtctttgtcttttgtttgttcctcctttcttactttctttttagaattccagtttcagctgggcacggtggctgacacctataatctcaacactttgggaggctgaggcgggcagatcacctgaggtcaggagttcgagatcagcctggccaatatagtgaagcccagtctctactaaaaataccaaaaattagccgggcatagtggcgggcactattaatgccagctactccggaggctgggacaggagaatcacttgaacccaggaggcggaggttgcagtgagccgagatcgtgccattgcactccagcctgggcgacagaccaagactccgtctcaaaaaaaaaaaaaaaaaaaaaaggggccaggcgcagtggctcacgcctgtaatcccagcactttgggaggccgaggcgggtggatcacgaggtcaggagatcaagaccatcctggctaacagggtgaaaccctgtctctactaaaaatacaaaaaattagccaggcgtggtggcgggcgcctgtagtcccagctactcgggaggctgaagcaggagaatggcgtgaacccgggaggcagagcagagctggcagtgagccgagatcacaccactgcactccagtctgggcgacagagcaagactccatctcaaaaaaaaaaaaaagaaaaaagaattccagtttcatttatctattttcttttttactttgcctctgcattctttttttagtggttactctacagattgcggtataaatccttaagatagagttaatcttgccaggcacagtggcttatacttgtgatccttgtaatcctagcactttgggaggtcgaggcagggtcgaggcagggtcgaggcttaagcaagcccaggagtttgagaccagcctgggcaacatagcaagacccccatctgtacaaaaaaaaataaaaaactagctgggcgtggtggcgagcaccctattcctagctacttgggaggctgaggcaggtgaggcaggaggattgcttgagcccaggagttcgaggctgcaatgagccatgatcctaccactgcactccagcctgggcaacagagcaagaccctgtctcaagaaaaaaaaaaaagacagttaatcttgtaccatttcccattaaatgtaaaaactttgcaaccacacagaagcatttctttcccccttcctctccctcatcctttaaggcagggtttctcaacctcggcactgctgccattctgtgtgggggggctatccaagcactgcaggatgttgggtagcccacccaccagacgccagtgacatagctcctcctcaggtgacagaaaatgtctccagatattaccagatgtcccctgggggcagaagcaccacaggtgtgagaactctcactctgaggtataggtgtcctgggtgtttcatctgcccttgttttattttttattcatttatttatttatttgagacagttttgctctttttttgtttttgagacagagtctcgctctgtcacccagactggagtgcagtggtgtgatctcagctcactgcaacctccgcctcccaggttcaagctattctcctgcctcaacctcctgagtagctgggattacaggcacctgccaccatgcccggctaattttttgtattttttttttttaaagaaggggtttcacgacggtcaccaggctggtcttgatctcctgacctcgtgattcacccaccttggcctcctaaagtgctgggattacaggcatgagccactgcgcctggccctaatttttgtatttttagtagagatgaggtttcacctttttggcctggctggtctcgaactcctgacttcaggtgatccacccacctcggccttacaggcatgagccgcagtgcccggccaatgctgaatgttttatatcccatagtgtatttcattctcacaagatcccccgggtactgttccttctcccagagcaagaagcacagtggctgaggtccagagaaacggaggtgcttcatgcaaggtcaacacaggattcctaaccggacagcctgggctccagcactgcctgctggccacatccaccactgcctccaggaatcaggtctaggtcttgaaggcagctctggggccagagactgagccatctcttttttttccaggtgtacaaaagagccaaggcgctggaccagtctgacaacgatatgtccgccgtgtaccgagcctacatacactaagctgtcgacaccccgccctcacccctccaatcccccctctgaccccctcttcctcacatggggtcgggggcctgggagttcattctggaccagcccacctatctccatttccttttatacagactttgagacttgccatcagcacagcacacagcagcacccttcccctgaggccggtggggaggggacaagtgtcagcaggattggcgtgtgggaaagctcttgagctgggcactggccccccggacgaggtggctgtgtgttcacacacacacacacacacacacacacacacacacacacaggctctcgccccaggatagaagctgcccagaaactgctgcctggctttttttcttccgagcttgtcttatctcaaaccccttccagtcaaggaactagaatcagcaacgagagttggaagccttcccacagcttcccccagagcgaagaggctgtagtcatgtccccatcccccactggattccctacaaggagaggccttgggcccagatgagccagtacagactccagacagaggggcccttggggccctccaacctcaggtgatgagctgagaaagatgttcacgtctaagcgtccagtgtgcacccagcgctccatagacgcctttgtgaactgaaaagagactggcagagtcccgagaagatggggccctggctttccagggagtgcagcaagcagccggcctgcaggtgagcatggaggcccggccctcaccgcctcgaagccatgccccagatgccactgccacagcgggcgctcgctcctccctaggctgttttagtatttggatttgcattccatcccttgggagggagtcctcagggccactagtgatgagccaagaggagtgggggttgggggcgctcctttctgtttccgttaggccacagactcttcacctggctctgaagagccactcttacctcggtcccctcccagtggtcccaccttctccaccctgccctgccaagtcccctgcatgcccaccgctctccatcctccctcctctccctcttcctcccgtggagacagtatttctttctgtctgtccctttggcccagacccagcctgaccaacgatgagcatttcttaggctcagctcttgatacggaaacgagtgtcttcactccagccagcatcatggtcttcggtgcttcccgggcccggggtctgtcgggagggaagagaactgggcctgacctacctgaactgactggccctccgaggtgggtctgggacatcctagaggccctacatttgtccttggataggggaccggggggggcttggaatgttgcaaaaaaaaaagttacccaagggatgtcagttttttatccctctgcatgggttggattttccaaaatcataatttgcagaaggaaggccagcatttacgatgcaatatgtaattatatatagggtggccacactagggcggggtccttcccccctcacagctttggcccctttcagagattagaaactgggttagaggattgcagaagacgagtggggggagggcagggaagatgcctgtcgggtttttagcacagttcatttcactgggattttgaagcatttctgtctgaacacaaagcctgttctagtcctggcggaacacactgggggtgggggcgggggaagatgcggtaatgaaaccggttagtcaattttgtcttaatattgttgacaattctgtaaagttcctttttatgaatatttctgtttaagctatttcacctttcttttgaaatccttcccttttaaggagaaaatgtgacacttgtgaaaaagcttgtaagaaagcccctcccttttttctttaaacctttaaatgacaaatctaggtaattaaggttgtgaatttttatttttgctttgtttttaatgaacatttgtctttcagaataggattgtgtgataatgtttaaatggcaaaaacaaaacatgattttgtgcaattaacaaagctactgcaagaaaaataaaacacttcttggtaacacagctgtgccgcaggagtcctgcttccctcgtcctcggcgagatgggtgggaggagaaggcagcggcggggccggggtgggttttcgggacctccgcgtccggggtgagacggacttgggagtggcggcgaggtccgcggcagggttggaaccacgaccaatggagccaagcgggccaatagggaggaggagcggggacagactgtcctgccggccaatgagtgagcgcgagtggagcagagcgccctatcatatcctgggggcgccccgggagctccgcccccaagcgggcgccccaggctggtgccggccgcgtccctggccagccggagcaagcctgactcgtgcagccgccggccgcgtccctggccaggcggagcgagcctcactcccgcagccgccagtctggttccagggctcccgcaggtttcgggggccgaggcggaccgacaggcgccagccaatcgcgagcacggagccggcctgggggcggggtggtacccgctccgccaatcgggtgggggcggagccagacgccgggggcggacgggaggaccggaggaccgaggacagaaagattggtggacaggagcagcggccggtggggagggcgctcggcggcggcctgcggccatggccaccgtgatggcagcgacggcggcggagcgggcggtgctggtaaggcgcgcgggccagcgggcgggccggcggggcggcggggccgggcgcgaccgccgggtctgtcccgcaggaggaggagttccgctggctgctgcacgacgaggtgcacgctgtgttgaagcagctgcaggacatcctcaaggtaacgacccgcgccctgccccgccgggcgtggcggccctccctcctcatttccctggctccacctggggccgcgcggctgcgtcctgagcgcctacagtgtgcggctgccgcggctttcaggcagggccccgcctccgcgaactcgagccgacctcattatataagtacctgtgtgcgggcaggggcgggtcccgacgagggtgctagcaagggcctgagtcccgcccggcctcgggtcggggaaggccgccttgggagcagcggcatccaatctgggagccgaagaattctgcctctgcctggcagtgtgacttcagccaagtcactgaacctccctgggcctcccttttctcattggcaaaagggagataacagtacccgcttcgcgaggctggggtgtagataaatgagccaggcagctcacagaagtaaccggcgtagtgcttgctgtggcccaggaccgcgggttaccataactactgccttgttccctgactctgccccttgcccctttccccctcaaccaagctgggaggctgcccctgtctgttttgtattccccgaggcgggcacacaggaggtgttcagggaatgtggtataagcagagatcgggctcacggttaggtgccctgggggcttgggcagggtcttcccaccccagctgaacccaggtgaggccaggccacgttgttccttccccccgctgasttggagggaggggggcttctggaaggagcactgggccgggcctgagtgggcgctaccagctcccctccttccctctgttccacaggaggcctctctgcgcttcactctgccgggctccggcactgaggggcccgccaagcaaragaacttcatcctaggcagctgtgggtgagcctgggctaggcggaaaccggggaaatgggtaccttggggggtaggaggcatggccatagccctgtcctgcagaccagctggttgtgcgatgggacaggaggggcagcccgccgggagggagggctgggtggtgggggggtgaccacaggcaccgctctgacgccacatgttacagcacagaccaggtgaagggtgtgctgactctgcagggggatgccctcagccaggcggtgagtcccccggccctgtcccctcccatcctgccaatggggaagagcatgggagctcccactttctctctgtacaagccctgcgactctgggcgggacccttgatctctctggcctcagttttctcctttggaaaatgacagcaacmctcacaccttctcccgrgatcggtgtgcagattcagtaagaggtgcaggagaggggttctttgcacacggcctggcctggcgtccggaccagtgaaacatgggcattggtggattaggctggccacacatcacagttgaatcagccaatgcctgaactccagtctgcacccgactctgtgccaggcaccaaggcgtggggggaggcccccctcctgggctccatctgttgccctttgtagacactagatgcaccccgttcgcacagagcctcacagaggctgcctttcctcttccccttcccctttcttcacctctttccatttcacttctttgtggctcttcttgggcctggtttcctgtttcctgacctccctgttcaacccccaaacggccaaggcattgggagaccctctgccctatacagcggccaaggcctgaaccaccacacaccccatttctgccctgggcttaagggctcagagtggctgtggcaggaggtgcccccccactgcccagctcaccccactcttgcctgtcaggatgtgaacctgaagatgccccggaacaaccagctgctgcacttcgccttccgggaggacaagcagtggaagctgcagcaggtgaccccgcccctcctggctagtgctcagccacaaggacaggcggcagcaggcctgccgcggggcctccctggagagggactagccctggggatctgtggccacagcaagcctgggagggtgtttcctaacagcaaagctgggggcaggcgtttcctgaagccctggaggctgcgccatgtggggaggtagagaacctggcctgagagccccgagggccacatcgggactgtggagtccccacagcagctggctggatgagatggttcagaagccctctgaaaagtcactcccttgcccagagcctccagggacttgccatggctctggggatgaggcccatgctccctggcagctcctgtaccaatgggccccagcctcctcccctgccccctccaccccgactgtctccatctcagcacccttgcccctgccttgtcgccctgtttgcttccctccgcaactcgcacagactcttgtcttgggcattactgtgtgtccatcccttagaaaggagggggcagtcagcttgggcagagaccaggcctgccccaggtgatgccagatgcccatcacctggcgtggacctggccctctggggcacagggatgacagtgtggagagtggaatgacgtggggcaggcaggcagcacccactctcccctcctggccgcatggaagctggcgtgacccctctggatgacccctgcttccagatccaggatgccagaaaccatgtgagccaagccatttacctgcttaccagccgggaccagagctaccagttcaagacrggcgctgaggtcctcaaggtgagctgcccccgggcctgactcctgggcctagtcccacgttcttgatycggaatcacacctgggttccaatcccagggcctccacgttgagctgtgcaacctgtaagcacttacctgccgactctgtgtctccatttctacctgtggggtcaggggcaagctggagtgactgttcaccataataattcaggtcacggggcccccagtaagcackcggcacacaccactgccggtagcagcagtgaaagccttcacattaaccgcgtggcacatgtgaagagctgacctgggcacctgacctcatgcttgagttctgcccctgacttgctgtgtgtcctccggtggttcacctgccctctctggacctctgtttcctcacacttagaaccagatagactaagatcccttcgagaactgtaaccaccctagggtgctacaggccctatacccccagtcagctcttacgtgtttcctgggagccacatcaccctggtactcatggccacggctgaatggcacgaaagctggggctctgaggagtctgccagggctctgctccacggcaaagggaaggaatgggctccaggtggtcccaccatccatcagccgtgaccctggcttacccccctgaaaacctcaacccagtcatccatcgcctcttccaggaagccctctctggccctttacaaccaacctttgttgcctgtacccctgtccacaaagcctgtgcccctgggactgacctcccaggaccttccattccccattgatccagcacccaggatccccgtgcagtgaatcagccccatcccgactgacattagtgcagacatcctgccctcctccatacccagctggagcccaactacctgtctttaacaggtccctgctgccgggtttcgggacctgggaacagtagccactgggctgggtgggagtgggagctaccatgtctgttgttccttaatgcatggggacacgggaggacgcagagccaacccygcctctccctgcagctgatggacgcagtgatgctgcagctgaccagagcccgaaaccggctcaccacccccgccaccctcaccctccccgagatcgccgccagcggcctcacggtcagtgcccctgccagcccctgctgcaggagaggggtcccacagtgggtcccagcttgccctcaggatggacgcsgaggggtgccactcccagattataggtggaatattctgtctaggcaggtttctgggatggggtccttggcttccgtcctgtgcccytaaaatacgttaaccctgtttcgggttagtggttcccaaacctgacagcacaggagatacttggrgcacctgggaaaagtctggaagcccccattgatgagaagagcatctctggggtrgggactgggatcccctkcagactccatgagtgactgcagagccccgctccatccagcctgggctgggggcttgcgagggcctcatcccacctgcctcccrcagcggatgttcgcccctgccctgccgtccgacctgctggtcaacgtctacatcaacctcaacaagctctgcctcacggtgtaccagctgcatgccctgcagcccaactccaccaaggtgaggagggacccctgcccggcccactgcccgccatgcacacgccctgcaaggcctgacgggtctggtgctgttctccctagaacttccgcccagctgggggcgcggtgctgcatagccctggggccatgttgtaagtaggcaggggcggggggtccaggcacgcccaccccatccctccacacctggagggccgggaccctcctcagggaccctctcactkcccacagcgagtggggctctcagcgcctggaggtgagccacgtgcacaaagtggagtgcgtgatcccctggctcaacgacgccctggtctacttcaccgtctccctgcagctctgccagcagctcaaggacaaggtgggcccgggccgagcgccttcattaggggaaggacttctaagggtccttgccacrccctcagagcgccccarycttggggtctggtgtaccccacagcactgcgaggcagcaatgccctgtcctgacatattgtccttgggtgaccttgacatctcccctgggctaccccatcccccttcagcaacctrcagcaccctctccccttgcagatctccgtgttctccagctactggagctacagacccttctgatcacagcacccaggagcttgtctccaggaaggcggccccgtcccctactcatacccaccacagagcaccagccagtgccaacgccaggctgctatttatctccctatcccaccccctaccccacctaacacatttgcactgccrggaatggacactggaagtgccaggaggaaggaaggctggtttggtggggtagtggggaggtcagggaggcggggccaagggtgtcccacattcccaacaccgccctctgatcaccatgggaatctttggactcaggacagggccaggygcagggctctccctcctctccccttcgctgtcccctccccctggagggcatggtgtcggggggtggcactgagctatgagtcccgggratggtgaggaacgccacagacagagccaccctaggagtgagtatagtgctggtgactgtgtttcatagccccagtccagggctgtytaagaaataaagatcatcagactccacctggagcccctgtctgtctgtctgagtgggaacccaggcagggggtctctggtagtcagtggccatgagcttcaggagccagccgtctcccctattcccggagcctggcttccgcgttccctgtgccatgccagggcagggcacagaacctactgtcgagaggggaccctcgggctgccaagaagcccatggggtggcgacaagagctctacctgggactttgggccaccgagtctttttttttttttttgagacggagtctcgctctatcgcccaagctggagtgcagtggcgcgatctcggctcactgcaggctccgcctcccgggttcaagtgattctcctgcctcagcctcccgagtagctgggactacaggtgcccgccaccacgcccggctaattttttgtatttttagtagagacggggattcaccacgttaaccaggatgttctcgatctcctgacctcgtgatccgcccacctcggcctcccaaagtgctgggattataggtgtgagccaccgcgcccggcctgagaccagctcccctcccagctaggtgactgaggatgacctggcacagtcgtgctgactgaaggcttggagaggccaggtggccacctgagtggggcggcgagtcccgcgtcacccacccagacggggactggaagacactgcagactcaggctctgggcagacagaaggctttgttactgccaccgggcaggagacacagggtcagggttccagggccaagttatccactcccttgggtctttcctgcacgagaagcacagcgggaccaagcaggttcgctcgttgttccctagggggatgagcacccttcccgccactcccctcaccttccgcctccacccccagtacagttccgtgcaggtcccagaggccggcagggctcaccttccaggggctcaccttcctggggctttccctgcggggcccgggggagctgcagcagcagcagtgggcgacgaccagcagcagcaggagcagcacggtgcctggggacaggacaggcgtccaggtgtggccccaacctggagcccagggcagggggctgggaggacccagaggccacagccacacttacccatgaaggtgaggaaaacaatgaaggcaacagtgtcccatgtggactggaaaaactggtggctcttcagtctccccaggacttcctgaaccgtggcctccagctcctctgtggacacagccatcttggcgtgcaccgtgccacctgccccggtcccccagaggctgcatcaggatcctgggctcagctcagcggggaccacatccaggcttcccacagcccagccactgcccgctcctggcccagcgccagcttccccaccccctcccactccacttctccctcggccccaggcccagcttctctccttgcccagccctgtggtccttaccctgacaaccttctccccagccactgtcatctcccctctctctccccctggcagcccagcccccaggcccccacctacctcctagaagcctccaattcccccaaccaggcaggtcctggggagcacaggctgcttcctgcttccggctccacaccacctgaggccttggcaaccagccccgccctccccagggccagcagaggccgcccagcccaggggagagggcccaggcccagcaggtgcgctccctggctccccactgctggaggcccagggaggaagacgccggcctgtggcttcttcactcctgagacttcttacctttcctcagtatcccagatatgcagctgggaacacctgtgtgcttggccactgctgacttcgtgaatgaaagagagagagatgggagagaaggtgggtgggagggagggggaagggggagaaaacctacctgcatcccacgacccttgagcagctaggacaggtgtgcctgcatcatagagttgtccttggaatcctcaacgattggttccagcacctccgtgggtaccaaaatccacagatgctataaactccctgatataaaatgaggcagtatttgcatataacctgtgcatatactctatactttaaatcatctctggattacttataatacttaatatatttggcctggcctggtggctcacacctgtaatcccaccactttggaaggccaagttgggcagatcacttacttagatcaggagcttgagaccgtcctggccaacatggcgaaaccccacctctactaaaaatacaaaaattgggccgggcgcagtggctcacgcctgtaatcccagcactttgggaggcagaggcgggtcagctgaggccagaagtttgagaccagcctgactgaccaacgtggagaaaccatgtctctactaaaaatacaaaattagccaggcgtggtggcacattcctgtaatcccagctactagggaggctgaggcaggagaatcacttgaacccgggaggcagaggttgtggtgagccgagatcacgccattgcactccagcctgggcaacaagagcaaaactccatctcaaaaaaaaaaaaagataaaaatacaaaaattggtcgggtgtggtggctcatgcctgtaatcccagcactttgggaggccgaggcaggcggatcacaaggtcaggagatcaagaccatcctgggtaacacggtaaaaccccatctctactaaaaatacaaaaaattagccggccatggtggcacgcgcctatagtcccaactactcaggaggctgaggcaggagaattgcttgaaccctggaggcagagattgcagtgagccgagatctcgccactgcactccagcctgggtgacagagcaagactccatctcaaaaaataataataatacaaaaattaccccgctgtggtggcgggcacctgtaatcccagctacttgggaggctgaggcaggagaatcgcttgaacccaggaggcggagcctgtagtgagccaagatcatgtcaccgcacacccgcctgggtgacagagcaagactatctcaaaaaaaataaattggctgggtgcggtggcatactcctgtaatcccagctaatcgggaggccaaggcaggagaatcgcttgaacccaggaggcagaggctgcagtgagccaagatggcaccactgcactctagcgtgggtgacagagcaagactccatctcaagaaaaaattgtatacatatatttatttaatataatgtatgctaggtaaataattgttacattgtatagggaacagtaagcaaaaaagtctgtacatgtccaatagagatgtgatttgtttccaaatattttctgtctgtggttggctgaagccacagatgtggaacctgtggatacggaaggccagctgtactaggactcttcactgtccttattttctctattttactacttgaaaatatcagctaatgtggggctctgcatcgagcactgtgctgtgtcacctggtttattcctcatagcaatcctaaagtgggtattattgctttttccattttacagatgaggaaacggaggcctagagaagtttagccattagcccgtcacacacctaatgtatccatgtcccaatgctgccgtaacactaccacaaactctgtggcttcaaacaacacaaatgtattgccctatggttctgaaggtcagagtctaaaatgggtcgaccaggctgtgttcatcctgaaggttctagggcagagtccatcttttgccttgtccagcttctagagggtggtggcattcctgggcttgtggtctcccatccctccaccctctgcttccaggctcacgtctcctcctctgactctaatcctcctccctccctttttttttttttttttttttgagacagagtttcgctctttttgctgaggctagagtgcagtggcgccatctcggctcactgcaatctccgcctcccgggttcgagcgattctcctgcctcagcctcctgagtagctgggattacaggcacctgccaccacgcccagctaacttttgtattttagtagagactgggtttcaccatgttggccaggctggtctcaaactcctgacctcaggtgattcacccaccttggcctcccaaagtgctaggattacaggtgtgagccacgatgcttggccttttttttttttttttttttgagacggagtcttgctgtcacccaggctggcaggctggagtgcaatggcacgatgtcggctcactgcaacctccgcttcctgggttcaagagattctcctgcctcggcctcccgaatcactgggatttcaagcgtgcaccaccacacccagctgatttttgtgttttcagtagagacggggtttcaccatgttggtcaggctggtcttgaactcctgagctctagcaatccgcccccctcagcctcccaaagtgctgggattacaggcatgatccaccgcgcccagcagacatacttctatttaaaaagtgcaggggaggctaggcgcggtggctcatgcctgtaatcccagcactttgggaggccgaggggggcagatcacgaggtcaggagatcgagaccatcctggctaacacggtgaaaccccgtctctactaaaaatacaaaaaattagccgggcgtggtggcgggcacctgtagtcccagctactcgggaggctgaggcaggagaatggcatgaacccgggaggcggagcttgcagtgagccgagatcacgccactgcactccagcctgggcgacagagcgagactctgtctcaaaaaaaaagaaaagtgcaggggaacaactgtggcccctgctccagctcttggcctggctgggtgggcaggaggcccactgtcccctcctctcccctctggccctcagtcttcctgtctctctgggtaccttgtttctaatgtttgttgttactattatgaaagtcgtatctatctcttaaagaagatctggaaaccaccaagttgttaaaagacaaagtcaggccaggcgcggtggctcacaccagtaatccaagcactttgggaggccgaggtgggcagatcacctgaggttagaaattcgagaccatcctggccaacatggcgaaacccgtctctactaaaaatacaaaaattagccgggcgtggtggttggtgccagtaatcccagctactcgggaagctgaggcaggagaatcacttgaacccgggaggcagaggttgcagggagccaagatctcgccactgcactccagcctgggtgacagagtgagactgtgtctcagaaaacaaaaaagacaaaagtcacagagccccgcccagtcccaggcaggacagtaacaggaggaggaggctgtggcagggagtggttccggtgagtcagacttctggacccaggttcgattgcatgccataagacccaccaatgtgtgagcttgagtaacgttccctgagcccttctgcctcagtatactcatctgtaaaatgggtatgttaatagtatccacctcctcccagtgtcgtgaggatgaaatgaactgatcatcgatgtcagagccgtcgaagcatgatggaaggctcacagaaacgtgcactgaatgccctgtgctattatcgccgtgttgacgtgtgattccatccaggcttttgtcctcttccaccatagtcacgctgcatagatcgttttttccctggcttttgccagtcaacaccaccgggagcaccttccagatgacagcatgctttctgcaaactactcctttgacggcacttacatggtgcagtccctactggcacccagtgaggctcctcccctcaccgccacgattttcagaattagaccatcgctcacatgggaggattttcctggagaaagtgttttctctgcacagaggcgcatttccttaggggacatccccagaggtacgtctactgctcaaacgcagtccacacgtcaccatcaccagagccatttgttcatccactaaccacatcctcagctgcttatgggagaggcccccgtgctgaa

SEQ ID NO: 96937 - DNA, 26631 bp, Homo sapiens
gcaaagacagaaaagcataacctacagcagctagtttctcagaacagcatatttttccccttctgggtccacttgcctttttataaacacaaaaagtcttacagagcaggacaaatatgacactgaacacagacatttgaaaattttgctgagattgacaaattctcaagtatatggtagaggaatggagttttttaagttattttctaattactgggatacctgctattaccaagccaaccgaaggcctgactttccctctgccttcctacataaaaagaagagagtaaaggtttaatgtcttctaggtagaagttagatgaccacccaggccacacttcaccaagtttgctttttcatctgccgtcaaacactactatccacactcagctttgctcatttattccttcccttctccctcctgccctcctccagactgccacagagatagttcaaggtgacaatggctcctctgcagcagcacatagcagtcttgccagacacaacagcagatcaagtaactactgaagatgatggctacacttggacaggtgacattacattatcatcaacaaacatttatcaccctcttgagtactgtgactacaaagaaagataagatcttgctctgcacgtcaagtacctttcaatctagagagagagttaggtggaaaaataaaaagataacataaggtgtaccattctataaatattaattgtgcaatacagacaactgtgctaaagatagagctttatgtacccgactttccagaacaattctgatttcaaataccctgttccacccaattctttcagtacacctgtatgctcaatgacaggtgtttcgcataaaaattatgatcatcacagctacttatgaggccagccagtcaactagattaactaaaatcaggatggcattataatgccagattgttttatttttttctttttttttttttttttgagacggagtctcgctctgtctcccaggctggagcgcagtggcgcgatctctgcttactgcaagctccgcctcccgggttcccgccattctcctgcctcagcctcccgagtagccgggactacaggcgcccgccaccatgcccggctaattttttttgtattttttagtagagacggggtttcaccgtgttagccagcatggtctcgatctcctgacctcgtgatccgcccgcctccgcctcccaaagtgctgggattacaggtgcgagccaccgcgcccggaccagattgttttaatcacactagtaccttcttgcagcctcagcacagtgctttaatagtaggccctctatctcagacatgaaaacatgagcaaaagcaaaaatacgaggcctggccgggcgcggtggctcacgcctgtaatcccaatgctttgggaggccgaggtaggtggatcacctgacatcagaagtttgagaccagcctgactaacatggtgaaaccccgtctctactaaaaatacaaaaaattagccaggcgtggtggcagacgcctataatcccagcttctccagaggctgaggcaggagaatcgcttaaacctgggaggtggaagttgcagtgaaccaaggtcacaccactgcactccagcctgggtgacaagagtgaaactctgtctcaaaaaaaaaaaaaaaaaatagtaggcccttagccgggcacggtcgctccacctctaattctaattgggaggccaaagtgggtggaccacttgaggtcaggagtttgagaccagcctggccagcatggtgaaaccccgtctctactaaaaatacaaaaattaactgggtgtggtggcacacacctgtaatcccagctactagggaggctgaggaaggagaatcacttgaacccaggaggcagaggttgcagtgagccgagacggcgccactgcactccagccctggtgacagagcaagactctaaggaaaaaaaaaaaaaaaaggccgggtgctgtggctcacgcctgtaatactagcactttgggaggccaaggagggtggttcgcttgaggtcaggagctggagaccagcgtggccaacatggcgaaaccccatctctaccaaaagtacaaaaattagccaggcatggtggtgcatgcctgtagtcccagttacttggaaggctgaggcaggagaactgcttgaaccccagaggcagagattgcagtgagctcagatcagatcactgtactccagcctgggtgaaagagccagactctgtttcaaaaaaataaaaaataaaaaataaaaaagccgggcgcagcgactcatgcctataaccccagcactttgggaggccaaggtggacggatcacctgaggtcaggagtaggagaccagcccggccaacatagtgaaacctcatctctactaaaaatacaaaaattagccaggcatggtggcatacgcctgtaatcccagctactcaggagactgaggctggagaatcgcttgaacccaggaggcggaggttgcagtgagctgagattgtgccaccacactccagcctgggtgacagagcaagactgtctcaaaaaaaaaaaaaaaaaaaaaaaaaaaaatagaataagaaaaaggcaggctgggtacaagatactagtctgttatgccattcttccccacagcctttttaaagttactgagaactatgacagtaattaggcctataatactcctgggaaggaaacgaatctatctgtgaaacaaaaattaattttttccctaagctgagtgaagagaatatccactttgttggcttctgacatacacactgacagcacagttcaccagacaacaatcactcttctggcgtccctttccccaggtattctattcgcttactgctctatcttccctgccagtccactccctcctctttccagcctgtgccttagacaaggaccccaaacaaggatcacctgggaaactccaaaaaacagattcctagtcataatcccaattttaccaaaaaagaagcgtttggaaaccccttagatcgacaagcagcatccaaagacaccaaaaacttaggctcatcaagtattaacttcctgcctcagcctcccaagtagctgagattacaggtatgtgctagcatcctacttattgttcactctgatagaatttttttttctttgagatgaagttttgctcttgtcgcccaggctggagtgcaatggcatgatcttggctcactgaaacctctgcctcccaggttcaagcaattctccttgctcagcctcccgagtagctgggattacaggctactttttgcaaggctaatttttgtatttttagtagagacggggtttcacaatgttagccaggctggtctcgaactcctgacctcaggtgatccacccgccttggtctcccaaagtgctgggattacaggcgtgagccaccgcacccagtctaggtcaagtttttcatctctttcctttccaaggagttaaagctgaatttcaaattttacagtgaaatacacaattctaattttctttctttcttttttttttttttgagatgcagttttgctcctgttgcccaggctggaatgcagtggcacaatcttggctcatcgcaacctctgcctcccaggttcaagtgattctcctgcctcggcctcccaagtagctcggattacaggcacacaccaccatgcccagctaatttttgtattattattatttttttcttagtagagatggggtttttccatgttggtcaggctggtctctatctcccgacctcaggtgatccgcccatctcggcctcccaaagtgctgggatcacaagcatgagccactgcaccgggcccacaattctaattttcaaatatatcttcctcctggaggagtgatattccagttttgggtgcaatcctgatgtagagcccaactgtcctgtgaagagagtcagctgttaaaaggaaaccaaaaaatcaaggtagctctagctgtccaattttacaagttttcaacagacttgatgaggggtgagctaaaggcggtcaatgctttattgtctgtaactcactggcactggcatttctagagttgctcacgttcccccttttggtgactcacagcacttcaacatgttgccacagccaaggaaaaaaggaaatcaagtcagacaatggaggaatcacaggatttccctcttcacatccccaggtagatgaggtcattcaatgagtgtgtttccaaggctccacaaattcccacaccctcaccagtgtttaaacctgaatgttttatctgataactttttctaatttcaccaagtaagcttatatatgtcttaactgtgaactcctgataagcacaaattttgtcttgtgataatttatttttttctgagacagggtctcactctgtcacccaggctggagtgcagtgatgcgatctcagctcactgcaatctccacttcgtgggctcaagtgatcctccaacctcaaactccccagtagctgggattacagacacgcgccaccccgcccgtttaacttttttgtatttttagtagagacggggtttcaccatgttggccaggctgatctcgaactcctgacctcaggtgatccgcctgcctcggcctcccaaagtgctgggattacaggagtgagccactgcaccggccagcgtttctttcttcaatcacactccaccttgtctggtttgtagcgccatcaacaaaacacagtacgtaaggatggacagccacaggccacgacaaccggctcatcagaagcgattttttttttttttttttttttttttagatggagtcttgctctgtcgcccaggctggagtgcaatggcgtgatctcggctcactgcaacctctgcctcccgggttcaagcgattctcctgcctcagcctcctaagtagctggagctacaggctcacgttaccatgcccggctgatttttgtatttttagtagagacggggtttcactatgttggccaggctggtctcggactcctgacctcaagcaatccgcccgccctggcctcccaaagtgctggaattacaggcgtgagccaccgacccggcccagacgcgatttaaatggcatgacacaggcaggcctcgtgcaaagactgcaaggaggtcccggcagcttttgcagggcaattaatccacccagagcactgcgctcagaaagtaataggtaaacccgcgtccggactaaccggctgcccccacacttgatccctcccagtccgactctgctccagggcgtaccagggttcactcgtgaagtcacgacacccactcaaggggcacttcctatagagataagggcattagaggaagggcagagccccggtcaatgccaacagcccgggaaacagccaagccgggctccaatctctgccggcatcccctgtctgcaccgccgacgcccccagctacgaccccgggggtcacctcgcccagcatagccgtgacgctgggagagggtgggcccaacggggacgccaaagagagccattcaggcctccccgcgcccccggggagacgacttctggagagcggcgtccgcggtttcgccctcccctgacagcccctccacgcccttcttcgtccttctgcccggcctcacccagcttccggccgcccccggccgggtctcccctcagaccggcgcaggggacccaaagggctgtggcccggccaagcccaggtccgaaggcctggaccgaggcagggcccgcgaaggacgcagcgcggtccgagaagccgggcggaaggaaggccccgggagggcgcggacagctcacctgccgcaggtcgctgtcgcctgtccgccagcctccagtcagcgtgcccgtcagcgactccctcaggcgccgcagtccctgcagcccagcggactggcgcgaggccggcgcaacgtgggcacgcagcgcggggcggggcctagagatgacacgccccttgtagctgacacgcccttgccgggggcgggaagcggagyatgtggctttccccasgtctctggaggttgcaggctcaggctctgctcagcggggtaagtaggcgtgcttcggcaggaacactagtgttcacaagagccgaggtgtgtgagggtgcctcagggttgagcacttttcttccccagtgtggtttaatccttgtacatccactcagtgatgtaagaaatagggttgtcaaccgtggcaccacccacttggtcacttgccaatgcaatctgcgaaactgagtctcaactctgacacctcggttaccagtcttgtatctgatctccctgttgcattattcgcattcttcaaacagcggccagaatgacagaatgatttttctttttttgagaccgagttttgctcgtcgcccaggctggagtgcaatgacgtgatctcggctcactgcaacccccttctcccgggttcaagcgattctcctgccttaacctcccgaatagctgggattacaagcgcctgccaccacgcccggctaatttttgtatttttagtagagacgggggtttcaccatgttggccaggctggtctcgaactcctgagctcaggtgatccacccgcctcggcctcccaaatcactgcaattacaggccaccgcacccagcccagagtcattttttagttttactgaacacaaagaaattactgaaatcgtgggccgggtgtggtggctcatgtctgtaatcccagcactttgggagcctgaggcgggaagatcacttgaggtcagcagttcgagaccagcctggccagcatgttgaaaccccgtctctaccaaaaatacaaaaaaattttagccgggcatggtggctcctgcctgtaatcccagctactcaggaaactgaggcaggagaatcacttgaacccaagaggcggaagttgcagtgagccaagatcgcaccaccactgcactccagcctgggccacagagcaagactccaccttgaaaacaaaaaacaaaaacaaaaaaaaactgaaatcagtgcaagtagcagcaacttcagaagtgagttagggctgggcacggtggctcccacctgtactcccagcactttgggaggctgaggtgggtggatcactttaagtcaggagttcgagacctgcctggtcaacctggtgaaaccccgtctctactaaaaaatacaaaaattagccgggcttggtggcacatgcttgtaatcccagctactcgggaggctgaggcaggagaatctcttgaacccggggggcggaggttgcagtaagccgagatcgcgccactgcacaccagcctgggcgacggaccaagacactgtctcaaaaaaataaaaataataaaattttaaaagtgagttaggcaaagaaaatatcaagcggacaaggcctcaagggataagactcatggacatagctttaattatctttgcctgacgcccaatacctgaaaattaagatgttcatgcaagataaagaggtaatttttctcctcctcccagtcatcacccgtagcatccggttaagaggctctccacctcgctcattttggtctaactggatttacacaaactcactgtgcacgtgcctggggcgggcaaacccggaaasgacgccgagtcccgcgggatccaggaggagccaactgcgccggaggaggggtttcggccgacacgtcgggattggcggctgcagccaggggtcctccgackctgggcttccgtgagcggcgctctgccaggtggggccggagctgcggggagggagttggcgcctagcgcgcagctccatccccgcctctgcagtggactcggccgcagaatcggggtcccgggctcctggaacttgtcccscccaggccgcggcgaggaggtcactccagccggtgggacccgggccggggggcgggtgactggaaccgggggaggcgggaaggaggaggggatcgggcccaagggacacgaggtgggtcgcgggaccccgatatctcgggacaggcgtcttgccgctccgggcccagccgcccccttcgacacatactcgatgcatagacaatgggggtgtcctttgtcgctcctggcgggaaccccggccccacccccaactccacgcctcccattacccccagatctctggaccggattcgtcccattctcgtcctcatggtggacaagaaactggtggtggttttcggaggcacaggtgagccaaaccccagactggggcccttgcagakccagggcgcctagccctgaagaccgcccgtcctggggtctgcagggaggggtaaggtcactgggacccccgacccaggttggggctgtggtcgcaggaacgaggcccaaattgctttccaatttttttttttttggacggagttttgctctgtcacccaggctgcagtgcgatggcacgatctcggctcattgcaacctttgcctcccgggttgaagcgattctcctgtctcagcctcccgagtagctgggattacaagggcatgccaccacgcccggctaatttttgtatttttagtagagacggggtttcatcatattggtcaggctggtctcaaactcctgacctcaggtgatgacccgcctcggcctcccaaagtgcaggtattacaggcatgaaccaccacgccagacctgctttccaaattaaaaaaaaatgagttacttaacttatttgaataggagtacttgaacatgataccaaaattaaatcttcttcctagcctcctcttccacctcatctattgctgttaccaagtttcttgaatatcctgccagagtagataacatgttatcattttttcaaatgatagcatattatttcattcctattttttcttatttatacatatttaatatctctaacagctttattgagatataattcacgtactatacaatctacctgtttaaagtgtgcaactcactggtttctagtgtattcatagaattgtacaaccatcaccacaatcaattttagaaaatttccatcactccaaaaagaaactctggcccaggtgcagtggctcaaccctgtaatcccagcactttagttggaccaaatgggcagatygcttgagctgaggtgtttgagaccagcctgaacaacagggcaaaatctcgtctctacaaaaaaatacaaaaattagtggggcgtggtgtcatgcacctatagctacctaggaggttgaggtgggaggatcacctgagtccagcaggtcaaggctgcagtgacctgattgtgccactgcactccagcctgggcaacagagtgagacctgatctcaaaaaaaaaaaaaaaaaaaagaactccatgaacccgtgaacagttactccccattcttactcctcccagccaacccctagaaagctccaatctacttttggtttctatggatttgtctattcgggacatttcatatgaataaaatcataatatgtagccttttctctctggcttcttcagttagcatgttttcaaggtttgttcatgttgtagtgtgtgtccgggctttactctttttttttttttttttgagacagagtcccgctctgttgcccaggcagcagtgcagtggcgtgatctctgctcactgcaacttctgccactcgggttcaagcgattctcctgtctcaccctcctgagtagcagggactacaggcgtgagccaccatgcctggctaatttttgtatttttaatagagatggggttttgccatgtggccaggctggtctcaaactcctgacctcaggtgatctgcccacttcagcttcctaaagtgctgggattagaggcttgagccaccgcgcccggccaactttacttttttatttttaagacagagtttctctcttgttgcccaggctggagtgcaatggtgtgatctctgctcgctgcaacctctgcctcccrggttcaagcaattctcctgcctcagcctcccaagtagctgggattacaggtgtgcaccaccacacccagctaattttgtattttttagtagagacggggtttcaccatgttggtcaggctggtctcgaactcctgacagctttacttatttttatggctgagtaatattccaccgtatggatagactatattctgtttgtccattcgtcagtggatggatacttgatttatttccactttttggctattatgaataatgctgccatggaacattggtgtacacttttttctgagtcagggtcttgctctgttgcccaggctggagtgcagtggctcaatcatcactcactacagctttgacttccaagcctcaagcaatcctcctgactcattcgcctgagtagctgggacttcagatgagcgctaacaggcccagctgattttttaattttttgtagagactgggtctcaccctgctgcctaggctggtctcaaactcctggcctcaagcaaaacccatcccccttaccctcccaaagtgcttagattacagctatgagctactgtgcccggcctcagtccttatttttgatgcatttctgtgtaaattgcagatatgtgtacaccgcccttccatactaaagcatgcataacattagctagaattcagtatttgtttatagattatttttaattatgaggtaaaatatacatataataaagaatttttttttttttttttttttggagacagggccttactctgttacccaggctggcgtgcagtggtgtgatcacggctcactgcagcctcaacctcctgggttcaggctttcctccagcctcagcctccctggtagctgggactacaggcacatgccaccacgcccagctaatttttggtttttttttgtagagatatggtttcaccatgttgcccaggctggtctcaaactcctgagctcaagagatctgcgtgcctcagcctcccaaagtgtctggattacaggcatgagcccctgggcccagctgcaacgcgcaaaatcttaagggtacatctgaccgatgcgcatgcctgtgtgactcaagctccatcgagatctgaataagtttttgtattcctttctgttaactatttttctttgtctcgtttttgagcagatctgaatatggttgtgtatctgaatatggctttatattctacttcaggaagaattcaaatcccatcaagatctgaatatggttttttcttttgttttgagacagagtctcactgtgtcacccaggctggagtgcagtggcccaatctcggctcactgcaacctctgccaccctggttcaagcgattctcctgcctcagcctcccaagtagctgggattacaggctccaccatgcccagctaatttttttttttttttgagacggagtcttgctctgtcgtccaggctggagtgcagtggcgcgatctyggctcactgcaagctccacctcctgggttcatgccattctcctgcctcagtctcccgagtagctgggactacaggcgcccgccaccacgcccggctaagtttttgtatttttagtagagacagggtttcaccgtgttagccaggatggtctcgatctcctgacctcatgatccgcccgcctcggcctcccaaagtgctgggattacagttgtgagctactgcacccggcctcatttttttatttttagtagagacggggtttcaccatcttggctaggctggtcttgagctcctgacctcgtgatccacctgtctcagcctcccaaagtgctaggattacagccactgcacccagcctgaatatggttttgtattctactttttttactttattacatcacaaatatttttacctttatttttttgagaccaagtttcgctcttgttgcccaggctggagtgcaatggcgcgatctcggctcaccgcaacctctgcctcctgggttcaagcgattctcctgcctcagcctctcgagtagctgggattacaggcatgtgccaccacgcctagctaattttgtatttttagtagagacagtggtttctccatgttggtcgggctgttctcaaactcccaacttcaggtgatctacccccctcggcctctcaaagtgctaggattacaggtgtgagccactgcaccaggccctttttttttttttttttttttttttgagagggaatctcactttgtcacccaggctggagtgcagtggcgtgatctgggctcactgcaacctccgcctcctgtgttcaagcgattctcctgccttagcctcctgagtagctgtgactacaggcgggtgccaccacgcccggctaagtttgtatttttagcagagacagggtttcactgtgttagccaggatggtctcggtctccttacctggtgatccactcggcctggcctcccaaagtgctgtgattacaggcgtgagccaccatgcctggccttttttttttttttttaatacagattctcgctgtgtcacccaggctgtggtgcagtggcgcaatctcagctcactgcaacctccgcctcctgggttccagcaattctcgtgcctcagcctcctgagtagctgggagtacagryatgtgccttcacacccagctaatttttgtattttttgatagaggcggggtttcaccaagccaagatcgtgccactgcacttcagcctgggtgatagagtgagactccatctcaaaaaaataaaataaagaaaataaaaatacctgaatgagaatygtcgttgagaaggtttcctggatgctccttgctgtggtggagcactcccttcggggtttcgcccttcagtgggactttcaggtaggtctgacctgagaggtctttttgattctttgtaggtgcccagggtggctccgtggcccgcayactcctggaagatgggacattcaaggttcgagtggtgacccgaaaccctaggaagaaggcagcaaaggagctgaggctgcaaggtgcagaagtagtgcagggagaccaagatgaccaggtcatcatggagctggccctraatggggcttacgccaccttcatcgtgaccaattactgggagagctgcagccaggagcaggaggtcaagcaggtgagggcaggcaggagctgcagggaggcccggccaggctaggagcagagcgcctgggaggagctccgactctgcagggaggttggascactkcaggcctttccctcttcttcatgcctctgcctgctctaggctgtgaagcaggtggacgctgttgctttctcatccaattactttttttttgtttgtttgaggccgtctcagtctccgtgagcaaccacgcctggcctgttcgtttgttttttttttttttaatcaaaaatgttagaagttttttttaaaaagtaatttccacttttattttagattcaggggtacatgcacaggtttgttacattggtatattgagtgatgctgaggtctggggtgtgactggacctgtcacccaggtagtgggcacagtacccagtaggtaggttttcaacccttgcctccctccctcccgtggttcccagtgtctgttgttgccttcatgtccacgtgtacccatccaaacttgttattagccttgaccctttcttcaattatggtcttacctagaagcccattatatagagcagacaaagacaacttctctgattaacgcagatcttttttttttttttttttttgagactgagtcttgctctgtcgcccaggccggagtgcagtggggtgatctcggctcaccgcaacctctgcctcccagattcaagcaattcttctgcctcagcctcccgagtagctgggattataggtgtgtaccagcacacccaactaatttttgtatctttagtagaggcggggtttcaccatgttggccaggctggtcttgaactcctgacctcaggtgatcygcccacctcggcctcccaaagtgctgggattacaggcgtaagccacatgcccggccctgagctgatcttatttctttctttattttttgaggccgagtttcgcttttgttgcccaggctggcatgcaatggcgcaatcttggctcaccgcaacctccgcctcctgggttcaagttattctcctgccccagcctcccgaatagctgagattacatgcatgcgtcaccatgccctggtaatttttttgtatttttagtacagacggggtttctccatgttggtcaagctggtctctaactcccggcctcaggcgatccgcctgcctcggcctcccaaagtgctgggactgcgggcatgagccactgcgcccagcccagcagatcttatttctaatcctgatgattccctgtgggcttcctggtactgtcacgaaaaaggaccacaatccacgtggcttaaaaccatagaaatcagctgggcacagtggctcatgcttgtaatccccacactttgggaggccgaggcgggcagatcacttgaagtcaggagtttgagaccatcctggccaacacagtgaaaccctgtctctactaaaaatacaaaaattagctgggcatggtggtgggcgcctgtaatcccagctactcaggaggctgaggcaggagaattgcttgaacccaagaggcggaggttgcagtgagccaagattgtgccactgcactccggcctgagcgacagagctagactctgtctcaaaaacaaaaacaaaaaccacagaaatcgattctctgatattctagaagctagaagttcaaaatcaaggtgtcagcaatgtcaccctctctccagagtcttggaggccaggcgtggtagtttatgcttgtaatcccagcactttgggaggctgaggtgggcagatcacttaaggtcaggagttcaagaccagcctggccaacacagcaaaaccctgtctctacaaaaaatacaaaaattagccaggcatggtggcgggcacctgtagtcccagcgactcaggagggtgaggcaggagaattgcttgaatccaggaagcggaggctgcagtgagcagagatcacgccactgcactcctgcctgggtgacagagtgagagtccatcttaaaaaacaaaacaaaacaaggggtttgagggaaatccttcttcactgtttctggcttctcatggctccaggtgttcctgggcttgtggccacaaagctccaatctccgcttccctcttcgcatggccttctccaggtgttgtctcttctcccgtctcttataagtaccctggttactggatttagcgcctatctagttagtgcaggatgttcccatctcaagatccttcacgtaattacatctgccaagaccctttttccgaataaggtcacattcacagttttcaggaatgaggatgcggcatatctttttggaggccaccgtccgaatctctgcgtcacctcatgcagtaggtagtgttgtcatctgcattttaccagcgaggtcaggatggtgccatcacttctctggggtcacactgctcgtacatggcagagcctgatttgaacctaggcagctgtggtgcctctgtatagcctcccagggctctccaaggaagatggctgagctccatgggcagggtgttctcacaccagcagagatgggacgtgtgcattctcctttagacctccatgcaggccgtccccctgcagccgacctgcccccccgtcctatgttgcacatggtgggccagagtcagtggctggtagaaggcttccggggctgtgtttacgggcgtggtgtcatgtgtgaacatcattccaggagagggggcctcctcaagggtaagtggggtctagatgttaacctcgcagatggtggccgctccgggattagaatgctggggctgtgaccagggacagacatccttcttctgagccttgtgatctctccttccctgccctccaggggaagctgctygctgatctggccaggcgcctgggcctccactatgtggtctacagcggcctggagaacatcaagaagctgacggcagggagattggccgccgcgcactttgacggcaaaggggaggtggaggaatatttccgggacattggcgttcccatgaccagtgtgcggctgccctgctattttgagaacctcctctcccacttcttgccccagaaagccccagacggaaagagctacttgctgagtaagtgccctttctcgcacacggtgaggcagagctctcaccctgtaaagccgttggtgtarcagaccgcgggccrctgtcacgtggtgccaggttcaagccgtggctccctcacgttaggcccaggactgagcacatcctgtcagcttgcggggcctcagcttcctgttctgtgagatgggctctataccaatgtttgcaggggtggcaagatctgctgagatggtggtgacacgatattcgcttggtccattggaaggctttacagagaggacctagtgattgtcagttctccttcaaagatgaggagggccgggcgctgtggcttatgcctgtagtcccagcactttgggaggctgaggcggggagaccagcctggccaacatggtgaaaccccatctctactaaaaatacaaaaattagctgggcgtggtgccacccacctgtactggcagctactagggaggctgaggcaggggaatcgcttgaacccaggaggtggaggttgcagtgagctgagattgtgccactgcactctagcctaggcgacaagagcaacactccgtctcaaaacaaacaaaacaaaacaaaacaaaacaaaaaaaccaaagacgaggagaggatttggaaaatgaagttcagttgcagatttcacaaactaggaaagctctttcttctcagtgcccattggggctataaacaggttaggtgcactggccctggctgggaacaaggctcacccaacctgtgtcctgctggtcactcagtgatcagggcaggaggggttggtgcctctggctggccactccttaccctctgsttgaatgccaggtcaccctcgcataagggcccagcccatgggagtcctgctcacctggcgggccaagtctggtggtaacagtagccctttggtaccaccatttattatagtttgcaaagctggccaggcgcagtggcttacgcctgtaatccsagcactttgggaagccgaggtgggcagaccaccagktcaggagtttgagaccagcctggccagcatggtgtgaaaccccatctctactaaaaatacaaaaattagccagcctggcgtggtggtgcacgcctgtaatcccagctactcgggaggctgaggcagaagaatygcttgaacccaggaggcagaggttgcagtgagccgagatcgtggcactgcactccagcctgggtgacagagcaagaccccgtctcaaaaaaaaaaggccgggcacggtggcttacgcctgtaatcccagcactttgggaggccgaggagggcggatcacgaggttcaggagatcgagaccatcatggctaacttggtgaaacccctgtctctactaaaaatacaaaaacttagccgggtgtggcggcaggcgcctgtagtcccagctactcgggaggctgaggcaggagaatggtgtgaacccgggaggtggagcttgtggtgagccaagattgcgccactgcactccagcctgggygacagagcgagactccatctcaraaaaaaaaaaaaaaaaaaacctgcagtcagggatatctcctgctccggtctgtgcgctctgtgccctcgagctcccaggtgatctgaacaggaagctgcactggcccctgtctctaggtaaggaggataggacccaagcattccacaggccacacccagacagttgccagcctccccatctacaaaacctcagcctggaagtttgcgagtcattcattcattcaggatttatgaagcatttatcatggacgtgctgctctaggccagccgttggtgtctggttaatcaggattcctggtaagtgagttggtatttggagtatctactcagaggtggacgttccagcttccaggaatctaggatatgacagagtacttcaggctggtgcctccagattagcggagaccctgggctccagccacactctctgtagcagctttcagagtccttttcctttgtcccttctctgtcatcctagcgctgagagagctgggcaggcccaggttcttagccccattctaggaatgcagcaacccaggctcagagagcctcaacagcctgccctaggtggcagtacccggattccatcccgtttcctgactcaattccactgctgcctctgtgctaccacaaatagcaagacttgtcttagctatgcccgagtgctggagtgtgcagctgactgctgggaagaaccagcttggaccctttggagaggggctctgtccctgcccctgtctgccctcgggacatataccagctcacgtctctgccccacaggcttgcccacaggtgacgttcccatggatggcatgtccgtgtctgacctgggtcctgtggtgctcagccttttgaagatgccagaaaaatacgtcggccagaacatcgggctgagcacttgcaggcacacggccgaggagtacgctgccctgctcaccaagcacacccgcaaggtcgtgcacgatgccaaggtgggcctcccgccccaggtgactcaggcatccttgtcagggctttctagctcccgtagggagggtgtgtccagggctgcccacacctctgggcagtacatctaaattcattcgttcatcgtcaacgtttattttctgctgttccaggagctaactggccacagagtgaaatttctggcttagatgttttgaccaaatagagagaaaagcttccaggaggagagggccataggagccaaggcaaggaggggtgaaaatgcaggccctgccgggctcctctgtgggagggaatttgaagagaaaagagtctggaaagatagacccgacccctcccctgtgggaggggatttaaagggaaagaggctagaaagatagggccgacccctgcccccattggcctggctgggtgggcaggaggcctactggacagactcttgggtacctggtttctaatgtttgtcattaccattaggaaagtaagacatactcattaaagaatctgggaggctgggtgcagtagctcacgcctgtaatcccagcactttgggaggccgaggcaggtggatcacctgaggtcaggagtttgagaccagcctggccaacagggtgaaaccccatctctactaaaaataaacaaattagccgggtgtggtggcaggcgcctgtaatcccagctacttgggaggctgaggcaagagaatcgcttgaactcaggaggcagagtttgcagcgagccgagatgccactgcactccagactgggcgacagagcgagactccaactccaaaaaaaaaaaagaatctgggaaacactggagtccttaaaagacgaaagttgggtcaggcgcggtagctcacacctgtaatcctagcactttgggaggctgaggcgggcaattacaaggtcaggaaatcgagaccatcctgactaacacggtgaaaccccgtctctactaaaaatacaaaaaattagcccggcgtggtgggcctaactcctgggctcaagcgatcctcccacctccacctcccaaagtgctgggatgacaggtgtgagccactgtgtctggtcaagctttggtttttgagaaagaaagtgatgcaggcaggtctctgatttggaagggactgagatattttcgtctcatgatctgaaaataatagtctttttatttattcatttttgagacagggtctcactcttgttgcccaggctggagtacagtggggtgatctcagctcactgcaacctccacctcctggtttcaagcgattctcctgtctcagcctcctaagtagctgggattacacgcacctaccaccaggctggctaatttttgtatttttgaaagagacggggttttatcgtgttggccacgctggtctcgaactcctggcctcaagagatttgcctgcctcagcctcccaaagtgcagggattacgggcatgagccacagcatctggccaagaacaatctttaaactgatctacaatgtcaggcagctcaggagagcagcagtttctgaactttcggctcttagaagttttcaaatgaccttgtacggaggacctgggtcagggaccgagacaatagtrgctctgggtgtagcaggtcgggagaccccagcccatccggcctccctgccccgccacctcccggggcactggaggacgcyggccacgacaggctcctctgcttccagatgactcctgaggactacgaaaagcttggctttcycggtgcccgggacctggccaacatgttccgtttytatgccctgagacccgaccgtgacatcgagctgaccctgagactcaaccccaaggccctgacgctggaccagtggctggaacagcacaaaggggacttcaacctgctgtgacctgcccgcctcgcggccccttgtggggrtcgggggcwccagaggggcagaggcaccaacatctgaataaagccattgttctcccagatggcttccaggagaagaggactctgcttccaggacttgggttggggtggtagttgtgtaccaacacaacagtaagtggttggggagggtccggggctgtaccaacacagcagtaagttggagcggggggggggggtccagggctgtaccaacacagcagtaagtgaggggacccggggttgtaccaacacagcagtaaggggtggctccagggctgtaccaacacagcagtaagggagggtccaaggctgaagggatcacttggtgactgggacgagtgacctaaacgtgtttagtcagacaggtgtgaagtggcctgttctgacctcagctagcagaacagctctgaccagcagcctctgttcccacatttgaaattcattcacagacggggacatagcacaggacacagaggagccccaggagccgagcttctgacacacccctttcatctccagagctagtgaggccatctgcacatgtgaactggagacaggctctgcagggaggcgggggagatatgggcttctccctttctctcctcatccttgtcctggaaggagccggccttggggtaccatcctggacacaggtgaacttcaaacaggttggaaaaaggaaaatcggatgtggcagagctgtggtccacaacgcacagtaattggacactgctgggaagcaaaactgaaggagaaacaacccaccttgcttgctggggtgggtcacagagaagagggtcagaggccgagagaccagttatttgcctgagagtttgtggtccatggcagctccgatttttttttttttttttttttttgagacggagtctccctctgtcacccaggctggggtgcagtggcacgatcccagctcactgcagcctccacctcctgggttcaagtgattctcctgcctcagcctcccgagtagctgggattacaagcatgcaccatcacgtccagctaatttttgtatttttagtagagacggggtttcaccatattgtccaggatggtctcgatctcttgacctcgtgatccgcccgcctcggccttccaaagtgttgggattacaggcataagccaccgcgcctggccaattttttttttttttttttttttttttaaagagtcaaggtctcgctctgttgcccaggctggagtgcagtggcacagtcatagctcactgcagccttcacctcccaggcttaagtgatccttccacctcaacctcctgagtagctgggattatcgtacaggtatgagccactgagcccagcagttctgtgaatttcaattcaacacatttaggtttgtgtgactaccatcacagtttttatttttttacttccccaccctggctctggcacccccaggcacaaaaattcattctatccattgactgaagcatttctttgacaatttaccagtatgctgggccctaaatacaatgtagcaaaaaaagttatgctgcctgccttgaggagcttatatttagtgggagagcctgatagaaacacacaataaatagttatgtatctacgcctgtaattccggcactttgggacgctgaggtggaggatggcttgagttcaggagttcgagaccagcctgggcaacatagcaagaccccatctctacctaaaaaaaagaaatacaaaagaaactagggccaggcgtggtggctcatgcctgtaatcccagcactttgggaggccaaggcaggtggatcagttgaggttgggagttcgaaaccaacttggtcaacatggcaaaaccctgtctctaccaaaaaatacaaaaattagctgggcgtggtggcgtgtgccggcagctactcaggaggctgaggcaggagaatcagctgaacccaggaggtggaggttgtggtgagccgagattgtaccactgcactccagcctgggcgacagagggagactctgcctcaaaaacaaaaaaacagaagaaatggtggcaggcgtggtggcatgtgcctgtactcccagctactcaggaagctgtggtaggaggatcacttgagcccaggaggtcaaggctgtggtgagctgtgattgcaccaccacaagccagccagggcaacagagtgaaagcctgtctcaaaaacaaaacaaaacccaaaaaacaaattgacataagggctgcaaaaaacaaaacaggaaggataaataaatggggacaggagcagcatcgggggaggtgaccagtaagctaaggtctgtggatcatgcccttggccatataactatggacccacttcgccttttatgttcccccctggcccatttgtgacccttgaagagtcatgagaaataagcagaacttctagttaaaagataagacctgcacagtatttattaacaagcaagagtgtgaaacaagcctcttccaggagccgtgcagctgccgtcctccacatcagagccggctctgcagtgctacaaacacagaggggcaggggcagctggaggcctgtgggcctggagagaattcttgcacactgtttggttgacagggaaggaaacaaaggccaggccaccagaacccaaaggactatgagtgaggagggggctcaggttggaaacaacccagtcccaggcctgaggtgggaatggggctgaggaccaatgcctgagagctggccttgtccaccctcctaatgttttttttgagatggagtctcaccctgtcacccaggctggaatccagtggcgcaatcctggctcactgcaacctccacctccagggttcaagcggatctcctgcctcagcctgccgagtagctcggattacaggcgcccaccaccaagtctggctaatttttgtatttttagtagagacagggtttcaccatgttggctaggctggtcttgaactcgtgacctcatgatccgcccaccttggcctcccaaagtgctgggattacaggtgtgagccaccacgcccggcccaccctcctaatgtttaagcaagtgccaaacatgtacctcccacaggctcacaggcctagaaatactttattttcttgagacatggtctggctctgtcacctagactggagtggagttgcatgatcacagctcactggagccttgaactcctcagctcaagcaatcctgccacctcaagatttctaagtagctgggactacaggtgccaagccaccactcccagctaattttttagaatttttttgtagagatgggggtctcactctctcgctcctgggctcacacattcctccctccttggcctcctaaagtgttcagattacaggcgtgagccaccatgcctggcccttttcttatatttttaaatacatactactactcagaagctataaagaagtctggtaacaaatacatcaggagcacaagtggaaataaaccaaacccaggcccagaaagagcactgaattctacagctgttgcacggccacctttttttttttgagatgaagtctcgcactgtcgcccaggccggagtgcaatggcatgatctccaatcactgcaacctccacctcctgagttcaagtgattctcctgtctcagcctcctgagaagcttggataacatgcatgtgccaccacgcctggctaatttttttgtatttttatagagacggggtttcaccatgttggccaggctggtcttgaactcctaacctcaggtgatccacccgcctcagcctcccaaagtgctgggattataggtgtgagccacctcgcctggtcatgcacagccacctctaatcccttgagggaaggatgcttcaacacaacaatggtttctgtttagcaagaaaatccacctttctcttccaaagtctttctctagacttctgctttgaagcaataggacatgaatgagactcagggtgactgttccaggaataagcccaagctttcacaagagacacggtctagctccccactgctgtatccccaggaactagaatagggcctggtccatactgagtgtccacagtaggcaggcaatcagtatttcattgatgaaaatactgggaagtatctgagatgagcagaatgtcactgctgagcctctcctgtccgtcagctctttcccgagtctcttctccacctgacccagcaaacagactctcatctcaccctgctcagcccagagtgccagagtggactgagctgtgtatcagggcccctctagccacgccaggcatagagcgtggctgggaacccagagtagccaaactataatacataaaaattttggtcaggcatggtggctcacacctgtaatcccagcactttgggaggccgaggtgggcggatcacctgaggtcagaagttcaagaccagcctggccaacatggtgaaaccccccatctctactaaaaatacaaaaattagccaagcgtggtggcatgcacctgtagtcccagctactcagaagcctgagacaggagaatcgcttgaacccaggaggcagaggttgcagtgagcagagatggtatcacttcactccagtatgggcgacacagcgagactccatttaaaaaaaaaataaaataaaattgaatgtaaaagatgcaaagactggaaagaatgaagggaaacaatccagtgagggagactgaaatgcagggacccagggacattggccagctctcacagcatgggctcccaagaaaaaagtcacatccagattctagaacattcactcacaggggactgttgtgtcatggcaagcaccctgctctggaatccaagtgagggtcagcactgtcggcaccccagacccatctgcctctatgtgctctgggtggctgtgagcacaggatgaggccagccaagtctcctgtaacccccataagccacctgcagaggctgtctgaattctttcaaagaagaaatgaccacaatttaggtttgaaatatctttttgcaatagataatcttatttacattaatacagaatcattttacattcctaaatcagacactaatagatgctttattttagtgaattataaaggaaaacaaaaaggaaactgttgagaagtgttcttcattaacctgtctaacgacagcccgaagatcctgaaacacatggaaactgcgacatgctaccagcagaggctggggaatgggggttctgctctcactgaatggtggggaaccttcaactgcttagcctgtgctttccttttctgaatcaacatttacaaaggaaaaaacaatgattagcactgaataatttaaacacacttcagaaaatagatgtcaacagtgtaagtgggagaaccaagcccctgactagcaacagtggcagggcttcagttcccaaggcagctgaagtctggccagcacagtgctgcaatgggctgtggctcagcagaagggcaggagccctccatgcctggcttacaacaacaggactcaatagtcagggacaggcggccatcccggatggggtgggagcaaggactgtacatcctgacaaggatcaccacccacacggtcagagcagaacccccagggactctctgggcctctacgtgcctcccaggcaccgactgtgcagctgcttggtaccccgggaataaaaactaactgagcagagcagctgatgcctcggcagggcccctcattaggggaggacggtgctggtggggcctgggggccccacgctcccagtgaagacaacctgtcaggaagaactcattctggaacctcccggaggtttgctgagaaggaaattaatcacttcgtaacttgatgcagcttaaggcttcatttctaagctgtaagcatggcctttaactaagatatccacaatattcaattccaaattagagttttagccctgcaagagtctaaccatctccctctgcctgagccaggggccgtcacctaccaatggacaggaaactgccaccagcctctggggctgcatcctactgcccgggctgtccactgtgacctttccgtggagagaggtgttgtcccatgattttgctgt

SEQ ID NO: 96938 - DNA, 12604 bp, Homo sapiens
ggtgagactcttctctgttgccctccctgctttcttcccctgagaagggcccaggaggccttcacctctctctctaactccggctccatgttccctctcccgcccccaccgccttaaccccttgtacttgacttctcagcccatcacccaatcccacttcctccaagaagctctccccgactgcagactggattgtacttcccttcatacacttccttctccgtgtgtgccccattttggaatctttccgtgtgtggttctggattcgtgttcctccctccctagatgctcagctctgtgaggtaggacccccgtctctctcctccagcccctccttacagcctccagcacagtcccaacacccatctctctcctccagcccctcctcacagcctccagcagagtcccagcgctcacaagtgctccttagggggttgctggaaggaataatacaagaacctagagcctggtttgaatcctggcggcttccagactgcattctctcctctgggcccaaacctaacctctgagtgttcccaagtcaagagtggatgccctccccacccggaacaaaagggatttctcactctgattcccttggttcctccagcaggtcttcattaaactccgtggtgtcctggcttgggctctagagagaccctggtgagcccagtagagccagttcatgcctcgtggggtgggaggtgcccccttccgtcagcctccaagggacagtgaatatccgttaatgtcccagacatggctcccggagtggacttgcaagttggcagttggctggttggtggcccgtaaggcaaaatatcgtctcatttaatgctcatagcaatgctgtagggaagctgatgattatcctccttttaccaaagagctgacgctgagcaaggctgaacaggtggctgtggtcccatagccggggtcggacacgagtggtctggctgccaaaccaggcgtccgggccgctcctcgccctgcactgctgagcctcccaaacagcagacacctttgccatgccttcctccaggcaccaaatgtacgctcagcctctgctctgccagggactgttcttggtgctggggaagggggaaagacgtggcctgatggggagcaggaattagaaacaacatccggagctggaggtctgcgagtgccctcccagcacacggcgaggcaccaagcccaggctgggggctccaaggggggaactcctgagcctgcctcagtggggggactaggaattaatggaatgtgggatgagggaacattctggagagtggggccagcacccacaaacgttagagataccaaagagcctggttcgtccagggagttgcaggcgcatccggggcagggtggggcaggagtggcaggacctggcaggggccaggtcacggctcccatgccatggactttatgccacaggccatggggagctgttgaaggatctggaacaggttgtgttacaaagatcacacagctcacacctgtaatcccaattactcaggaagctgaggcaggaggatcacttgaggccagtagatagaccagcctgggcaacatagtgagaccctgtctcttccaacaaaaagaagaaaaacatggccgggcgcggtggctcatgcctgtaatcccagcactttgggaggctgaggcgggcagatcacctgaggtcaggagttcgagaccagcctggccaacatagtgaaaccccgtctctactaaaaatacaaaacttagccaggtatggtggcgggcgcctgtaatcccagctacttgggaagctgagacaggaaaatcgcctgaacccgggaggcggaggttgcagtgagccgagaccatgccgttgcactattgcactccggcctgggcaagaagagtgaaactccgtctcaaaaaaagaaaaaaaacaaacatgtatcagctgagtttcggagggtgataagagtgtggacaagacaggaggccacatgacaggtgggaggctgttaccgaaactcagggcaggtggccacagggtcccggtggggaggaaaggagagatgccaggacaagggagcctcccagctggcccgcgtttggggactcattgtgctgggggctccacgtgggtgcgttcttagccgagcatcccaccgcccacaaggtgcaagtactggtttatccctggttttggataaagagactgaggcatggacgcgtgggtatcatagctaatcatggtggagtggccttgagcccagacagcccggctgcagagcctgtgctctgatgatggtgggacggccgcacccagaggccctgggatgtgggtagtgagcagggcggagcctggcccacggtgccctggcagccagtggcactgtccctgggtttggagcccatggggagagagggcgaaagagtgtcatgatgtgggggagcgtcgttctcagtgggactgggacaggtggcactcccgggatgtacaggggtggggcagatgggcctgggagcctctggcatcagggccaggggtggcccagagggggaggctgtggcagggacaggtgtctctggcaagtagcagggcaggcaggagagactgcaagggaggtggagggaggagcggggcctctggcagcgtccatggatggggcagttctacagaggagatggcagccccaatcaggaaaggccctgtacccgagcccttggcttggaaggtgggaggtgtgggctctcagaaggacggcagcccacgtggaaaccttccggcctcacatgtgggcaaggcagtgatgtctcagggacatcacatgcatgcacccggccctgactcgaacccctgacgggcactagatggagccccacagaaaggggacgtgcgtgggcctctgccaaggtgagtgggcatgggcagtgtcgcccctgaaattcctacacctggccgggtacagtggctcaggcctgtaatcccagcactttgggaggccgaggcaggcagatcacgaggtcgagatagagaccatcctagccaacttggtgaaatcccatctctactaatcatacaaaaattagctgggcgtggtggcgggtgcctgtcctcccagctactccagaggctgaggcaggagaattgcttgaacctgggaggcggaggttgcagtgagccaagatcgcgccactgcactccagcctggcgacagccagatcccatctcaaaaaaaaaaaaaaaaaaggaaaagaaaagaaaaatgaaaaaaaagaaattcccacaccttctgaggggattccagggctgggacctgactcgcccttttgggcactacagagcctccagcttccttggagagaatttggaaccaaaccctaacccccaggttgccctggcagggtccagcctggcatcagggctgactggcagccttgctcccaccgtccaagtgcccctcctgccctcccacctagttcctgggagtggtcgaggcacccggagctggtttgtcccaaagaacgcacaccgcacccagggctgccaggagacctttccgctccgtgcgtctccagctcctgccctcagccccgagcctggccgggatgctgagtggacacccatggcctctcaggggttgccagaaggttgcaaggccaaatggaaagcagctgaactggctacatcccttcctctcccaaccacagcctctgcctttggatcctacaccttcctctaggttagggacacactcaggagtcaaccggtccatgccaagtcctggcctggctccttgttcgctgtgtgccctaggggtagcccctggccttggcctcccaatctgtacaccgagatgggtggtagttcctgcctgtggggtgccgtgagcgtcaatggagatcgcacctccccagagccttgcagggcctgggcctggtcacctcttggacgtgtcagcatcgttatttctccccctcaattgccgaacactagtgtgtgcctctctagtgtactggcccccagcacagagccaggccccgtaggttcccaggcgatgatgtgccacttaaatccccgtcggccacttccgccacgaagccccgctttcgcacctgctgaacctaggactccgccatgcagcaggaccgccctgcacattgctctcgtccaactgccttacagatgcagggacctcacctgcgccagtcagtaactcatcttgcagctaaatatataatgtgtctatgagaatgtgctgggtcataatcagttgctctgtgaccctggcagggttttttttgtgtttttttgttttcggaaacggtataattctgcagtggtgtgatcatagttcactgcggcttcaaactcctgggctcaagcaatcctcccacctcagaccccaagtacctgggactacaggcacaaaccactatgcccagctaattattttattttttggtagacggggtctcgctatgttgcccaggctggagtgcagtggcatgattatagctcactgcggcctgaaactcctgggctcacacaatcctcctgcgtcatcctcctgagtagctgggaccacactcacgcactgccatgcctggctaattttaaagttttttgtagagatggagtctcactgtgttacgctggccgggaactcctgggctccagcgaccctcctacgtcagcctcccaaagtgtcgggattacaggcgtgagccaccgtgcccagccccctgggcaagtttaacttctctgtgccttggactccccagtgttaaatggggtagtagagggagacagccctccgagagccttcctgccctgtgcctggcccagagcagcagtgctccgcacgtgttgcctgtttctccatctgaactgcgctcctggccgcccatggcctcccagtcattctgctccactcctgctccacacaggtcataaagaactcccccgtgaagacgtttgctagtcccaccttcagctccctcctggatgtgtttctgtcgaccacagtgtttctgacgctgtccaccacctgcttcctgaagtacgaggcggccaccgtgcctcccccgcccgccgccctggcggtcttcagtgcagccctgctgctggaggtgctgtccctcgcggtgtccatcaggtaagcgccgcgtggactgggtctccagctctgagccgttagctccctcttctggctccatggcttatggctgagcggttggactggtccccagccagctgtccctgctggctgatttctggagatgggtccccgtgtcctccccgagccctgtgccccagcatcctccctccctgacgttggcccagatgcggggggaccacctcgctggagggggcggtgcctccacagccccaaccgctgccagcttgtccccagatttccaggttcagagactgcaaaggagaaggtgagaagataggaaacaatctggaggaaggaaaggaaaagacatgagcgggggtagtgggcctgggacagcaggcgcctcttcagagtaccggagccaaacagcatctccacgcacttgcctcaggcagtggtctcttggatgtgacgccaacagaagaaagaatagacaagcccaacttcctcagaagttaagctgttgcgctacaaagaacaccatcaagaaagagaaagaacccacagaacgggagggaacacttgcagatcaggcctcggacaaggtctaacatctagaatggataaagagcacacatagcctgataataaaaagacagctcattttaaaggggacagaggctccgagtagaccacaggtgcgtcttgggaaagctgggccctcgggaccagcctggctccctgagggggctcgcagcggctctgtattcctgagcaggcaggtggccctgtgtggtccccgtcctgggcaccacaagccccttgggtggtcctgtcaccctcaacaggatggctgccggcctagcagagtcccactagcaacggtgccccggagctgggcttcaaacagacatggggaggcagccctgaccttgagcgtctgctgcccttatccaacatcccagggcagaaatgaatggctttgagtctggcgtgaggcgccggaatgctggcttctcccatctggggtgggcaggctgggattcctgccccctccttcccacstgcactgtacccaggaccctttcagcttcctccgaggccgccatgggccatgctgtctgtggcgtgtgctcagtgtttcccagaactccctgtgggctcatgccccatcacccccagcgagcagccctcttcctggcacagcctcccctcctgcctcagtgccctcctgtgcttctggggacccctcccaaaggagccgtcgcctgcaaaccctttcagggtccacttccccagaacccaaaccagacatcctcaggcccctggttggtttgtttttcctctttaaaaagatcagctttaggctgggcatggtggctcatgcctgtaatcccagcactttgggaggccaaggcaggtggatcacctgaggctgggagttcgagaccagcctggacagcatggtgaaaccycatctctactaaaaaataccaaaaaaaaaaaaaatagccattcttggttgtgggcacgtgtaaccccagctactcgggaggctgaggcaggagaatcaacttgaacccaggaggtggagattgcagtgagctgagatcgcaccattgcactccattctgggtgacgagcaaaactccatctcaaaaaagaaaaaaaagaagatctgctttattgtgacatgatttatatacaataaactcattcaagtggacaactctgatttttagcaaatttgaagaattgtatgaatatcaccactatgtaactatcgggcacctccatcaccccaaaaagaaacccatcctcatgggcagtcactcccccaggtctgccttccctggtccacccccaggttttcctctaatgtgggtagctgtagcgtcttgagggctctgaggccagcattgtctccattcctttttactttcaccctttagctattattccctgctccttcagacccaattctaaagcattgagggcaaccccggtgtagactgccgagggctggggtgaggtgcgctggaactgcctgcacagacatactccccaaggatctggtgaaggtggtggctgctgcacccctgaacaggcctgtggtgggatttggttccatttaccaggaatcgtcaagcctgggagaggcccagaccctgaaaggcttccctggcccctctgagggccgtgttgaggaccccaggttgacgggaacctgcgctgtggggtatacgggcaccccatccctttcctgtacaggaggaaagccaggcgcctcctcagtgactggcccaggccccgcccgttgcctccaggaggcttcctgcatcaccctctctgctctgccccagcaggcgtgaggtctcattttcagatccctgcagtctcagggaccagcatgaaggccccctccaacctcacatctttcccgctgctgactgggaacttggttccctctgtcccccctcctagggcctctgtattctgcatatttgtggttattcttggaagtattccaaagtcttcattatcctttaaatatcaggaagccagggctgtccaggaccctaaaagggtgaggctgtgcctgcgtccatgtggggaatggctggagagtgagcgttccctcgcctggccacaccacgcagccaagagggagaggcatggtaggtgttcaggcccgaaggctgggggcggggggctctgtgccagaggcttttttgctgttcagtcacaacagcggcccccgcccagcctctcctgaggcagggacagcaggcctatccccagctccctggcagcaagcttgagagaaggactgtctccccacgaggaccccacaccttctcttcacctccccatgtggccccaccatggcccaggggtccttggactcagccaagacctgttcctcctcctcacagtggttcttggcccgcacactcagctgcttctttatacagaaacttttattgtgtcaacatcacactcctgaaacgaagcccgctagacacacgcctgcaaaaggagtcagtgaatacagtcgctctgcttagaaggacaaagtcttttaaaatgaaatacgtggtgctggacctcacgtacaacagagccccgctgtctggagagtcctgaagccgccagctacaggtgaacatgcacgatgaacatgacagcccagatgcagacggcacgcgtgtgcgggtttggtggtctaagcgccacgagccaggttcagcctgtggtgtgattttctgaaacactgatgatgatgccccaaacagcagagaccactgtcactcagtttccacaggagctgcgctccaagaaaatccagggtgtgtcagcaccaccacagagcaccctgtttgtagctgggacacagcctctgggctaagatgctgtcagcagccttctgcctttgcaggtgcccaggggcttggctgctgtgtggggtgcagggcagaacctccctgggtggcacctgcccacatgcaggacagctctgtccctggcgcctgcccaccagatgccaggaccgcctcttctgctgcgacaactgcacgggctccacagaattccaggacgcctccaaagctgcccccgtcaagacctcctgcctcagaagctgatgggagccggtgacggcaacgtggtggcccccaggagactctcctcggggcctgtgatactctcacgtgttctgttaggcgagcgaagcatgtgcttttcacaagcatattttatcacaacgcaacatgtgaccctagaatcaggtacaatgagctaagcctggcttccttgccttctaccaaaagtgagggaggtagactcccaccccacgcctgctctcacgcccatcccaggggcaacacgggagagagcagagggcggcgctggctgcggcctcgcacctgtctcctggccgatgacccaccccgggccccgtcgctcctgctaacccccatgcctctcgcaggatggtgttcttcctggaggacgtcatggcctgcaccaagcgcctgctggagtggatcgccggctggctaccacgtcactgcatcggggccatcctggtgtcgcttcccgcactggccgtctactcccatgtcacctccgaatatgagaccaacatacacgtaagtaaaggctcagccgttttatttccacgctctcctggactccctaatctctcttttctttaaatcacttgggatagcaatttaaaaataaaccctttggccaggcatggtggctcacgcctgtaatcccagcactgtgggaggtggaggtgggcagatcacaaggtcaagagatcgagaccatcctggccaacatggtgaaaccccgtctctactaaaaatacaattagctggtcatggtggcaggcgcctttaatcccagctacttgggaggctgaggcaggagaatcgcttgaacctgggaggcagaggttgcagtgagctgaggttgcaccaccacactgcagcctgggtgatggagcgagactgcgtcacaaaataaaataaaataaataaaataaaataaacccttgaagaggcacgaactcttttactctcctgagccagcttttttagaagccgacttagcattggcctgcccagatgctcacgcccgggcagtggccgggctggggagtccccggtgggcacgagtccctgccagtgtggcttcttcttcatcaagttccaaatcagttattttccttcacattttacaaagaagcgtctgtcccacctttcctaaccatgcgagaagcatacctggcacacagaattgacttgtgcccgggtcggctgctgctgatcaggaagggaactgtgctaaactccgtggagagggaaccagcacggccgtgggagatgatccttctggtgcaagtgagcatgagcttccgggcgggctgatggtgtttgacactttagccccaaatcacatctcactgggccccaaggaaaagtgttttgaaggaaactgatcacacagcgtttctcaaacagggaggcctccctttcctttccacgaagacacgtgccatttcccacacctgcagaagagtgtgatgccatgtgaacagggagcctcacgccgggtagggaacctagaggcttgatctgtccttgacactgcccactagcaaaagtaagactgactgcagatagtgagcaattagctggtatcggtgatatttttaggttacacagaaacatggattaggccgggagcggtggctcatacctgtaatcccaggcactttgagaggccgaggcaggtggatcacctgaggtcaggagttcgagaccagcctggccaacatggtgaaacccagtctttactaaaaatacaaaaattagcgaggtgtggtgccgggagcctgtcatcccagctactcatgaggctgaggtaggagaatcacttgaacccggaaggcagaggttgcagtgagctgagattgcaccactgcactccagcctgggcgacagagtgagactcagtcaaaaaaaaaaggaaacatggattagtggcgaatgttttggcggccgggtatagcaggggtggcggggtggccctgggcggctgtcctaacccttcgcctcttgcagttcccagtgttcacaggctcggccgcgctgattgccgtcgtgcactactgtaacttctgccagctcagctcctggatgaggtcctccctcgccaccgtcgtgggggccgggccgctgctcctgctctacgtctccctgtgcccagacaggtacgcggccagcactgcttgcgggcaccagggtgcgtggccaccttgcccgaggttgcgtagggcctggctgcatttgcacattgcttctcacgccccgatagagatatttcccatcatgacccaaaatagctgtcagcacacatcataccaaagagctaatgagatgccctcagagtaatatgcaaaagaaagaaaaagaatatcatttagaacagcactctgggtagttgaatgtagacatcctggaaaacataatgctgccattgcattataccgaggtgacttctgatgaatgggctggaatctaagaaagtaggacctgaaggatttcatagaagatggtcaaggccatgaaagagcggagctgcagatggatgtgaaggtggagaggaagctggtgctgactttccttgagtggggtagggttcatgaaccgggacaggtcacagcctggaaggaggaggtgaagacgtaggatgatcttgcaagtcacctggggcttatttcaaaatattatgtcaggctgggcacagtggctcatgcctgtaatcccagcactttgggaggccaaggcaggcagatcacctgaggtcaggagttcaagaccagcctggccaacatggtgaaaccccgtctctacgaaaaatacaaaaattagtcaggcatgggggcgtgcacctgtaatcgcagctacttgggaggctgaggtaggagaaccgcttgtacccgggaggcggaggttgcagtgagctgagattgcgccattgcactccagcctgggtgacaagagtgagattccatctcaaaaacaaaaaataataaataggtcaaaacagttccccatatgatgtcatgagacgtaggattaatgaccagtcactgaacataggtcttttattttgaaatcctctgcatactgaggaggacgctggccttcagaaccgtatcactggtaggtgctgaggaatgggatggcgcagacacagaaacaggagtcagggaggccggtagacctctggggacaagcccagttctcatcattgtactacaaaaaatgtaaaaacttacaggatggcagtgataggtgctatatttaaaatatttgccattagcgacatccagtaagatccctatctttcatgtgttgcactaactgaataattcttgatttgttaaaaataagtcccagccggtcttggtgctcacgcctgtaatcctaccacttttgggaggctgaagcgggtggattgtctgagctcaggagttcaagacagcctgggcaacacggtgaaaccctgtctctactaaaaatacaaaaaattagccaggcatggcggtgtgcacctgtagtcccagctactcaggaggctgaggcaggagaattggttgaccctgggaggcggaggttgcagtgaaccgagatcgcgccactgcactccagcctgggtgacagagcaagactcagtctccaaaaataaaaataaaaaataagtctcaaaattgcctattacacatttgctactggtttcagggtattttaagccttttcaactaaatgtgttgttggaaatacagtaataccttgtataacagaatgtaagcagtgaacaatttattcaaatatttcgtgatatcttaaacccattaagcttccattcatgtaataaatttctcccaaatattgggcttttcctataactgcttataa

SEQ ID NO: 96939 - DNA, 13427 bp, Homo sapiens
ctgagcactccctggcctcacacagggtggatgtcctcacaggacccaggttctggggtcgagggcactttccagctctctgtgccggtgactgtctaccaggcagcttctcaggaccagctgagctgggacatgacccccgggcccaccccaacccctgccacacctgaagactgccaggagacttgcctcacaggagagccccggcctggggagctttctcagcctcatcattctccatagtgggggctgtccagatgctaagcagcacccctggcctgtaccccaccccatcatgacaaccaaaaatatttccagataccgctgaggggcgcaggggacagggttgccaaagaaaatatagggtacctggttaaatcagaatttcacatcgacaacaaattactttttttagtatatcccaaataccgcataggatgcacctacagatcatccgttgctcgtctgagacggacctgggtgtcctgtgcttttgtttgctgagcccagaagccccggtgggagcaagggtgcaggaagaggagggaggtcaggggtggctctggcccagccaactgaaagaaagggtcccctggccatcagatccaagggtttccagtcatgttcaggaaaacactgctctgggacccggcctgactccttcccttctctctcctccctcctccccaggccaccagaggcctgacaagtctctcctgctcctcagtgctggccagacacaaggccacagccctgacactcttgggcctgctgagccctgcactgagtccacatccttgccccggccagctcgcagcaaggccactggaccacaatcctacctgcaacatgaccctacagcctctctctgcctcctacatgaagagagatcaaaaccaactgatagaaagggaccctaaggaggccaggcatggtggctcatgcccgcaatcccaacactttgtgaagctgaggcaggagaatcgcctgagcccaggagttcaagaccagcccgagcaacatagtgagacctcaactacctgtagtcctggctacttgggaggctgaggtgggaggatcacttgagcccaggagtttgaaggtacagtgagctacaactgtgccactgcactccagcctgggcaatggagcgagaccctgtgtctaaaaaataaaaacaaaaaaactcagacccatatgaaaatctgcacatggatgtttacagcagctttatccataattgccaaaacttggaagcaaccaatatgtccctcagtagatgagtggacaaataaactgtggtccatccaatggaatactaaccagtactaaaagaaattagctgtcggccgggcgccgtggctcacgcctgtaatcccagcactttgggaggccgaggcgggcggatcatgaggtcagtagttcgagaccagcctgaccaacatggtgaaaccccgtctctactaaaaaaagatacaaaaattagctgggcgtggtggtgcatgcctgtaatcccagctactcaggaggctgaggcaggagaatcgcttgaacctgggaggcagaggttgcagtgagccgagattgcgccattgcactacagcctgggggacagagcaagactctgtctaaaaaaaaaagaaattagctgtcaagctatgaaaaaacatggaggaatctaaacgcatatcactaagtgaagaacgccaatgtgaagaggctacagatgcatgagtccaactacaggacattctggaaagcatgaaactatggagacactgaaaacatcagtggtggccaggagttaggggagatggatggatgggcagggcacagaggatttcaaggcagtgacactactgtatgtgatgctacgatggtagacatgtgtcatcatacatttgcctaactcatgaacacaccaagccaagagtgagccctcatggaaactgtactccaagtgatgatggcatgtcaacagaggttcatcagttgtgacgaaaatagcactctggtgggggaagttgtgaggtaatatgggaaatctctgcacattctgctcttttgctgagaacctaaaactgctctaaaaagcaactcctattaaaagacaacaaccaaataactatagtttcatctgaaagaaggtgctacattcaggaaacaagaatagggtgctttaaggaagcgatggctcaggatgatatattaagtatcaaagttgaaataaaaaatcctacagtcaggaaaaaaccataaaggaatgatgggcagggaatgaccagagaagcaggaacacacagaggcttccagggagaggtggtccctgacctgcaggctgccctctccccagaggagtgaccagagggggcaaaccacagagagggaggtcaacagccaacagcagcccgacaaggaaaagagtttacactctcatgaactgaactaaacgtgcccaacgagcgcagccctaagcccacccatgccacatagctgggaggggtggcatctggacacctgtcacccaccacccctggggagacactcaaggaggtaaccttgttgtgtccctcttctgacggctgaggagaaacagggccatgaactccaacagaactgaagctagagggtttcaagtattattacacagatgctgaatcccacggaggatggtcccgccccacctgacccctcagagtggagctccctggcctgtgacgttgtgtcacatctcagaagggagaccagagttggatgacgtcacccttcagtgctgagctggggaagaacagagccgcctccaatgccctcagcactcagaacagtggcggacacaccagacacccagcacaagtgaagaaaattaactcctcctgcagacctcgaggacagagacccccacaatgagagcaaatagaaagacacagaggagccaccaagcatatgcttggtaaggggagctggggcccagtaggtctgcagacaagctccagaccaggcaagaaaggatgaagaggaaaaagccctgagacacagaaaggacagacagctgacccttgaatgatgcaagggctagggacactggcccccacacagttgaaaacccacctttaagctttgactccccaaaagcttaactactaacagactcctgttgactggaagccttatgcataacatacgcagtcaagtggcacatattttttatgttttatgctattatatactgtattacaatacggtaagctacaaatcccaggaagaaaatcctaaggaagaggaaatgtagttccacttcactgaatggaaatggatcaacataaacatcttcatcctcatggtctccatgttgagtaggctgaggaggaggaaggagaagaagggttggtcttgccgtctcagggtggcagaggtgaaggaaaatccacgcataagtgacctatgtagtgcaaagtcagctgtactttacaccacaaaacacttattaagaataggaattcaattgaactaggactcaaagggaaaaggacaagagaggactatagaaatatggaagggaatttggggaccaaaatcaacatcattgtaaggctaacatgtgaacagcaaagtactaacatagaaggctccagagaatcaaagaatgtagttcttaagatgaagaaattaaagcagctagacagaatgtaatgaatacataagacagactatgatgactatatctctgaactgggacatgaagatttaagcctattgagctagggtgggcacactttttctgtaaagggccagtgaataacttaggcttgagggccacactcgtgccacaactctaccactccagacaaaagcagccccaggccgggcacagtggctcacacctgtaatccctgcactttgggaggccgaggcgggtggatcacctgaggtcaggagtgtgaaaacagcctggccaatatggtgaaaccctgtctctactaaaaatacaaaaattagccgggcatggtggcaggcacctgtagtcccagctatttgggaggctgaggcgggagaatctcttgaaccctggaggcagaggttgcaatgagccaagattgtgccattgcactccagcctgggcaacaagagcaaaactccgtctcaaaaaaaaaaaaaaaagaagccccagaccacctggaatccaacgggtggggttcccagagaattttattataaacaccggcaatgggctgggtctgacctcagggccgtatttcaccaactctggttctagatttaaagagcccactaagtgcccagagatgtgatatggaaaaagcccaaactaagacacatcagcatgacatttcacgacatcaagaataaagaaaagcttctgagaaaaacacagttcacatacaaataagaacggcaccagacttctcagaaaagctggcagcgagaaaacaaagttgtgatgtgaacattgtcggtgacaatttccaagctagatttttacacccagccaggatatcaggtaaagccactagcagagacacaatgagtccaaaaattcaccccacgtagctcaggaagtcattaaaaaggtgtccatcccctgaaaccaaaacacaggagtaagctgaagagaacaagaaccgggtccgccatagcagggacagcaggcaggcggccgcgaaccagatccactccaccgggcggaggtttcagggatccaggtccctggaagctgggcaagggaaacccaaggctgtaagcagtcaaggccctgacccggcatgaacatcactgacagtcgtgatgtcagcacagatgactgagccaaatgccaatgtgaccagctatggggagacacagggaaacacaaggtaaacagaactcgggagtgtcaccacaagctgtcactcagaaacacagctctgccaccaggcggggcccctgaaccccttgtccctgcggagggagaagggtcaccagatggcccacttgggaggtgcccacctagagacgcctctgctctgatatggtgggctggcccccaggcctcccctggatgagtcgctgacccatccctgggtgttgagccaagccctcctctgggtgccctcccccgggtgctgggccctgggtgagcttcccctgggtgtccatcccaagtggaatctcctgggtgcctgaccctgagtgccagtcgctggcccacccacccttgagcttccaccccatcccggccctccccgggtgcccaccccccacgccctctgcaggccccgggcgcccgccctgtccctgggtgccggtccctggccactcccctgggtgcccgcccccgagcgccctcccagcacgcgctcacccgtacaagatgacgtcatagagcgtccggccctgcacgttcaggaagtgggcgtagcccgcgcgcgcagcaggcggggcccccgcggccgcaggactcggaagcggcagttcattggtcagcagccctagcaggaagggcgccgcgtcggggccacgcacgcgcagcagggtgcgcccgtccagccggaagcaggcccaggccgctccggccgttgggtcgccaccaggactgcaggagctgtgggccaggcggcaccttggggccgcgcgcagccgccagcgccagaccgggccgccgcgccccggagtggcgcctcgaagcagcgccgcggtcgccatcttggacaagagtggggcagcgggaagggcccaaggaagcgggaggggcgggtgccacagcggcccctggcggtggccgccggagggaggcgggaaggggcgggcgcagagtgcgtgcgtgaggggtgaacggaacgtgcgtgcctgaggggcggagcagcgccggttgaggccgactgagagtgcgtgcgtgaggagcagggcctcccgagctggaaggggcgggcggggcgagcgtgcctgctgggtgggtggggcatgcgtgtggggcggagcatcgtgcgcggggtgtgtttcggggcggggactcggcctatccgtcagcacgcaggctccaccctcggtaggtaacgaggtttctgccggcctcttaagcgccatcccatgtcccattcggtggccttcctcgttttcacccacccatgtcgggcaccgtcactcatctcgagaacctcttcatcctcccaacctgaaactccctgttaaacacccactcccgaggccctggagctcccattgtaccttctggctccatgagcgtgcctcctctagggacctcacaggagcagaatcctacgggatttgtcgtttgcgacggcttatttcactcagcatagtattctcaaagtccatccacggtctagcatgtatcagcattttatttttatttttatttttatttttattttttgtaaagacagggtcttggttatgttgcccaggctggcctcaagctccagagctcaggcagtcctccctcctcagcctcttgagtagctggaactacaggcgctagccaccacaccagctaatttttgtattttttttgtagaaatggtctccccatgttgtccaggctggtctcaaactcctaggctcaagcgattcaccggctttggcctcccaaagtgctgggattacaggcgtgagctaccgcacccggccgcttcctctttcctaccagttcgccagcgtccacgtgtggctgttgtgtcatttttttcatttgctggaccattgggacttcagctgcaggtggcaggaggctccatccccaagtgtctccacggataaggacaggcaccatccagcccacaacccctccgcacccctaatcagtgtgacatgatgagacacaatcacagcttcaaatcacatccttggtaacttctgcttttttcaggccagggtcacccccatcatgtgtctatagtcctcttcagtgcaggattccaagctcccctggagcccagcctgtcctcccacaggacgtccttccagaccacaggacgtccttccaataactctcgtcctctcttcacagctgaactcacagaggacaatttaggcaggaaccrcacactgctatgacatatccacsccaccgtgctttctcgaggagtgatgtcccataccccctgctgagcagccctgtacagtggccactttccctggtagtaggtgacacatctacaaggtggccccagcagccttcagccctagagtctgactgccctggtccaagccatccctgccttgctggcctcctggggcccatgcaccctgttgacattcccctctccactgccctccactcaaagcaccaaagaagacttactcaatgtgtccttatggtgcagagtcccagcaagcagaggtctttgtatctgttgaataaaaaaattcctcatgatgcgtagtaacatcagtgaggaagactgcaccaaggcgcatcatgtggtgtggggccctgcctggcggccttgggggagatggagctcaaccccaacacagcagggcagagggtggagaagccgaggagcagcgtggggtctgtgggtgggaatgactaaggagacatcagggctgaggggtctggctaaacccacctcacagggtccttgctctaggcaggcagggtgatcagacgtcaccaggtgatggtggaggatgagggacctggttggatgtcatcgagggtgagatatccagggtgtggggttctggctaaactgactcagtagggctcttactaaaactggattttccaagcaagtgcacagatgggcctaggagaaagttccagatcccagccggagtttggccaagcagaaagtctctgccatagctccctgccgtgtcctgagggcctgggccagcagccggcatgccttaggggctcaggtgacattgggcagtcagcgaattcccgcaggccctggatgtggccatggaggccctgccgttagcccactctcttcactgcagcttcctcatccctggagctcccgcttgcccttctggaccctcctcacagcatccccacctgccccaagccctgtgaggccccggaccctgcctacccaaccaggcgaggctccgggcatggtgaggagcctggagcaaatcagctgggtcccccaaggtccctgggcctcagtcccccgccagacgccagcttcctgactgagataggccaggcctagaatgcgctccctagccactggctgcagccgccaccccttcctctgccagagcctggcgttcctgagggtgacccggtaccccccgggcagtcccatgcggacagagcggaaggcaggcaggatgaaacccggggcagggagtggcgcagacaacacccacgggcgggggtcgagttcctctgggctcacgtcagcctggtcctcagccagaggaggaatttgcttccacccctgcacaggcagcaggaaaggcgtgcggcaacctggtgccccgggccgggcccactggctccgaatctgtcctgcctaggcccccccaccccaaagaagccaccaccaacaccaggggccacttcagttcgaatggactcaaaggaaacagagctttcagctccagagtcctgggggccacattccagtgcctgagccatgtgaggccgtaactccaggccacctccaagaagccttcctggactctacaccagccaccctggctgctgttctccttatcagcaggcaggggactggggcctggcacctgggggaggaaaccccgcccctgtcctggcttcagggaccaggctgaagcaggggccaggggagtgagaactggaaaatgcctgggcgtaggggtcgcagcccctgcttcccaggtactgtgggggggttgggggaaggtggtttcctgttattctcgcctcagggcttcctcccttcctagaggaaggagagtgccactgccctattctgagggagtctctgagcagctggcccctcaccccactatgcactcccatgagcagccgagagttttggctgaggttgtggaaacggatggaggtgagacatggagtcccatcccgccagcctgctccagcaccgcctgctctgggtgtgtcctgctgtgtacagggctgggcccaccagcgactggcccccctgccaacctgcctcagagctcggaagatgcaggacagaggagggaggggggctgtggtgtcagcagtgccaggctcagctcatcaccgtcgtggcctccccaggtggctggggaaaccaaggcaggggttttctaaaagtgactgatcaagcgccaggagtgcgagatgggtttagcttctgggggtccgcagactggagcaactaagataccacgtcccactgtagtgggagatgccaggcctgcgtggtggtgtggggctcaggcatgacattgtgggaacgtccagattatccaggacttggtcttagagggaggactagcagatggcgtggaggcttgggcttgcacagcctctcctggctagggccatcccgctgggagggtgtggtaacagagcctaagcccaccagcagatgctcacaaacctgatgtggcccacccacccccaaatgttcaagaagggaggtctgtcccagggtcccgtctccccttctcttgtggcaatccagcttcccactgggcatataccctctaataccagcagaattgtcccctcgaaactcctgtgctgaagccctaacctccaggaacttcagaatgtggctataattggagacaaagcctttaaagaggtgattaagttaaaatgagttcattggggtgggtcctaatccacggtggctggtgtccttaaaagaagaggagattaggacacagatgcacacagagggacagctgtgtgaggacacaggggggagatggcatccacgggccaaggagggaggctgcaggaggaaccagcctcgcccacaccttaatcttggccttcccttctaggactgtgagataatcagtgtctgttgtttaaggcacccagtggatgatgcggtgctatggcagtcccaacgggcacaccctccaagtttgagatcatttccagcttccctcgaagctggggtgccctttgaacagctctggctgggggatgtgtactagccagggttctccagagaaacaaaaccataggaaatatagacacagatactatatactatttttatatctatatctagatatatagccaaagactaaagtttcccaaagaagcagcagttctgcctccagtctgcctgtgatggctaattttatttattttgagacagggtgttgctctgtttcccaggctggagtgcagtggtgccatcacagctcactgcaacctcgacttccctagctcaagtgatcctcccaccccagcctcctgagtactgggaccacaggtgcatgccaccatgcccagctactttttaaattttttgtagacatggggtctgtgttgctcaggctcatcttgaactcctgggctcaagtgatgctcccatctcagcctcccaaagtgctgggatgacagacgtgagacagtgcttggcctgtgatggttcattttatgtgtccatttgactgggccacagggtgcccagatatggggtcacacattattctaggcgtgtctgtgagtgcatttccagatgacactaagacttgaatagatggactgaggaaagcagattggcctctgcaatgtggctggcctcgtctgatcaggtgaaggcctgaacagaaccaaaggtggaggaagggtgagccatgcacagttgcccagcatggctggacaccgcggcccccaccacagggacctggcctcccccgtgacggcaccgccagcagcacagccccaaacccttcctgtcttggagaggctcctggtgtgtccccactggagtggacacctgttggggttggtgtttgcttttcttccctgaggctgcactttcggcatttctgtccgtggctccctgagtcagggctcacatggggccagaggtcagccaggcaagccccagaaaggagagggactcagcttgcagttggcatctgcccggagctgggcttcggtgagactcagggctcagcctgggcttgagtcttggctgagggacaccacagagagaggggtgtgcagcccaggaggggcagccggccaggctgcaccaggcctaagggaggctggggggtagccagtcacccggagtgtgctccaggggctaatgagcccccctgcccctcgccaaagccacccctgcaggctctggccgacgtcctggtcatgacggggcctgagacagccgccctccatccactgagctgcggcccaacctgaggctctgagtgttttctttctttctcaccatcagtgcactccaccctgccccacccacccctgcccccggcacgctgcctggcaccgagcaggccccgagtgttgtctgacaagctacaggggctcgcctgtgaccatactcccctgccagtccctggggaggggtctcctctcccagccagcctggagctaagccatgtctccccatgtggtagccatgcacacacacccatgcatacacatataagcatacacccagacatgcacacaatgcacatacatgtgcatgcagtcacacacatagccacacgtgcacatgcatacacatgcacacacaaggttataaacaagttagttttattttactccctttcctcttgaggctgggtctgaattagggaggaggacagacaggccacaggcaggaacccagagccccattcccccagcatggccaagcccccaggccctgaccaccacccattgggtccaagctgcaaggcatatcaacatctctgcagaacttcaagcctcccagaggaacggaaggccggcatcgcagaagctcaaagagggtatggtcctgtccaccccaggctcccagctcccagtctgtctcagtttggggctgggaaggggagggctgaagaaggagccccatttgctgttgcagggaatggggacacgcacccccgcacccccaccaactgatgcccataccaggcaccctgggccctccatgggttgctgcagggaagcacaaaggggagagctggcatcccagaggacctattccagctcaggacaggggtggagtcaatgccccactccccctggggttcagaccacagcagagggccctttctggctcctaggcctctctccaccccaccttggccccagtggtgaccaagccagggcactcctctgccgctttcagccccttccctgagcagcctggctgcccctctgggcagagtctgcctgaggccaccggctaaggagaaggctgaggagaaggggtcgcaggtttccaccggagccccccaaccctcctcctccctggcccagctcgcaagccagcgccctcagatccacacggtggtcttcccgtccctgctgctggcactgcccttctcggagccagccctgggcttggctcctggccgctcgtgggtgccgggccggccctgctccccgacagtgcccgcagaggtagcactgcccgtccgggacgcgggggcgcctgctctggggggcccccgggaggccgcagggaggccgacgcacggcgaactgtcccggtcgcggtccccagccgctgccccgtcgcgcagcgcctgcagggccaggtttgccaggttctggtcatgcgcccgagcgcgctcggccgcccgcaccaccaggctgtagtcgggcgggcaggccaagccagcggccgccgcagggaaggcgcagggcgggggccgcggcgcgggggcgggggcggaggccggggggccgcggcggccgcgcaccgcgtcctgcgcgctgcccaagcccaggtgggccatctcacagaggttgagcagcaggcacaggcagctgaccacgtacataaccagcaggaagaccgtcttttcagtagggcgcgacacgaagcagtccaccacgtgcgggcagggctggcggctgcagggaaagaacggtcgcacctcgaagccgtacagcaggtactggcccaccaggaaggccacctcgaaagctgccctggccaccagctgggccacgtacacgcgcatcaggccctcccgctggatgcgcctccgcccatcgtgttgcccggtcgggcccggggtccctgccgccttgccgtcagcgccgaccgccttagtgcacgcctcctccgcgcctgcctcctccgcttcctcgccggcgccctcggctgcccccgtctcctcctcctcctcctcctcgcccaggcccagcatgggctcctcctcgcccaggtcggcgggctcaggccagccggcgtgcgggggcggcaggtgcgctcggggcgcgcggcgtggccccgggcggcggcggagggcgcggcgcc

SEQ ID NO: 96940 - DNA, 13420 bp, Homo sapiens
atgtgcttggaggcctgatcagcggggccgggggcggcggcggcggcggcggcggcggcggcggtggtggaggcggcggtggcggtggaacggccatgcgcatcctaggcggagtcatcagcgccatcaggtaaggcggagactatcagaggggcggggcctgggaatgggaggagcctcagtgaggcgtggtctgggaggggcgtggtctaaaaatagaataggattaacctggaggctaacctgggtacatgaattaggccggggaggcctggtttgagagttctgctgtaagggggtggaccccagtgaggcggatatcagtcattgggggcggtgcttgatatgggagtagtctgattgtgtgggaccaggacaatgtggtcctgaggggactgatgtggagttttggcgggtggggcttatgggtctgggctcagcctgcattggctaacctggagatgaacgttaaaggtgcggagccaatgcgtctgagtgacattttacggaaggggcttgacttatgagtgtggtcagaggttttaggtgggttaatgaggaggtgagcccaggaggaagcaagacctaatggggtagggtaaatggcccagaatgggctgggcttgctgggaactggctggattaatggagaaaaatgccctggtagggatagggcaggttggcttaattagccacggccacttagcagtgatcccttgaaggggcggggaccaatggctggggtaggatgttgggaagacgggcatttaggaagcgggccatggagtagggtcttgggcagatggcacctgaggaggataaggccttgggaagctggggcagagcctctatgaagtgagccctccaaggggcggggtcttttgattctacgtgggattttttaggtttagggtggccaagatgactgaaatctgccactgggtaggtgtgcctggcaggaggggagcctcccaggggaccggtctctgggtttcctcgagggtggggttggcctgaggaagggagaagaggggcacgaccagggcagtgtggattgggacagatgaggacaagaacaaatgaaaggcacagcaaccaagtaaggaagataacggctggggtctggagcgttggggctgatggttctgtagtgctgcccgttggaggccccgcccctggcactaacccctcccccttatctcttcgcagcgaggcggctgcgcagtacaacccggagcccccggtaagccccctctgcaaccagacccccttctcctgccaaggcctcttcgaggtcccatccctgttcctgtagagaagccccaccttcctccccttcttgtgaaattcctctgccagttcctcccatgccgtgtctgcagcttcgccatgggtcttagccatgccccacatacgtgcaccccattcactaccacccctcattcttttcctcatcaagctgcccagcccactctgacttccccacccagggtacctgggtttggggagccgtcctggccgggttcccctccccctgctctgagctctcctccctttgcagcccccacgcacacattactccaacattgaggccaacgagagtgaggaggtccggcagttccggagactctttgcccagctggctggagatgtaagtaacctggggtccctggccccgtcctaaccgttccatcccttcccttgtggctgcccttgcacacacacccttgaccatgacaatcccagtgttcccattctccatgacattctcagacccctttcagtcacccctgacctgcccctaacttccgcccgcaggacatggaggtcagcgccacagaactcatgaacattctcaataaggttgtgacacgacgtaagtgaccggggttaaggaatagggtagattcagaggcagaggggtcagagaggatttgacctctggcctctgactttcaacctgttacccacagaccctgatctgaagactgatggttttggcattgacacatgtcgcagcatggtggccgtgatggatgtatccttgggggcagtgtgggagaggccctgggtggacagagagttttttgagagtatgtttgggaagccaacatgtagctttcatatccacagatgtggaaatgcattcatcagaacacagtcacctgcagacatgtggcggtaaatcataacaatgccagctgtcacagctggcactttaattatataaagtgaccgaaccgtcataaccaccctgttggacaggcacaattattatattccattttacagaagaggaaactgaggctcagtttcctgaaagaagcagtcatttgtctcaagttatagataaaggtcaggcatggtggctcatgcctgtaatcccaacactttgggaggctaaggtgggcagatcacctgaggtcaggagtttgagaccagcctggccaacatggtgaaaccccatctctattaaaaatacaaaaattggccaggcacggtggctcacacctgtaatcccagcactttgggaggccgaggcgggcggatcacgagatcaggagattgagaccatcctggctaacacagtgaaaccctgtctctaccaaaaaaaaaaaaaaaattagccgggcgtagtggcgggcgcctgtagtcccagctattcgggaggctgaagcaggagaatggcgtgaacccgagaggaggagcttgcagtgagccgagatcgcgccactgcactccagcctgggcgacagagccagactctgtctcaaaaaataaaataaaaataaaaataaaaataggccgggcgccgtggctcacgcctgtaatcccagcactttgggaggccgaggcgggcggatcacgaggtcaggagatcgagaccatcctggctaacacggtgaaaccctgtctctactaaaaatacaaaaaaattagccgggtgcagtggtgagcgcctgtagtcccagctactcgggaggctgaggcaggagaatggcgtgaacctgggaggcggagctttgcagtgagccgagatcgcgccactgcactccagcctaggcgacagagagagactccgtctcaaaaaaaaaaaaaaagaaaaaaaaagaaaaataacaataacaaaaattagctgggcgtggtggtgcacgcctgtagtcccagctactcgggagtcccagctactcaagcaggagaattgcttgaacccgggaggcggaggttgcagtgagcagaggtttcgtcactgcactccagtctgtggactcaggtcttttgggcttgagaacccacgtttataacagccacatgcgcatatacacacacacacacctaagagcacacccacatacgtgaaggtgtatgaggcagtgtgcacagggacacacgtgttatctgtacatgggccagccattagctgatcttggatacatgcatatttttatttatttttgttttaaaaaatattttatagagaaaagctttcactatattgacctggcaagtctcaaactccagaccttaagcaatccttccgccttggcctcccaaagtgttgggattacaagcttgagacactgcgcctggcctcatgcacatttaacacatagggcaaacagacacatacataatatacatgtcatgtaatcacagacatattgcatagagcaaagcaatcccaactctacctcttaaccaggttattgaaccgctctgtgcctcagtttctctctctgtaaaatgggtgagtgataatggtgataccgaatcggaactacatccaaaaggtttagcacagtgtatagcgcatagtatgtggtctgtacacattagctcttaactatgatcttgggtagagttttcagctttgaatgttttcttctctggaaatagtcctggtagaactggtgtcccaaggatttagtgagaaagtgatgttcctgagtggacatcaggtggatcctgagttcaagcgatccacctgccttggcttcccaaagtgctgggattacaggcatgaaccaccatgcctggtcacacacttgtttttcacatatcctaacatttttatgaaattgagttactgtcaagaattttcttttctttctctttttttttttttttttttgagacagagtctcactctgtttcccaggctgaagtgcggtggtgccatcttggctcactgctaactccacctcctaggttcaagcagttctcctccctcagcctcctgaatagctgggattacaggtgtgcgctactacagctggccaatttttgtatttttagtagagacgggatttcatcatgttggccaggctggtctcgaactcctgacctcaagtgaaccgcctgcttcggcctcccaaagtgctggattgcaggcgggagccaccgtgcgtggcctattaagaattttctgaatgagcaattaacaactcttcaggcaaggaatttgtactttagagtagttgaatataattcctcatggttatgtttaaagagaatccctatttagaaatgtaagtgacaatatgtatggataaaatgaaaaataaaaccgcacaccaggtgatatgactaggaccaagcgggagctggagtttcagccctggctgccctgcttgctgtatcaccatcgtgtccacagtgcatgtgatgcatgcatctgggtgtagctgtcactcttcttaacaccctcccaccagagcgacaccacaggcaagctgggctttgaggaattcaagtacttgtggaacaacatcaaaaggtggcaggtgtgtagaaacctctgaaatccctggcacccagacccccaagccatggagacactatgccccacaatgctcacttggacccaatgtctctgtcctcacaggccatatacaaacagttcgacactgaccgatcagggaccatttgcagtagtgaactcccaggtgcctttgaggcagcaggtatggctggcagggacatgctggggctgggagtgggatgggtgagaaaacctctactcagctggtctgggcctgactcctgggcatgggagtgggttgggccatgtggcccccgcacctgaaggactacatccatcttagggttccacctgaatgagcatctctataacatgatcatccgacgctactcagatgaaagtgggaacatggattttgacaacttcatcagctgcttggtcaggctggacgccatgttccgtgagtgacaacccagctgtcttcctgggtggggattcctatgacctctatggaccaaggtctcctctaagcctgactttgaggtgggcgatgctaggggcacagtggtgattgaatcagttccagtttctgccctcatggagctcacagtctggtggaggagacacaagtccccagacagtgacagttcagactggtgatggctgggagaggggaagctcagggcagagtgatgggttgtgatgggggcagcacaggccgagggtctagggctctggtgaggggaagagtgagcagagcgtgctcagattgtgcttggggaagcctagagggcaaatccaatccaggaggaacctgatgcagcccaaggggtcagggagggctcactggagagggaacgttgagacctgaggggatgaggagagaacttagtgagaaggtagggaatactgttgcaggctgagggaacagcctgtgcaaaggcctagaagggaaagaagatggggcttctgatgctttttgttagatttctttctttctatttttttgagacagagtctgctgctcttgttgcccaggctggagtgcagtggcatgatcatggctgactgcagcctcaactcctaggctccagcagtcctcctgcctcagcttaccgaatacctgggagtacaggcacacaccgccatgcctggctaatttttaaaattttttgtagagacagggtcttgctatgttgcccaggctggtcttgaactcctgggctccagcaatcctcctacctcagcctcccaaagctttggtgttacaggcatgagccatygcatgtggccttctgagtgttagtgtactgaatgctgaagacatggctgggaagtggggattactgtccttattttgtgaaggaggaacttaggattcaaggaggcaaattttcatgctcatagtcacccagctaggaagttgtaaagccagaatttgaacttggatctatctgagatctgagctaagtaagagaaggtaggagcagtgagcatgattaggtcatgcaggattgtgggtgccaagtttgggggtgctcaaactctaccagagacattggggagccatggcaggttctaggcagagggaggacagggtcaggtttggctttagaaagatcccttggcctcggctgggcacggtggctcacgcctgtaatcccagcactttgggaggccgaggagggcggatcacgaggtcaggagttcgagaccatcctggctaacacagtgaaaccccatctctactaaaaatacaaaaaattagccaggtgtggtggcgggcgcctgtagtcccagctacttgggaggctgaggcgggagaatggcatgaacccaggaggcggagcttgcagtgagctgagatctgccactgcactccagcctgggtgacagatcgagactccgtcttaaaaaaaaaaaatcccttggcctccaggccgggtgcagtggcttatgcctgtaatcccagcactctgggaggctgaggtgggcgtaaaacctgaggtcaggagttcaagaccagcctggccaacatggcgaaaccccgcatctactaacgatacaaaagttagccaggcgtgggggcgtgtctgtagtcccagctactcaggaggtttasggagggagaattgcttgaacccaggaagcggaggttgcagtgagcagaggtcatgccattgcactccagcctccaacctgggtgacaagagcgagattccatctcaaaaaaaaaaaaagaaaaaaagatcccttggcctccagagagcccacaatgcatgaaaagtaacagaggaaaagaagcaggtatgtgagatagcagggaggtgaagggagtggacagacaaggttgatgccacaagtcacataagaggggccaggaaatagccactggatctaccagcaagaaggctgatagtcgggaggatcatttgagtccaggagtttgagaccagcctgggcaatgtagtaggactccatctctacaaaaaaaaaaaaatawatgtatatagacatagccgggcatggtggcacatgcctgtggtctcagttgctcgggaggctgaggtaggagaatcacttgagcccgggagggtgaggctgcagtgagctatgatcttgccactggactccagcctgggccacagagacaccgtctaaaaaaaaaaaaaaaagggctgggcatggtggctcactcctgtaatcccagcactttgggaggccgaggtgggcggatcacctgatgtcaggagtttgagaccagcctggccaacatagtgaaaccccgtctctactaaaaatacaaaaaaattagccaggcgtggtggtgcacgcctgtagtcccagctactcaggaggctgaggcaggagaatcacttgaacctgggaggcaaaggttgcagtgagccaagatcgtgccactgcactccagcctgggcaacagagtgggactctgtctcaaaaaaaaaaagaaagaaaggcagccagggtgtgcaggacgctgtgggtatggacacctgagggtggtggtaactgagcggagatagtgtagtcatcatgtctagattccctgtgggtggggaacatggagtcaagtttcagggcaggcgtggggacctacctgtaagactctaggggcaggaagtagagtgtgcagagcctccctctagtagcctgttaggcttagaactggagaggatggagcatagatgtcagtaggaggctggggctgggcagaggtgatatcagtacacagaggccattattgaggagggtaacagcttggattccaatcctgatttcttcactttcttgctatgtgacctggggcatggcccctcccttcctgcctcatttctttttttcctgtttttaatttttagtttttttaaaaagcagagatgaggtctctgttgcccaggttggtctcgaactcctgggcggctcaagtgatcctcccatcttggccttccaaagtgttgggattataggtgtgagccaccacgcccagcctgtgcctcattttaaaatgacacttatctcacagagttggattaaatcagccaatacctggaaagcactttaccccatgcttggcacacagtaaatactcagtgaagtgccagctgctatgattgtcatcccatgtatttgtgtaatgttattatgccaaaaaccagtctccttccttccctgccgccaaacctctgcatctcctcctccaggtgccttcaaatctcttgacaaagatggcactggacaaatccaggtgaacatccaggaggtaaggacccccatattggggtatgggtgcctgggaggaccccacccctcagcccttcataccagctctgagctgcagtccccttcctcctattttgccagccgtccctgggtgagggcaaaggggctggtgctcttggggttccctgtcctcactctccaccctcctctccccagtggctgcagctgactatgtattcctgaactggagccccagacccgccccctcactgccttgctataggagtcacctggagcctcggtctctcccagggccgatcctgtctgcagtcacatctttgtggggcctgctgacccacaagcttttgttctctcagtacttgttacccagcttctcaacatccagggcccaatttgccctgcctggagttccccctggctctaggacactctaacaagctctgtccacgggtctccccattcccaccaggccctgcacacacccactccgtaacctctcccctgtacctgtgccaagcctagcacttgtgatgcctccatgccccgagggccctctctcagttctgggaggatgactccagtccctgcacgccctggcacacccttcacggttgctacccaggcggccaagctccagaccgtgccagacccaggtgccccagtgcctttgtctatattctgctcccagcctgccaggcccaggaggaaataaacatgccccagttgctgatctctatgggatctgcctcctgatctgacccgagagaggaggggtggctcgggctctgggtcctggggagcaggggaggtagtagattcgtccccagggctggatccgtggatttcctcgtctttttctcgtcggcattttttgtctcatcctgagctgtggaggctgagacaggacccagaagccccagtgatctctgcttctgcttccagagtctgggctggagggaggtctcaatgccactcctggccctgtcccccaaggccatgtttgcccctcttgcagcttctccatccacacttggcctctgcctctgttgtgtcatggaccatgctcagtgtcttccttcccacttgaggacaccaccccacgtccccgggtcccgagggggagcctatgggtgctgtttggggtactcagcagagggctgagaggtagcaacatcctaggagtatccctggtccagcatgaggcaccgagggctgggggcagtgggcagtccacagggcagagatccctggctggtgggaggatgggcttggtggggaggggtggacacaaacacagacacacacagaggccagcgtttattgacacttgttcaagtctctcaggccccccaggcttcttggtcttaattcctggggaaggaggcccagccaagggagtacaagctgtagacagtgcctagaaaggggaagcgttggagacagaatgagacctaatcccctccctggacatcccaggcttttaaggccttcaggctccctggttcccagcctggaccccagctctagttcggactccagctcccttcccagattggactcctattgtaaagccccctggctttgatctagaccgggctgggagctttctccccgactcctccctgggcctcagccccaccactaacccagcccccgtcctgggacaagagcccaaaccctagttactcccctccctgcaggcctgactccagctcagtactcgacccccttcctaaacgccaacccccaacccagatcctggtcagtcctgcccagaaaccagccacctcctactctgggtccagccccgcctcccccgcagcccagacgggccctgcgctcaccgcccagacacagcgtcattgtcactcggtacaggatgttgtcaacgatgccgcccttcaggtacaacgggatgtcattgtcctcctggatgtgggggtgtctgatgagaaaggggtgctggctgctccttagagcgcgccccgcctgccccggctcggcgcgctcccggctggcgcgtcggatccccaccccccccgaccccccacctggaagagcttctgtttctcgcgcactcggttctgaaagcggttccgggcggtggagctgaaggagcggatcagcgcctgggacacctgcggggtgggaggtgggcgggtattggaggcacctggaggggtgtcctgaagtgggaccccgctctctgaggcctggacgtggggacagccccatccctagcgagcgtcccaaaggcgaggagggtaatagcttggattctgttacccgcgaactgccagctgggttgggaggggactcgccctggagtctggcctgggggtgaccgggctgcctagagggtcctggaagggagaggacccagaaggactttgttctggggggcctaagtcctgagatttttgttgggggagggtttcctggattaaagggaggaaaccaggtcccgggaacgtggggaccggaatggaggtccccgggagcgtccaggctgcctgagaaggcccgggtgaggccagtgttaagggttcccgagatgtcaagttcaaacccggggctttgggccggggtgggggtccccagttgtctccgaagagtggattgtgggggaagggacccaggctgtttagcggggagtcccaggccctgaaggtggctcacgttccaaggccctagatgcgggggcacttggagagtcgcgtattagggcggggttttctgggtggggggctccggcccagcccatgggggcctcacccgaagggcctgcattctgccttgtcctcttccgccggagtcacctcccttctccgcccaaggacacgcgtagtcctcctctgtccaggaaccccaggccccacccgctgcgcgcagcgtgacagctggggacgcggcggggctggggctggggctggggctgggttgcggggagtcctgctcctcggattcgtccaccacggaggaggcggtccagacccgcaccctgggccgcagcgcgcatccgtttcggtctcggaatttcgcttggtcccaccggagcccaaagcggtaccagggaatacatttttgcagatttttggagatttccgccgggggcaagtgcaactcctccccggatctctccctgcccgctggtatgtgagagtgaggaaacgcataaggccgtgttccaactccctgttctgtctacacagccagagattgcacctccgagcctgtttccgtatctgtaacgtgagggctaaggcaggatctttctcagagatttgttgagacattaaatgaccttgtttttaggaaacacaagctaaagtctttgggagtaaaacggtattttatgttaccctaagaaacacatcatatctatttatagctctctaattctggcagtcaacggggtgcagcacagttgtcctaatggttttagcaaccaggaaagatcctggcctagtctacaaggttttctttttcttttcttttttttcttttttttttagacagggttttgctctgttgcacaggctggagtgcagtggtgcggtcatagctcactgcagcctcgacctcctgggttcagcgatcctcctgcctcagcctcctgagtggctgggactacaggcgcccaccaccatgctcgaactaattttcgtattttttgtagaggctgggtttcaccatgttgcccaggctggtgtcgaactcctgagctcaagaaatttgccggcctcatcgtgagccacgcacccagccagcagacaatgtttgtttgtttgtttttgaggcagtgtcttgctatgttgcccagggtggtctccaactcctccaagtaatgttcctacctctatcacccaaagtgctagaattagaggcatgagccactatacccagcttgtaaaaggttttaacaatctcttttatttatttatttaatttatatttttagacagagtcttgctctgttgtacacgttggagtgcagtggtgtgatctcggctcactgaaaccttctgcctcctgggtttaggcaattcttgtacctcagcctcctgagcagctgggattacaggcacccgccaccacacccagctcatttttgtattttttagtagagatggggttacaccatgttggccaggctggtctcaagctcccaacctcaggtgatccgcccactttggccttccaaagtgctggaattacaggcctgagccaccgcttccagccacggtctcttttaaagagggcttttatgattattaaattcccctaacactttcaaactatgcttgtaaatttaatgttaggtttttccatttaagagccacaagtagggctgggcgtggtggctcacacctgtaatcccggcactttgggaggccaaggcaggtggatcacttgaggctgggagtttgagaccagcctggtcaacatgacaaaaccctgtctctactaaaaatactaaaattaaccaggtgtggtcatgggcgcctacaatcccagctgcttgtgaggctgaggcacaaaaatcgtttgaacccaagaggcacggaggctgcagtgagccaagattgcaccactgcactccagcttgggtgacagaacgagattctgtctcagaaaaaaaaaaaaaaaaagctgacttaccagataaacagatgactctttcttcaattcttaaataacttttatgaataaaaaattcataaactgtacataaacagatttcaagtaagtcttagtcaccagctgaattccacattttacaatggaattacaagattgacctgttatttgaataggccagtttaccttaaatattacaaattcttaaaataccaagtattcacagattctctaacacaaagttaataccat

SEQ ID NO: 96941 - DNA, 126872 bp, Homo sapiens
  misc_feature (1)...(126872): n = A,T,C or G
tatggagggtggtggaggagcaggaggccttggcaagatttgatggaggacagataggggtgtccgggaggggtctggcatcttcgggggcctaaaaagactgcttacatacaccaccttggatctttcagattgctaagagttttggggggtgtgtcggaagagggggtggtaaaagatgcgatgggatataggaagataacttctggattttagggggtcatattttgatttgcaaaaggagttttggcccttggattttgctttctgaggggtgtttttaaaaaatcaagtcctggacaggagaaaagggctgagggaaggcctggagttgggggtggggagaggcatgtttgtctcagcttaaacgtggctctctggggtgggcccgcctgccctggcctggtggatgggctgatggaggttgctgtgggggccggctcgggtcctcaggggccctggggagtgggaacagcactgggggttgaatacctggccccccaggtccagatggccctcttcctgggctctgctgctccccttccccctggtctccatttcctgcctttggcctccatcttgtggcaggcccagggcccagggcgacttccggcccccctctcccaaccatgttccggccccaccacctctggactgccaactcccaaccctgctggccttggccctctgtctctccttgcttttctcttgggttctgacccagggagaggaaggacggacacaggaagccttgggtccctgcccttgctgagacaggaggcagtgtgttggcccctccagtcattccctatttcttctgcctctgaccccaccctagggatcccctgagctgagttcctacagagggaagatggtccaatcttactacactgtgagctcatccccatggtccgtcgccttccagttgcctgctcagcccgtccctggttcctcccaaacgtttttgggggccatgtttgccttttaaggcttctctatccccccgctcctggaggtggtgctggggtcttcccagcactgctatgtgctctcttcctttcaacccaccccggtcctgctcccgccccagcagcacactgtggtttgtacggcactgtggccacgtccaaaccacactgtggtgttagagcgagggtgggggaggcaccgccgaggcttggccctgggaggccatcctggagaagtgacacaaaaaacatctggggccttgtgacaaacttcttgccaggtgggcaaggagagggtggggtatgtaagcacccctctaaaatctccagggcagtttcaagaatactgatggccagagaccctgggagtaagttctgcctcaagagaacaaagtggagtctttgttgcccacacccagcttccctggctctagcagcacagaaatattggcacagggaagcgagtctgccaatattggctgtgctgctccaggcagggtggtgaaaactaccgaggaggggctgagcccccatgggccgaggagagaagagggaacaggcctctcctgctaataatgttaagcagacagcacgaagctgagagggaaatctttattgttttctgtataaaaatgtccatcagatgaaggtcaaaggggttgggggcagatgcttatgcgggaatagcgaggtggcagccccagcagcctttcagccctctctcgtgcaggccttgctcggagtcccaggagatccacaggtccggcatgaacagtgagaggtcagaggtggaaggctcagcaggagaggagaggaggatcagcagaggtcatgagaaggccagaatccagggtcaggctgtctggaacaggaagtaaaatgggccgagatggagcgagcccccagtgtgcttccaaggccactcccacctccctgaaacaccctgctacgtactgatccaatgccctgcgctgtgtatgagagcaccttctcttctgaaacccctatacaagggaggggcccctgcggagaccgtgccctgccatccaggtgagccctttctccccaaccccgtcagctgtgtgggaggaggaggactcctaccctggtcgaagttgagtttcttagctggaggagtttctcctagcccttcaatatccaccacgtcactgttggcatcggagtcgttcagagcactgagtgtcacatctgggaagggggcataagctaggttctaggttcccctgacagcctctcccccagccccaagcttcccaaagctttgtgcctcctctcccctcccctctgcccctctctgggaacctccacagggacaggaagagagactgacccttctttgacccaggcccaattctctcactaaacctcagatgggacctttaacccctaggcagcaactccacagccctcaccagccttctgtttctttatggggggacccccggcctcagggacactggagctgctgggaggaggggcagctggaggaggtgacaagacaccagatgccaccttcttgggccctttcttgggtgactcagctggaagggggatgccagaatcttcatataccttgcgtttcacagtggcctttatctgggccctgaagaaaagagagaagaggttaggaaaggagtcatcagagagactaacagaagaggggacgggaggggaaggggttctgggagtcccttcataagaatccaggtcggggccccaacccattggtagggttctcactttctcgaagttttacactcactcaggatggatggagtgtggagagtggagtccctgaactgagtagtgggaaaggcccatctcctaattctcttctgggagagacatcaggtagagcttggtgatttacaggtggattgagatttactgatcaactagttcagggtcaccatatccctggaaacactgcagtggggtcctcaaacatttatataaataaccaggggacttccatcatcaaatacaataacagcatctcaggcaacctaaattcacattcttggaaggattaccacagcattttaggaacttctgaccaactgtgacaattctattctttcagtcctcaaggggattctaaaaaactagtgacaaagtagggaagcagctgagctggaaaggagttctgaggacgatggaaccttgggtaaggaggaagaaggctgcccacccgcccttttctggcagccaccctccctcacactgtccgttccttgatgacacagctgatgtgattaagatcgtccccaaatcgcttcacagcagccctcagcatctctatttccgtctccgtccacttcgcgctgtcagaaggggagaggggggatagcaaaaatgggagggggggtgtggagcccgcccacaggctatgcatcccacagccaaccagccgcctccttccgatttctgggaccccttccacggatgcataaagaggtcctccgtaaggggaggcggaaagctcttgaggccctgcgggaaccgggaggaccccaatcacaagaaatcacaaccacctccaccttagacacccctttccaccatcaacgttaaacggctgctgtacacagcacactgaaaccaactcgccaggaagggcttttcaaaacagacccaccaacacagcctgcagccgtctgggggaattccatgaactggggtggttgggagtggcggtggtttgtggtcgacccgttcgcagcagggagaactgtgaaacaggagtctgggctatgggcctgtctgtatttttatctgtcattcattccctcacccaacgatcatttattaacaccgactctgtgctgtgccacgcacaaagggaaactaatgtctgtccctgtgctagagagggtccgtgtctgtgaccgagtccaagcgcccgctctcagcgtccacgtcccagtccgggctcacgtaccccgcaggagaagagtcggccacgggatgcagctgcatcgtcagctccccgagcttcgtgaaggcggcgccggccgccgagaagatctctccgacctgggggcggggcagcgtcacggggggccggcgcccgccctccccgtcccgcccggagcccctagccccaccccaggctcggctcccgcccgccccccgcccggggcggaagagccgcgagccaagtggggggcccgccctcccgtggccgccagggagcgctgtccgcgagggaggtcgaacctttgtggacgctgacgtcatggccccgcgcgcctcctcacggagacgccgccgccgccgctacacgcgagccgggaccacggagagcagggagactgagcggctcgggcccccgcgcaggaagtcccgccctccccgcagcggataggctcaacccggcggctccccgccccatcagacgcagtcgcttagaccgctcggcgcgcccagtcgatggggaaagccttcgcctcacttccgcgccacacttcgctccacttccgctcagagatcgggactttccaggcagaggccgacctctagtctcagccccgtgctcgcccccactcaagcacagacacagggctgaagagagcagattctctttattgagatacgggacacagcgaagggtggagagacggaacagccccccagcctcagccctctccacgggggccggatgccagagatgggagaagggattcagtctctcgcccgggaaacccagtcccacagagggcgccggcaagggtgggacgcgacctgggtgacacggtgcagggagtctttaaatagaggaggggctggagcggggaaacgcgccggggccctagcgcaccatgtattccttgcgcttattgagccgaacttggcagaaagagaagcctccgaggaggaggtaaaggcctgcagcgatgaaacagttgtagctgacttgctcgtaaaggttgtatatgttctgggggccattcctgggggtgggaatgaagcaaaggggtcaaactttaataggagccaacattttctgagcactatgtgcccgacacctgtttaggcgctgttacgtgtattactttattcaatcttcttgaccatcctatggggtgagatctgtcatagccattttgcagaggtggactgagaagcacagaaaagtaaaatacctaaagaggtcacacctaaggtggtgggtttgggatggccgctgaggtctgactccctggctcctaaccacattctcaagaaagccgctctcctctccaagtcctctaacctaggggccctaagcaccgggcctcccagacgtaattctgaccctaggcctcgccacctcccacctgctcccagcccgcctcccccacccgaatacttactcaaaatctttctccgtgaagggaacgtcctcaatcaacacagcggaatggacattgaaaaatattccgagcattatctggaaaaggggaatgggtagactgttgaattcaggcacctgacctcatgttcacttcgtaaacccctcccatttccaatgttgctacaacacccgagcctgagattaaccaaaacgaggtggtggttactggattcggactcagccacctggaacagggcgtgaggtggtgacattgagacaagtggtcgaggcaagggtgggaatagtgaccaagccatctctcccaggaacccagattatcgtcctctctggaggcgtcatcatcacgggacagtgcggaagaggggagggagaaccggcacttcttcatatcatttcttcttgaagtggcggtgggtggattactgggaaaacaaggcccagctacacatttctggaacaagcactctcttttcctcccatgtcctccattcaactcaagcacctctcaggaaccccgctcttgtttctcctaccttgaggggtctccacctttaccagccctggctcctcccactccagggccctccgctccagttcccttttttctttttctttggggacggagtctcgctctgtcacccaggctggagtgcagtggcgcgatctcggctcactgcaccctccgcctcccggattcaagcgattctcctgcctcagcctcctgagtagctgggattacaggcgggcgccaccacgcccggctaatttttgtatttttattggagacggggtttcaccatgttggtcaggctggtctcgaacagttcccatttttcaatttcagtctgtctccttctccggggcctgtagatccccggcccctccggcctgcctgcggcccagagtttcctcgcctcccagccctcccagcccggagcccctcaggccctctccgatccttgccggggagtcccctcaccaacatgatcactccccaggcgctgaggacgatgccgcaggcggccagcttcggcccacagcacaggagcgacgccataaagaagggagtcggggatcgccgaggtgcaagcgggctcggaaagcggtgggagaaagcccaggatgccctcgcaggggggcagagggggcgtggccccggcctcaaccatcccatccgggggcggcaggcggaaaaggctgggctcctctcaggactttcgcgggagacggcgccgtctgaaaccaaaactgctcctggggaaaccttccttgacctctgtagctagggcgtgagtattggaagagcgagggcctccggtttgttggtccccctccccccgcacacgggaatggaaggagctggtatgtcacgtgaccaagcctgtcacgtcacgtgacgaggaactagccttagcgaggccatgggggaaaaagtctaactggcggaactcctgggaactggggcgatgggctcttagtatcggaggattggagccatctgatttttacctgaaattccttagtctctcctgtgttggggaaatggtaagtaagacagattttcaccaacagagagcgtttctatctcttctctactcctcccttttaaaattgagattctgacagygtaaaggagttaggacccccttttggggatcsggcatggttttgtggctttaaaatgctttaaaattgctgaagtttcttggtattggaactgtttctcctaagtaacattttatcatcgcacgtgaaatactgtaactctcggtgccaaatccaggaaaaatgggcggttaggagaagtccagggaaagccgactgagcaggttgtgaaggtaagcagtcctgttaaatgtacacaaaaatgtcactttgcttctctaaactaggaaaactgataggacttttgaataaggtaggatataagatttaaaaatataaataggtcatcccctccaaaaaagccgtttgtatgtttaactggtgagtgacagatctgtaataattayttagaaataggaatgtcgaggcgggcggatcacctgaggtcgggagttcgagaccagccaggtcaacatggcgaaaccctgtctctactaaaaattacaaaaattagctggatgtggtggcatgagcttgtgatcccagccactcgggatggtgaggcgggataatcccttgaacccgggaggcgaaggttgcagtgagctgagatggcgccactgcattcccgcctgggcgatagagactacttctaaaaaaaaaaaaaaaaagaaaagaaaagaagtagggatgtttgaagaacacagttttgcagtgagcaagttgtacccactctagtgaggacagtgacctcagaataattgagagggatcatttgaccttgagaccccaggacctaacaaataaacactatcattggctagaataactttgtagttcttgtccatttattttgtgcatgttgttcttaaaaggcttgtgaaagataacttggaatgtgggaaacacatagatcccagartattaaaggggctggaaaagtagccttaagacatgaattatgtgcctttcatctgggactgtttggagaaagaagccattttggggcagtggtttgtattctgccccaaaaacatgattcttattcagggacttttggggtacatgggtgaataggagaaatatgggtggaaggaatttgccaaagaactgagtcaggaatttgtacattggccaccaggcatgaaggttagttcctgggaatggagagttagctgaggtaagctgatttttctaagaaatccccctgctccatgatcttggatgttttggaagtagggtcagggcctcaggctagtgcagggttcaagggccaaatccagtctgtagcctggctgtgcatgtctcaaacaaagcacatttgtttgtggattttttttgcattttaaatggttgaataaaccaaaagaagactactttgtgatgtaacattcatatctcagtgtccataaagttttattggaacatagtcacactcatttccatgttgtctgtggctgccttcatgctgcagcaggagagctgagtagttgagacagtgactatgcggtctgcaaagcgtaaaaaaggatctagtctttgcagagaaagtttactgctcccctgggctagtgggatactaatgtagggggtttaactgggggaggaaatagagccttagcagcagagactttaggaaagcatgaaattcaagatagaaatgtcagtcctaaagctgatgtgaaatcttgcaggtagagtcactctagggctcagatggtgacactgttctctatrcagctgggcttcagatattcatagggccagtcaagttgctcattccgggctgtaatctccttttcyagcttttccaaatctgttcggaattggtttagcacagctttgggcttggggcctgagaaatatttttctttgtggtgccccagaggcacctgagacagaacaaaggatcagtcagtttctaaagacaaacgcacctagagcccagcccctcactctgatgtttcctttccaactgtcatttccctctcccgagagtcccctctcaccatgtctggctggcggcgactcaratgccatgagatggccatttgaagacaggcctgccggacatcaggtagtgaccccatcactgtggccatcgtcacatcttccttggtggtgggtgggggcatccgcattgtgcatggagcattagggacccaggcataccagtccagctggaggaagaaactgtaaccctagaaccctggtacttagggtttgaactcccatctctccctcaggtcaccttgccttcagggacctgggctttcagctgtccatacctggccctggttgatggcggcatgctgggcagtgcacgtgaagacgcacatggtgaggaaatggcagagttgactctgggactggaaggagacagggaaacctgggcaggaaaggaatagcagttagaagctacagcataagaggagaggaacaaaggctgttgttttgggatgcccatattttagaattgatgaatttgtttattttatttagacgtatttgcatcagacatgcgtttaagtcctggctcagtcacttacacttagttaccataggccagcttaacctatttgaacctcagtttttttcacctgtaaaatatggacgatacctacattataaatgagatgatgtatcaaaatcacctggtctgtaataaatgctcaataagtaagtaataattattgttatggaaggattgggggctgaaaagttctgagtgaccaaatatcccttgcctcaaaaagtggttaagaattgagggatgcggccgggcgcggtggctcacgcctgtagtcccagcacttggggaggccaagatgggcggatcacgaggtcaggagatcgagaccatcctggctaacacggtgaaaccccstctctactaaaaatacgaaaagttagccaggtgtggtggcgggcacctgtagtcccaggtactcgggaggctgaggcaggagaatggcgtgaacccgggaggcagagcttgcagcgagctgagatcccgccactgcactccagcctgggcgacacaacgagagtctgtctcaaaaaaaaaaaaaaaccaattgagggatgcgtggtcggtgactcatgcctgtaatcccagcactttgggaggccaaggcaggaggattgctggtagtcaggtgacagagcaagagcctgtctctatttaaaaattaaaaaataaataaataatttaggaatgcgtaatcctattcccrgacagaattacaagtgtctgcgttataatgtggggaataagtcatggatttccagtgtcacagctgagaggggctcccacaaaggttatctcagtccactcattttgcagtggatatgggggctcagagacccgataatcttttttttttttttgagacggagtcttgctctgttgcccaggctggagtgcagtggcacaatctcggctcactgtaacctccgcctctcaggttcaagtgattctcctgcctcagcctcccaagtagctgggattacaggctcccaccaccatgcccagctaatttttgtatttttagtagagatggagtttcaccgtgttggctaggctggtctggaactcctggcctcaggtgatctgcccaccttggcctcctaaagtgctgggagacccaataatcttatcagttaagtggaataaatataattactctcattttataggtaagaaaatcaaagcccatagagaataaactgtcaggactgcatagttgggaaaaggcagaggctgatcttgaactcaggttcctgactgctaatcccatggcatttttaattttagcctctaaaatgtctgctgggaaaactagacaaaagtgagctatgagaactgaaagagaacaggggggagggtggttagtggaggttaaagttaacatgtgtcatgaactgaatgtctttggctccgaaaaatttttatattgaaatctaatcctattgtgatggtatttggaggtggagccccacatgataattagggtgtgagggtgcagccctcctgaatgggtttgatacctttatgagcagaggacagagtgctagcttgctatctttctgctgtgtgaggatacagggagaaatcggctgtgggcagcctggaagaggggtctcaccagaacctgatcttgaactttcagcctccagaactgtgaggaatacatttctgttgtttataagccacccagtctatggtgtgtggttttttttattttatttttttgagacggagtttcgctctgttgcccaggctggagtgcaatggcgtgatctcagctcactgcaacctccgcctcccaagttcaagcgattctcctgcctcagcctcccgagtagctgggattacaggtgcgtgccacgacgcctggctaatttttgtatttttagtagagacgggtttcactatgttggccaggctggtctcgaactcctgasctcgtgatccacccacctcagcctcccaaagtgctgggattacaagcgtgagccactgtgcccagctagtgttttgttgtagtagcccaaactgctaggagcctaagggactgtactgagaagaactagagagagtttggtcctggaagggtagggtggtgcagattccccagggagaggctccctccagggtaaggaggtttgccacattcccaggattcgccataagggctccccagtaaatgtctgtagttgtctcacagaggcagaggatggtattcacagcctagatctgaagtgtgagggggaggggccgaaggatgagtgacagcagtccaggctggtgcctgtgtgattaaacctaagagctcagcaaaggctttttcttcctcagaggttcaaatgtggggagtgagagttgactaaaggtagtggctagattttggccaaggggtggttagggtggaagagttggattagccaaagaaacctgagccccaaggatcagggtgctgagtttgggtttgaggcaaagcatgtataggattgagcttgcatcaagagctgaccttgcactgtagcaagcgtgcggtattcctggaccctctgtgcgtgctgcacagtggcaggcaggaagagagggagggaaagccagggtgggtccttgtgggcttcggagggaaaatcttcccatttacatcctcagttaggaaaacggaaccatcaggagagaatatgagcccagcagggactgtgcagacccctcccagctgtggatatggcctggggggccccaggatatggcagttcaggggcatctgtgactggggtgtagtgggactaggggttgatggccagggtctctgaggaggacagtycttgggtctctagaattgtcctgagtcggaggaggtgggaatgggatacacatgctttcccgtgtggagggaggaagggaggcgtgatgagaggctggggtcctgtccccagaagggcagggctgggaaggcgccctggsagagtctcccaggagcttcttctgtctctagaatggatcttacctcggtcctgggcctggcacagccccacctccgtgatctcccgacaccaggcctgcagctcagggtcccccttcactatgtcatccctytggtagaagaggtggacgatcccctccacatacctgcccagggggaaaaggcacttgagggcagaaagcccccgcctctgacctctattcctctttctgtggcatctgcccaatgcttccacagtatctgggaagacacctcgcctttgggacatcctcagccctctaaacacactagcatctcatggaagatgtgggtccttagttctaggaattcgcatggttgctgtcatacatcgtcagaaaatcctgatttttccagacacctcccccagtctccccccacagctcccctcacctcctctctctgcctcatcccagtctcctcattttcagagccacccactgtgtcctcacttttcctcatctctccccaggattgagttctctgcttctcctttctggaccttcttgcttttgccccatgctggcctcaggccagagcccccccscccccsrccccaccatttctcagctcctccttactcacctggcaatgatctcccagagccgtaaagcatcatgggcatagagagcacctgggagtcccagcaggccccggtcagccaggtcgtcaggaggacagagggagcagtaggtcagctgagctgccgcccgacggagcaactgtacatggccccctccacctgtgctcactgcctgggacaggagatcacaggtcttagagggggaaacagggctggagaaccaacacatcttccataaagtggggcaaatgtgggattttcagatattaagacatgggtatacagcactttgggaggctgaggtgggtggatcatgaggtcaggagttcgagaccagtctggccaacacagtgaaaccccatctctactaaaaatataaaaattagctgggcatggtggcgggcgcctgtaatcccagctactcgggaggctgaggcaggagaatcgcttgaacccaggaggcggagatggcagtgagccgagatggcgccactgcactccaacctgggcgacagagctagactctgtctcaaaaaaaaaaaaaaaaaaaaaaaaagacatgggtataaaagggacaggttcataggttaagagtgaggacattcacacatagttgatcttggatcctgaaagtggcagatcatggagrgatggatgaggcagtcccatgccccgtaccctcctcaccttatcaaaaattcctccatctgagatgagttgggtccgggcccgggtgttgatttccatggtgtagcggatatgggggatcaggaactggagaggaggagattggagggcgtgactggtggaggccatgcttgggtccttcctggtagggcctggcacccagcatggcgccttctcctcttgatgctttcctttacaggctgatctcctgctgttctgatcactcactcttgtgctctccaacttccctgtgagttgggccctggagccagactgaccaggattttaacctacactttactcctcatttgagacttggccaagttaataaccttttaatctgcaatctcttcatttgtcaacagggggcagcaatagactctcttatctcaggggctgtggtgatgctcacctaagtgatgttggagagtgtctattacacataagagtcctggaatagtagctgtctgcttcattgtttctaccttgagtataggtgccttatgaatcagccctttctgattttctttgctacctcctctgtcattcacatcctcttaaactagcctctctgcttatgatcaaagctgcatctccatcttttagttgtttcacagttgggggtttctttaggggatggatggggagaatactttctgtcagaactagaagagctatattcagctacctgtttaagcaaatctttctccacccctacttaagcactgttgggcccctcttctcctgcttttccttagctattgaaaaaaggccatggtctttttttaatattaaaatattttccttagctattaaaatttaatattaaatttaaattaatttaatattaaatatttaattttaaattaaaattttaatttaatattaaaataaaaatattaaaatttaatttaatattgaagcaaaattaaaattaaattaattaatttaattaaattaaattaaattaaattaaattaaaaatattaaattaaattaaattaaattaatattaaaattaaaaatattaaaatttaatttaatattaaattaattaaattaagttaaattaatattaaattaaattaagttaaattaatattaaattaaattaatttaatattaaaattaaaaatttaaatgtttatttaaaattaaatttaaattttaaatttaaatttatttaaattttaattatttatttaaaattaaaatttattaaattaaaaatattaaaatattttccttagctattaaaaaaaggcatggtccttacatgcgtttctttttatcttagactgtttgtcttcctttccacatagttaacatgcaggtttcaagcagttttggtgcttgtctgaattgttgatgctggacactggcaatgaccccaatgacacctttggtgttaagataccaaagcagctcacattaacctgaagcttttcagaagattcatgaaagatgccaaatgtcacggaaaggccaaagtccacatgaggagaaaggatgcctaaggataaacagtccytaataataataattgcaagaactagctgggtgtggcggcatgtgcctgcaatccaggttacttgggagrctgaggcaggaggatcgcttgagcccaggaatttgagactagcttgggccacatagygaaaccctgtctctacaaaaaataaaaaaaattagccaggcatggtggtgcacacctgtagtcccagctactctgaaggctgaggttagaggatcgcttcagcccaggagtttgaagctgcagtgagttatgattacgccactggactccagcctgggtgacagagtgagaacttgtctctgaaaaaaaaaaatttgcaagaactaatgttttttgtagcatttagcttgtgtcacaccattaagtcattttaacctttaataacctcacgatggaacatgtgaggacatctggaaattattgaggccggggttcaggactaagaccccagcaatccaaagtcagagcctgcataggccactgttaagacatstgcaggcttgacccttgtgtgcatctgccagcaactcagctgtccgctggggcatggcattactgtggtgagtggagacacggagaggactgaactaggaaamggaattgtaagtgtgaatagaggctkcacttgttcgtgtggagcagaggatggggaagcaggagacagcatgagatgaatgaaatccaagattccattcatcagactggtctccatcttgtctatgttaccgaaggggaaaattccagaggcggcacagctatactggccaggcttggggggtcttggtggaggcccccagctgaaacacaatttggttgtttttacccaggacatacttgcatatcttgccaatacatcaaactccatgtacctaaaaccaaacacctcatttttgctgactctggtttcttctaactttactgtttctgacaattactctggtttgtaagcttgtatcatttttgtgctccctctgccaagttccctgtatataaagtatcatcaagattttaagaacattttcttaagcaagcacaggtcttattttgccttctcccagcaatatatatggaactcactgttttataaaattacagtatttctttctttctttctttttatttagagaccgggacttgctgtgttgcccaggctggtcttgaactcctggtcttaagcaatcatactgctttggccacccaaagcactgggattacaggcgtgaaccaccacacccagctcttaaaaccacagtatttctaggtcagtataacacacctgccccagggacttacaggtgtggcagaagcttggacttctggcttttctctctcttgcacccaggcacgctgcagctaccatttcctcccttcactacgttttagattctttccttttcattcctgtcattaccatgctaacrtacatctctatccaccttrctgttgggcaggtatgagcggcttgctggctgttcttccttgccttttggtctgtttctacttagctgactcctcaattgggtagaaacattcttcatcaatactatactgttataggctgtcccttgtgatttcaaactctagtaccagatactgttctctggttggttcttatgggcatcacttgtttttytggctaaatactagatctaaggtaggaatatggcttttkttttactagcagtgttcaagccctactgtgagcgcactgctagactgtcagatctctgagaatttcagaggattcctatataatgttaagtgactaaacttaataaacttaattaaaatcaacatctcaagatattgagacagtctcctcttcactcacaaattgctacaaagagtttttgctgctgcartatcttttgatatggggctgttcctctctctggggtctgagggatatgtgatttaatagattaataagtaccttgaagatggggtgcagtcctgggaggcaccgcatggtggcgacagcgatgacctcagccaccaggtgmgtgttcagcaagtgatactggatctcgtgcagttggaaatctgaatttcggacccaggactttgccaggagccaggcaagtggggggtctgagggcaggaacagtgttggggttggagagctggggytgggaggctgaatctgggagaaagagaaattattgaactcccattccgtatatgacattatagtcagcattcttggggaaacagagatgactaagtaagattattgccttctaggaggttatagtctagcaggaggactgtgaaccctcccagcctgccgctcgctagctggagtgccctgatgtcaggtggaaggcaggagggactggaagaagggggtccagaaggaggccctaacagtggtgtgggagaaacctgctgctttggggtcggcgctcagatggtggtggaatgtgaaggagaagtaggaggtgtaagattattgacagttcttgtcacctgactgttaagaatagtgagagaaggccaggtgcagtggctcacascygtaatcccagcactttgggaggccgaggcaggcagattacttgagcccagaagttcaagaccagcctgggcaatatggcgaaaccccatctctacaaaaaatacaaaaattagccaggcccacatggtggcacatgcctgtggtcccagctactggagggactgaggtgggagaattgcttgaacccaggaggcgcaggttgcagtgagccaagatcacacaactgtattccagcctgagtgacacagtgagattctgtctcaaaaaaaaaaaagaaattgcragaaaagatattcaagagatggcgagggttcagagccagaggccactgagagatgagatagtgattctgaaagtgtagtcctgaactggtagtgtcagcatcactttggaacttataaaaacgcaaactcttagttcccaccccagacatactgaatcagaaagtctggtcatgggatccagaaatctgcatttcaacaggcattcaggtgattctgatgcacactgaagtgtgaggaccattggatacaggatgagaactccargaggccattttgactcttgaaaaagtaattctagttggatgaggcaggggagaygagggtacaggcaaatagtgacatgaagacaagtctcactgagtgaggatggggtttgggagccaagagctgggggttgggtccctgggagcagaggttgaggtgaacagagtgcaacgttgtgggagaggtctggggcccttacctggatgaccatgggctgcagcttcccattgggctccatcttcagcataacgaggggggcagccaggtattgcttctctcctcggatcacgttggctggaattccatccagaaggatgaagtcagcttcaaacagggaaccattctggggacaggagggatgtatccatttttagagttcaaagtctacccccagggggccggggcaaagggcaagagatttagtctagcttcttgccattctcctgcatcagtaccggagycctgttgggagaactagagcccctggtccagttcctctcatcttaaagtgaagaaacagtctggtgagggtagatgtcttgtgtgtggatgtggtggcagatctgggtttggaaccaggcctgctcaatccagttggcatcacaggcattgtaaactgaccacctgtcaaatggccaggcccctttctgatcattcccgaatggtctgcgctctggttttggctcctatcagctcagcaaatgctctttcattccctattcaaatctcacrtcctctgccaaatattccagagagcttcccctactacccctgccaccgcatacagcacacacatgcatacgcacacattttgcctaggcttgtcctcagtacagtccattgcttccaaaccccgctctctttttctagaaagcctccccgattctccccacctgatggcacttcctcacttttctccctgcccatgaacactggagtccagaacactgcggccaggcaatgtcactgttcctgctaacatctccagcccctctctgtgtgctggggatccattctattttccccttcctgctgggagctcctcatagtttcttcccctacatattttatttctgtatttttccagcacaggactgcaccaaggggcaaygcagtactgcagccttcctctgactcagtttggattctctctgtccgttctcaccacactactaaggagagaacagtgccaggcaggggaaggagaggtacctgaagttctttctccagttgagccygaagctcttccatcccygagggcagcactagcctggagggcagagaggtcgagcgtctcaacagcatggggttggcaccattgaggaactggtagctgaacaactcatcatcctgccagcactggcgaaccttctctttggtgggyggtgaaaggaggatatatgtaccacagcctgcatatcccttctccaaaatctaccccaggggttcaggtatataaccctccctgaacccagcttctgcgttttcattctcaaggcctctctgagttgaccagatatgataaggtctcttcttgcraagagttacgggggactgtggagtgtgatgagtcatccagasgggccattaagggattatggagacctcggggaaccactgaccagccagggcactcttctggccccagaagatctgatcaaagtcttctaggcagttccaggagctcaggagggtgtaaacaygtttgagggccatctccagagccctaggacaggtattgaggcttaactcatcagctgatccctcagtccctcaccgtctatcatcattcttggccctcccagcccttatttcactycgaggtctagcctttttctcaccctgccttcagtgtccattcaaagtccagcctcttctcctcatggaatctcatatttggaggtagatcatccttacggtctgcagcgatggtcaggggtaacccttccttccaggtggcccagctaggagttggggacaaagcttcaggaaggatgtcatggtcagtgatggggccaggggcaggggcaggggcagggaaggggtgggacagtggtggcggggttagtttaaggggtgggtggtcaccagtagatctgctgtctgtctttcagttccttctctcgatgcttctggaacatgtccaaagcattgtctcctggcaggcgggctggggagacatcaagacaattggcctcacggctctgtctggtcctatgcccgcctcttgtcctcatctccctgtggttagccgtattccatgttttcagccatgcactgttgcttttatctctggctttgcctcatttgattatccaccagacaygtttatcccatctttgccaactttgcactcctgctttctcttatttcagccctcatcctttgcctgtagataaaaacctcctgtttgccaccatttcttgctccttcactcatcttcccctacctggccttacttcatcaatatctatggttggaaaaaaatcaccttaattaaggtgatgaaatcttagtcacctatacacctacacctactgtctactacagattgctttgattaatttcacatcttaaacctcacctgccacgccttcacctgtcctcaaaagattctacatttgcttttttttttttaaacctcatctttctggatttactatcataatctgtatctatggacttattctgggtcttttctgcatttacactcacctgtctcaaagtcatagatttgatgttccatccctactgccctcactcatctctggattcatctctcttttactcattacccatggttaaaaattcactatttgggccgggcgtggtggctcaagcctgtaatcccagcactttgagaggccaaggagggcrgatcacgaggtcaggagatcgagaccatcctggctaatacggtgaaactccatctctactaaaaaaaatataaaaaattagccgggtgtggtggggggtgcctgtagtcccagctactcgggaggctgaggcaggagaatggcgtgaacccaggaggtggaggttgcagtgagccaagatsgcrccactgcactccagcctgggcaacaragcaagactccatctcaaaaaaaaaaaaaaaaaaattcactatttgccatcctcattcctcctcrtctcctgcgggccagtgtgcttcttgtctttcacgggtgtcttccgtgttattccaaccaaaccagctctccagcatcctatgttttcttcccttagctgtstgctctcacgggtcacccaccccctcctgttccatgtggtcccctcacctgacttctgagtcacctttacatctccttcctactttcactttgcttctctgttttcctggatcgctgcaactcccactttctgtctttgccttcttggaagatgggatctccagatcacttactccctgcctccagcctcacacgcagcctctcttagcctgtgtaaaactttgggaattcataactccttcccgttttctgtccagcaccctgggatccctacatttcacctgccctgggcccatacmtcctctaagtctgctccgaccgtccttaactctgccctcctagccccgcagcagttcccgrgaccttgtgcctccttccccracgccgcctgctcaccggtgccctcgggcaggctcaggatgtcctcgccctgcacccagcggtagcacgggaaggccacctccgcgcaggctccagggccctgcaccgtgatgcggtcgcagaaccacgcgtcgtccaccagccagtggtgcttgcgcagcctcacgaactgcaggagccccaagtcctctgcaacgtcatgatcaaactcctcctcctgtgcaggccggacccaggccagacttagtaggagggacccractgaggccgtttcgaggacagagcygcgctcctgtgcaacctcagtttctcagggcctccaaagacagcatcgcctcgttcccgcccccgcacaacctgctctttgggtctcagacgcccggagtcgggtggaggacgagggcccgcagcgcctggagctgatgctggagcagcatcgcccacgtgggtcccattaactgagctctccccgcgccggttcttggaggagcttcacgtctgacctctggcctcatacttacattggctctgggtcactgggagaaggagctgggggctgccgggaccaggggcgggaaagggagatggggttgagcccagcccgggatcccagctgcggaccctgtccctratcttgcccacctcgtcccagcttcgtggaagtcccagtccgcgaggtcgcgctgtcacctcgcccccagcctcccgccctcccgccgcgagcccagctcgrcccgggcctgggcccggggtccccgctgccctagctcccctcgctccccgcgctgacctcgccccgcgcsggccgcagctgcagctccagctccgcctccccgcgcgtcccgaccagccaaagctgcacgcggttgtacgacccggagaagagccaggccccggtggccacgcggatgcggtagcggcccatggcgccccccagcagcttaggcgaggggagccgggtcctgtgcgattcccgggaccgcccagggctgccggcgcctcggggccacttccaacctttaaaggaccggtctgcggccccgccctcctcgcaagttttaggcgctcccaagtccccgccccagactagcccaaacctgcgagcagagcggtagagccggctgtggggactggctgtgcytcctggtcggagcgtagctgcaggatgataaaggggcccgagccagggtgaggccaacggggtgggtgcggcgggaccttcctggacctcccgggaaggcggratcgaggtgggyctgagcccccgggttggagcgaacatagatgagaacacttcccgaggtctccaggtcttctgkggagccaggaggaagtaggggatgagtccatcttccaaacggaggggaaggtctccgcttttctgggctgggacccggggaaggcagtgggccggcttctggaaggtcggcctgggaggccgtgctggggtctggggatgtcccgyggctagacccggcgcggcccatgtgtcctccagtacctgagctctgccgcccttgaacgctgtgcttccgtcaacgaccaggggttccccagggtacctagaacctggaaatgtagcagctcaacacccgctccccaccccgtttcaaatatctgggcgctggggtcccaatgtacaccaaatatcatgggccagacctttgagagaggcctgaggcagggcagtgaaaaactcattttgtccaacctccgaagcgggtacagacaatgttagggacccaggaacaccagtcggggtgttagggtgcgggatggaattgcttagggacctggcctacgtggccagttcccaagaactttgtcttttccaggtgagtgcagccccttccgctccagtaggttccagattaattttttatccccaagctctttcctgctccttcatgggtctcaggtctcctggaaatccaggaacagcaattagcccactgctatttagggcctttgtaaacattgaaggatgattcggagcttaggctttctctcccgtgtcaggaatcagtcagatgaagcctgctgcacgcgtccctgtctagatcttgattcaagtgattatatgcatttggatctccgtggatgcatctggtggcctgggctaggccagtgtaagttaaatctgctttcttgagccagtcctcagaaatgacttggtggcctagttgttggtrgaggtaagtgagtgggagttttagccccgccttccagcctccagatcagactctatctcaaaaataaataaataaataaataaaaataaaaaaataaagtgtctgtcccttactggattcaattccctttcttatcttctaggtccactctggcctacatcctctgctcaggactgcaggtcggccatttgctggtccccagttcttccagttttctggggtcaccccattctgtaatatccaaataaaatggctcaaattcccatcctgcctaatagtaggatctggcctttccacacacattttcgtgggttacttttgcctagaaaagagtttgtctcatacctacttccaaaagcactgtttctttgctgttttgtgacttattttctgcccactctagtgtactctacggccacgtgcagagagagggaatgaataattgaaaaaccggattcaagctactgcgcatgctaaatgagtgaatatggctaaacagtgagaacagtgcttggcgtgtagtccctctatgtattagctgctatgattgtattatttacaactgaatgttagcgttgctcctctaccgttcctctccgcatgctatttctccatgtccctctctaggcctagcctctcactagagctcttatcactctagacccttccccctcctgcttttgtttcccttttaagcacatgcgctatgttgggagaatataattagaagcaaaattttctcccaacccagaaaaaacctctccacgaaagtagtgaagaaagaaaacagttttattattgaataagcattaaaccagaatgtgagcacatcacaggcagtttgctaagagactgcaaagacagaaggaagtctcacttttatctagccaagcagatacagcccattacatatgtgttctcaagataaactataaataatctttaggaggactcgatagcaccatttgtcacatatagtgcagtctagagacacctggcaattgtgatgaccatctatgttagctaactggcttaatcagaagaaaaacttctcttttttttttgagatagagtcttgctctgttgcccaggctagagtgcagtggcgtgatctcggctcactgcaacctccacctcccaggttcaagcgattctcttgcctcagcttcctgagtagctgggattacaggtgtgcaccaccaagcctggctagtttttgtatttttagtagagacgaggttttgccatgttggccaggctggtcttaaactcctgacctcagatgatccacccacctcggcttcccaaagtgctgggattacaggcgtgagccaccatgcccagccagcttttcagatttttatgacagcagatagttttgcagctcaagcaaagtgtccatttaagttagtcctaccctcccacagaaactgggaaatgaaggctccatctttcttggtgtttacatttcaaggagatggctcctgggtctttgtgaaagacatccctgggtagtaaagctggcaagaggctgtgtggcttctaaaaatatttatacacgttttgaagacacagaaaataacttacaagttttctggctgggtgcggtggctcacgcctgtaatccccgcactttgggaggctgaggtgggtggatcacctgaggtcaggagtttgagaccagtctggccaacatggggaaaccccatctctactaaaaatacaaaaaattagccaggcgtggtagaggatgcctgtaatcccacctacttgggaggctgaggcaggagaattgcttgaacccgggaggcggaggttgcsgtgagctgagattgtgccactgtactccagcctgggcaacaagagtgagactttgtctcaaaaaaaaaaaaaaaattttacaagttttctaaagcaaattttctaagaaaagagagggtggagaagtctcttcccttactttcaacatggagaactaagcctttaattttttttttttttgagatagagtcttgctctgttgcctagacgggagtgcaatggcgctaccttggctcactgcaatctccacatcctaggttcaagcgattctcctgtctcagtctcctgagtagctgggattacaggcacgcaccaccatgcctggctaatttttgtatttttggtagagatggggttttaccatgttggccaggctggtctcgaactcctgacctcaggtrattcccgccccccttggcctcccaaagttctgagattacaggcgtgagccaccgcgcctggccagtgttttgttatagtagcccaaactgactagcagccttttgttttgttttgtttttagacagggtctcactctgtcacccagactggagtgcaaaggcgccatcacggctcactgcagccttgatctcccaggttcaggtgattgattatactgcctcagcctccccagtagctgggactacaggcccgtgccaacatgccygactaatttttgtattttttgtagagatggggttttgccatgttgcccaagctggtctcaaactcttgggctcaagtgatccgctggccttggcctccctcccaaagtgctgggattacaggggtgagccactgcacctggccattttatttttaaattttgatttgtccctaacaactaccattttgttcttatgtatgccacaggaaggatcaggggcttgattttgtcagcaccctttgcagtaggaaaggccacgtgggcacacgtgtatgccaaatgtaaatcttctttcaaactcccgattccctgctgtctgtgccagtagccaagccaactcccacattcccattacctctctttgcagaacaatttaccttckgtgtgtgttttttttttttgagatagaatcatgatcttggctcactgcaatctctacctcccaggttcaagtgattctcctgcctcagcctcctgagtagctgggattacaggcacccgccaccatgcctggctaatttttatacttttagtagagatggggttttgtcttgttgggcaggctggtctcgaactcctgacctcaggtaatctgccctcctcggcctcccaaagtactgggattacaggcgtgagccaccgtgcccgtcccaggctccacttctaattctagttctctttcaatttctactacatctgcagttagttcctccaagaagtcttgaaccccttgtagtcatccataagggttggaatcaacttcttccaaactcctgttatgttgatattttggcttcctccattgaatcatgaattttcttttttctttttcttttttctgagactgagtcttgctcttgttgcccaggctggagtacagtggcacaatctctgctcaccgcaacctccacctcctgggttcaagcgattctcctgcctcagcctcccgagtagttgggattacaggtgcccgccaccacgcctggctaatttttgtatttttagtagagatgggtttcaggccaggnnnnnnnnnnnnnnnnnnnnnnnnnnnnnnnnnnnnnnnnnnnnnnnnnnnnnnnnnnnnnnnnnnnnnnnnnnnnnnnnnnnnnnnnnnnnnnnnnnnnnnnnnnnnnnnnnnnnnnnnnnnnnnnnnnnnnnnnnnnnnnnnnnnnnnnnnnnnnnaaaaaatacaaaaattagctgggtgtggtggtgggtgcctgtaatcccagctacttgggaggctgaggcaggagaattgctttaacctgggagtggaagttgcagtgagctgagatcatgccactacactccagactgggccactcagtgagactctgtctcaggaaaaaaaaagacggggtttcaccatgttggccaagctggtctcgaactcctgacctcaggtgatccgccygcctcagcctcccaaagtgctaggattacaggcatgagccacagtgcctggcctcaatcatgaattttcttaatggcatctaaatggtgactcctttctagaaggttttcagttcattttgcccagatctatctatggcagctatatagccttatgaaatgtatttgtttctttgttactttattattattattattttaaattttagagccagagtctctgttgcccaggctagagtacagtggtgtgatcatagctcactgcaaccctgagctccttggttcgagtgggcctcctggctcagccttgtgagtagctaggactgcaggtgcacaccactgcattggctaatttttaaattttttgtagagagatgaggttgcactatgttattatgttattcagcttgttttgaatacctgggctcaagtgatcctcctgccttgacctcctaaagcactgggattacaggaatgagccaccatgtctgggcccctgtttatttttwtttatttatttatttatttagacagagtcttgctctgttgctcaggctggagtgcaatggtgtgatctcggctcactgcaacctcctcctcctggggtcaagtgattytcctgcctcagcctccccagtagctgggattacaggcacctgccatcacgcccagctaagttttgtatttttagtagagacggggtttcaccatgatggccaggctggtctctaactcctgacctcaggtgatacacctgcctcggccctgttttttaaaataattacagtgacaggtcaaaattactcctgatccttgggctgcagaatgaatgatgtgttagcagtcacgaaaacagcattaatctccctgtacatctccatcagagctcttgggtgaccaggtgcattctccatgaacagtcatttttgaaaggaatgtttttgtgagcagtaggtatgaacagtgggtttaaaatatttagtaaatcatgatgtaagcagatgtgtcatccaggctttgttgttccatgtaaagacacaggcagagtagatttagccaagttctcaagggccctaggcttttcagaatgataaatgggcactggcttcagcttaaagtcaccagctgcattagcttctcatgagagtcagcttgccctctgaagtttttttttgtgttgtttttgagacagagtctcgctttgtcacccaggctggagtgcagtggcaygattttggctgactgcaacctccgcctcccaggttcaagtgattctcctgcctcagccccccgagcagctgggactacaggcatgtgccaccatgcctggctaatttttgtatttttagtagagatggggtttcaccatgttggccaggctgatctcgaactcttgaccttgtgatccacctgcctcagcctcccaaagtgctgggattacaggtgtgagccactgcgtccagccttcctttgaagttttgaaggcaggtattgacttctcctctccagctatgaaagtcctagatggtatcttcctccaatataagactttaaactacaatgaaaatccgttgtttagtgttgccaccttcttcagtgatcttagctggatcttctggataacttgctgcagcttctccatcagcacttgctgcttcaccttgcactyttatgttatggagatggctactttccttaaacctcatgagccaactctgctagcttcctgcagcttccttatctctctcacccttaacagatttgaagaaagttcgagccttgttctggattaggcttggtttaagggaatgttgtggatggtttaatcttctatccggaccactaaaactttctccatatcagtaataaggctatctcactttctttttttttttttgagatggagtcttgctctgtcaccaggctggagtgcagtggtgccatcttggctctcggcaaccttcacctcctgggttcaagcgattctcctgcctcagcctcccaagtaggtggactacaggcgagcgccactacgcccagctaatttttgtatttttagtagataccatgtttcaccatattggccagggtggtctcgatctcttcacctcgtgatccgcccamcttggcctcccaaagtgctgggattacaggcatgagccactgcgcctggccagtgaaggcttttgtgatgagttaaaacatggtggaaaaggtcaaaggggaaatgagcacctgcgaagaggatccaaacccaaggggcaccctggctttataacaacacacactcatgggaatgaattcatttccccgagaatcaatccaggctcatgagagtgagaactcactactgtgagaagcacaccaagccactcatgaggggtccagccccatgacccaaacacctctcactaggccctacctcccaatactgctacactggggattacatttcctcttttttttttttttttttttttgagatagggtctcactctgttgcccaggctggagtgcagtggtgcagtctcaggtcgctgcagcctagacttccctgggctcaagcgatcctcccacctcagcctctttagtagctgggactacaggtgtgtgccaccatgcctggctaattttttttttttgtagagacagggtctcaccatgttgccgaggctggtctctaatgccttgactcaagcaacctgcccaccttggcctcccaaagtactgggattacaggcatgagccaccgctaccagttggggattaaatttcaacatgacatttgatggggacaaacaaaaaaaaaccatatccaaaccatagcattgactatagttaataataatgtatggtatactggaaatgtgctgaagtgttctcagcacaatggaaaaaaggtaactatgtgaggtgatgaatatatgaattagcttgattgtggcaatcatttcaaattgtaggcatatagtaaacatcacgtcatacaccctaaaatagccaacttttatttgtcagtcatacctcagtaaagttgggaaaaaggctttggctgattataaacagttctggtgaaacacatcattcagtattgctacgtcctaggcaagggctgctaatgtgctcttatgagggaatgctgggtgaaagagtatgtgtgtgtgggcacacagagtgtgtttgtgatattacagagaatagagtcagtggagagatggaggcagagtgcattttggagtgtagcatgccttttgagaaatagggctgtgaaggtaacaaacagaaggccagagctggagatgggtagtcagtagagctagtgagagggacaggttaagatgctggaggccttgggtgtaagtgatgaggggaagatcccgagggaggagataaaatctggagaatgcgtggaggaactggccttacatctgcattttcccatccaagtactaaccaggcctggccctgcttagcttctgagatccgatgagattggatgtgttcagggtgctatagccgtagacagatcgtgcattctcagagtgggcaaccacatcttagatattgcaatgattcgtggccctcgaaagggtcagagtacacaaacatatattaaggggttaaaatttcacaaggtagcaggagcggggagcaattaggaaaaaatgccttagggccaggcatggtggctcacacctgtaattctcagcactttgggaggctgaggcgggcggatcacctgaggttgggtgtttgagaccagcctggccaacatggagaaacccccgtctttactaaaaatacaaaattagtcgggcgtggtggtgcatgcctgtaatcccagctacttgggaggctgaggcaggagaatcacttgaacctgggaggcggaggttgcagtgagctgagattgtgccattgcactccagcccaggtaacaagagtgaaactctttcgcaaaaaaaaaaaaaaaaaaaaaaagtcataaaggctccataagggggcaatgatggaaaaaagtagaggaacatggcctgaagtaagagagacaattcttccttcgtaataggaaacaaagcaaaacaaatggaattggcagcaaatcaacttgaaaatgacgtgtggggaaatatcccatttgatgaattgcattttctttgtgaagtgcttggcaaggatctggcttctgagggtcaaggaagttgtaggggcatttcagagatagaaggagagtggagaaagtttgaatagactctgagggcataagagagagagctgaatgaggggctgggataggaatgcttggcatggctgagacactaggtgaaaattggtgatcatgaatttaccgcctgaacgcatgcacctgaacgtcttccattcacttattctggagctggctctactcgacatttcctttttttwatttttttttttttgagacagggtctcactgtgtcacccacactggagtgcagtggtgcgatctcggctcaccgcaacctccgcctcccaggctcaagcggttcttctgcctcagccttctgagtagctgggagtacaggcatgcaaaaccatgcccagctaatttttgtatttttagtagagacgggatttcaccatgttggccaggctggtcttgaactcctcacctcaagtgatccacctgcctcagcctcccaaagtgctgggattacaggcgtgagccaccacacccggcctctaacatttccgtaaagagattgggaggctcatcctggcacccccccttcaagcccccactgctagactagtcttcagggacacaacacccaaccctcggactctcctttcaggacccagctggaagaccagccagagtattttgtatttttcattctatctggaagaagctcagctaaaagaacagttgagctgtagggtccaacagtgggcatgaggggcagcaaaacttcaccccttctctgggatccccggcaacaccccgtcactattccatgctctgtttatttttctctttgctctaaggtttaccttgtaatccttcattgttcaaatcgctgtcactgattgatagagaattttcatgtcttgcctgctgctgatggtgtctttgttccaccctgagctgatccctatttggcagctatcattaacacagagctggtccatgtcacagacttttcctgaaggtttagaagggcagggaccagggtgaaacyagcgaggcactttccttgagtgccacatttaagggggcaccaaaaactcagtgctcaaaataaataacgatttaatgcaatatttaaaacaccaaaatgaatggaagaaatccataatgaacaaactattagaattttaaataagaacaggatcaactgtaaagcttgatattagccatctatcatcttcctaacatacttttctttctttctttctttttttttcagagacagcatctcgtatgttgcccaggctggccttgaaagcctggcctcaagccatcttcctgcctcagcctcccaagtagctgggatcacagggttgtggcatcacagctggctatattcttaacattattttgtaaccattccaacccccagaaatttctctctggctgacttgatccacagcgcctccatcgccatccctgagtgccttgttgtggaaaatcttactttatcttggttctgtttggtataatcggggaaagtctgtattctttcattatgtaaaacaacttatctctcattgtttcatctcctttctgagctctgctctgccagctctctttccaaaaccaaaatggctcttcaagttattttgtaaataataatgggccatctacttcttaacataaatgaatgattttccaaggtcaagttctctggtttcactgacttctccaccagtgtctgtaaactgaaaaatgcagattgactctcttaagattcatacattgccttcctaccctcaagaacaattggctacagtcagggctgtgtgtgtgtgtgtgtgtgtgtgtgtgtgtgtgtgtgtgtgtatgattttgatggaagcaagaaaagtaatgtgttcaatttaatcccacaaaaccctaagtagtagatattatttatctctttaacaaatgaagggatacacttcatttattccttctttagtttcttcattaatggccttgaaatcctaggctcacctgatcctcccacctgagcctcacgagttgctggcactacaggccctcaccaccatgccaggctaattatttttttatttttattttttgtagagacaaagtcaccctatgttgctcaggctggtcttgaactcctggcctcaagtgatccccctatcttggcctcccacagtgttgggattataggtgtgagccgatgtgcctgggcatatatgtttattgtgcacctagcgtacacacacatgcacgtggcattagtctttgttccagtcattttctgagaaggagtgtttaagaggtacattttttgacatcttgcatatttgaaactgtctctattcaacttaaacttgatggtaatttgcctaagactagaatcctggatgggaaataaacttctctcaaagttttgaaggtatgtttgttagtaaaggtataggctaagctctgtaacaaacctcccccaaatacagtgacttaaacatctgattaatagtttctatactggccgggccctggtggctcacacctgtaatcccagcactttgggaggccaaggcgggtggatcacgaggtcaggagttcaagatcagcctggccaagatggtgaaaccccgtctctactaaaaactacaaaaattagccaggcgcggtggtgggcccccgtaatcccagctacttgggaggctgaggcaggagaatcgcttgaacccgggaggyggaggttgcagtgagctgagatggtgccactgcactcctgcctgggctacagaaagagactccattaaaaaaaaaaagacttcctatattgtcattgtctctaataatctccacctctctctctctytctyttttttttttttaccactttcttggaaatttccacctcttctattgaattaaaacttttttttgctattgaacattttctgtcttgttctgtgattgttgctttcagaaaacatcctgcttttrtttcaaagatgctaatcttctctagtatttctgaacatagtaaatatagtttaaaaaatctgtttcttcattattcctattttctctgagtccctctttttaaatatctgttgatccttgatttttttttttttttgagactggctctgttgccaggctagagtgcaggggcgcgatctcggctcactgcaacctccatctcctgagttcaagcagttctcctgcctcagctgggattacaggcatgtgcyaccacgcccagctaattttgtatttttagtagagacggggtttcaccatggtggccaggctggtctcgaactcctgacctcaaatgatccacccgcctcagcctcccaaagtgctgggattaccggcgtgagccaccgctcccggcccctgatccttgactttatttaagagtgaggcaataaaaaaagataatccggactgttggtggggtttttcaatgtaatgagcagagatctggtcaattgataattgacacggttcctcccacagtcagtatttgtaggtcttttctattgggatgcttggtttcttcggagaccaaccttctaatttcccttttggggtgtagatgcccaaccatcagcattattggcagtatttgaagaggactggggagtcaccattcagtgtgttgcttttgttacattttcttttgttccacagggcacatttacctgatgtccgaagtccagygtccccctctgctctakcagacgataaacttctagtcttctgctggagaggagggagaattgcctgacttagtggatgataaaggaatatgggggccatttgctttttatatggactttcttttgtttgtttgtttttttgagacgaagtcttgctcttgtcccccaggctgtagtgcagtggtgcgatctctgctaactgcaacctctgcctcctgggttcaagcaattttccttccgcagcctcccgagtagccgggattacaggtgctcgccaccacgcccagctaatttttggtattttaagtacagacagagtttcaccatgttggccaggctggtctcaaactcctgacctcaggcaatccacccgccttgacctcccaaagtgctgggattacaggcgtgagccaccgcgcctggcctttatgtagactttcaatcaattctactgtgttcagcctcatgtgtacccctaccttcagtagttattggtacagtagcccccyttttctagtggggagaccttctaacttccaagatccccagtggatgcctgaagccatagacataccaaatctatagatacagtcagccctccttatccatgggggcagaacccatagatcccaacccaccgtgtatcgaaaatattagaaaaaatttgcatctgcactgaccagaattcaaaatttttgaatttttcctgtcattatttcccaaataatatagtattacaactttccatatagcatttacatcatattcggtattataagtaatctagagatggtttaaagtgtatgggatgatgtgtataagttaaatgcaaatactgcaccattttatacagcatttgaggattcagcatctgaggattttggtacaagagaggggggacttgtcttagactgtaggaggtcctgaaacagtctccgcctggatactgagggatacagtactagattttttcctatatcgtacatacatctctatgacaaggtttaatatatcaattaggcctagtaagagattaagamcattaggaataamcaaatataaatgcaaattaaaaataaagaaaaaactataaaaataattagctgggcatggtggcrggcacctgtagtcccagctacctgggaggctgaggctggagaatcgcttgaaccctggaggtggaggttgcagtgagcgagatcatgccattgcactccagcctgrgtgacagagcgagactccatctcaaaaaaaaaaaaaaaaaaaaaaaaagaagcaaaaaagaaaackgaaaaaagaggggagcaacaacaactaatataaaatagaataaaatagaatataatagaacaattgtracaatctaactataataaaagttgggtgaatgtggcctttctcaaaatatctgattgtgctgtgctcacctatttttgggctgtggctgactgcaggaaacagaaaccagggaaagcaaaaccacagatgaggggaaacggctgtactccccttcctgagtctttctaagggtttgtgcttattgcttttcctacatactgcaagcatttgacttttaactttccctggtctgctgaattgattaccccttgtttatctgctttcagcttccaaaatatagatgccatttctttctttctttytttttttttttttttcttgagacggagtttcgctcttgttgcccaggctgggatgcaatggtgtgatctcggctcattgtaacctccgcctcctgggttcaagccattctcctgcctcagcctcccaagtaggtgggattacaggcatgtgccaccacgcctggctaattttgtattttcagtagagacacggtttctccattgttggccaggctggtctcgaactcctgaactcaggtgatccacccgcctcggcctcccaaagtgctgggattacaggcatgagccaccgcgcccagccagatgccatttctcatatacttgtgtatctttgcaactctctttgtattggtgggcttatgtcttcctttttaacccatcaactggcattttagtggggagggaggagagtgaagaagggagcatttgttcattccttcatgattaactgcaaaacattatttctttaaatagtgccttccccccatttttctagtccctcctttttgaactgttggaagctgattagaacttctggacctgttctccatgtttttcaatgtttcttcctcacattacaaagccttattctatgtggtgcactttcagagaactccttagctgagtcctccaattcacaagttggctcttcagctctgtccatcctgccattgagttttaatttcaacagttatcttttttttttttttttgagacggagtcttgttctgttgcccaggctggagtgcagtggtgtgatctcggctcactgcaagctctgccttccagttcacgccattctcctgcctcagcctcacgagtagctgggactacaggcgcccgccaccacgtctggctaattttttgtatttttagcaaagacagggtttcaccgtgttaaccaggatggtcgcgatctcctgacctcgtgatccgcccgcctcggcttcccaaagtgctgggattacaggcgtgagccaccgtgcctggccaaatttcaacagttatcattttttactttgaagatcactaattgcttcatttagtaacttccagttcttgtttcatgattatactacccacacttacctcttggaagatattcattatacttatttttaaagtcatatcctgataccttattaatttattgggtgtaagttcctccaattttttgactttgtttctctcttatggtgttaggaacttctcaactgtttggtgagcctttttttggggcacagctgtttacagttgatgttatttactagactgtctgctgtcttggctttcacagctcagttggggagagggtgctgccactgctgtcagggttacaccttgtatttattttcttttttaaaaaaattaaattaagttatttgagtttctggggtacatgtgcaggatgtgcaggtttgttacatgggcaaatgtgtgccatgtcataatggtgattatttaaaagttaagaacaaatgctggtgaggttgcggagaaataggaatgcttttacactgttggtgggaatgtaaattagttaaactattgtggaagacagtgtggtgattcctcaaaggtttagaaccagaaataccatttgacccaccaatcccattactgagtatattcccaaaggaatataaatcattctgctataaagatacatacacacatatgttcattgcagcactgttcacaatagcaaagacatggagtcaacccaaatgcccatcaatgatagactggataaagaaactgtggtatatacaccacggaatactatgcagccataaaaaggaacaagatcatgtcctttgcagggacacagatgaagctggaaaccattatcctcagcaaactaactcaggaagagaaaaycaaacatcgcatgttgtcacttgtaagtggaagctcaatagtgagaacatgtggacacagggacgggaacaacacacattggggcctgtcaggagagggcggaggttgcggggagagcattaggaaaaagagcaaatgcattgctgggcataatacctaggcaatgggttgataggtatttattttctttcttttttttttgagatggagtctcgctctgtcgcccatgatggagtgcagtgacgccattcagctcactgcaagctccgcctcctaggttcacgccattctcctgcctcagcctcctgagtagctgggactacaggtgcctgccaccacgcctggctaattttttgtattttttagtagagacgaggtttcaccatgttagccaggatggtctcsatccctgacctcgtgatctgccctccttggccccacaaagtgctgggattacaggcgtgagccaccgcgcccggccgataggtatttgttttccctgaaagttgggagtgggtgggttgggctgcttgtgaggtgtatgggaggcgtgtgtgctgggtgtgacggctccatactccctgtggagtgcttcctgtggttaccacgcctcagggcatgctcttgcttcctcctgagggagaagtcttctatgtattcctgcaggtactgtaggctacagttcccctttccatctaacctagtattgatgaagggcaggatcttggctttgctcgggaaagaattcaagagcaagcyagtgctggaagaaarcaactttactgaggaggcggctgtgtcacagctctgtgaccgctcccggggagcaggactacagcggaggcaatccgagaggacagtgcagggtggtgtgcagccatatttatgcccacttttagtgacatgctaattaaaggggcacgttattcaggaatagctaggaaatgggcagtaacttctgggtgttgctgtggcaatggtacattgtcatggtgctgataggagtgtcttacggtgatgggcagtgagaggttctttcagcccctctactggtttcggtcagttttgttttgtcttttttttttttttttttgagatggactctctccgtcgctccgactggagtgtagtggtgcggtcttggcccactgcaacctccgcctcttggattcaagtgattctcctcsctcagcctcctgagtagctcggattacaggcatgaaccaccacgcctgtctcatttttgtatttttagtagacacagggtttcaccatattggccaggctggtctcgaactcctgacctcaggtgatctgcccacctcggcctcccaaagtgctgggattacaggcgtgagccaccatgcccggccttcagtcagtttcaatctggtctggagacgagtcccacctgcctcctacctcagtatgatttctgtctttcagcatgttctctctccccagtccagcaagcatttctggtttttgagcataattattaatttattaataatatgcttctgttgtttgtgtggttagaatttggtgtagaagggtagactgcagtatctattagttcatcatcttataaccagtattggatattttgttcttcttctccttttttttttttttttgagacagggtctcactctgtcacctaggctggagtgtggtgatgtgatcatagctcactgcagcctcaatctcctggcctcaagtgatcttcctggcttagcctcccaagtagctgaaaccataggcaggcatcaccacgctcagctaattttcttatttttgtagagatggggtcaacctatggttacccaggctggtctccaactcctggactcaagggatccttccgcctcagcctcccaaagtgctgggattacaggcatgagccaccgcacctggccagatattttattttacatcaaatccccttgcgttggtgacggaaaagatttattttaaaacagttttgtcattctcaaattatgaatcaaagaagcaaaaagtagtttaactcatatatcctgcttcaccagtttgttacaaaattaggttacactccttttaatatttaaacaattctgtgcctccaccctgactactagaatatgttcttttccattctccaggatccttcttccgtgatgttygctaacagctctacagtacttactttgggccagacatttttctaagtgctttttacatataataactcataacaactccggaytccttagagaggcttgttaagttttatgggttagcacttcttattatctttggaagaacaaagcctgaaaacctgctcagtcagccagagattcctgttctctttggctgttgttgcttttactcacatatgatatttccggtgaatctcagggtgtcctactatttttctgctagtctactgctaggagagtaggtccccattgaacactggtcaatgagagtatcacatcttcttggacagtgattggttcaaagatggacatatggtccaagatgggctaatcagagctaacgaggctttttctggggctttgatggaaatagaatgaaatctttgtgtttccatggtggctgccaagctggtagactacaggcctgttgactccagtgaccctcttggagaaagcctgtcagagaataaagccaacagacaggaaagcaaattgaggtcacggagagggagcaagagagtgagccttcgtcctgatgatattctttgaaccccctgatgcagccatgcctgaggtcagactaaccctgaccttttatgttataggaaccaataatttccttttatttttattgttctttttttctgtttccctccaacttaggtgagacaagaatgcctattttattttattttggtattttttatttttttgagatggagtttcactcttgttgcccaggctggagtgcagtggtgcaaccttggctcactgcaacctccgcctccctggttcaggtgattcccctgcctcagcctcctgagtagctgggattataggcatgtgctaccctgcccggctaattttgtatttttagtaaagacagggtttcgccatgttggccaggttggtctcgaacacctgacctcaggtgatccacccaccttggcctcccagacagctgggattacaggtgtaagccactgcaccagcctaaaaatgcctatttttaaaagccactttgaattcactttctgttacacgtagacaaaagagtcctgagtaaggccagaggtgaggcagaggtacggtctytaggctggagcacctgggcagctgtagactgtggctaaaaaactactgacttcaaacaatgtaccagcctgtgagtggcgttyttcctggcagtccaggatttgtgcaagtgagtttgcatgtggagtgaatttcttgctatcctcatacctgggttttttttktttttttttttttgagacagagttatgctcttgttgcccaggctagagtgcaatggtggcatctcagctcactgcaacttccacctcccaggttcaaatgattctcctgcctcagcctcccgagtagctgggattacaggcrtgcaccaccatgcctggctaattttttttttttgtatttttagtagagatggggtttctccatgttggtcaggctggtttgaactcccgacctcaggtgatccgcccacctcggcctcccaaagtgctgggattacaggcgtgagccaccgcgcccagccactgggtcctttttgtggggatattttctcgaaattgctgggaccttcaaccctcaggggtgggaagttggcatctcctaggtttttttttcatatttctatgggtgagtcagccaggataaaggtcaatgcatttgagtatgagaagactgcctagtgatggccttatagtttcatgttgactcactatttaatatttcttttaaaatttttcatgtagttggaagtagtcatcccctttttttctggakaattattattattattattattattattttattattattatcttggttcctgcctattaatcttaggagggatagaagacagttgtgttagcattagtctgctttgtgttgctattagggaatacctgaggctgggtaatttataaacaaaagaggtttatttggctcacagttctgcaggctgtgtaagaagcatagtgccagcttctgcttttggtgagggcctcaggaagcttccaatcatgttggaaggcaaagggagagcaggcatgtcatatggcaagagagcaagcaagagagagtgagcaagaaggtatcacaagctttgaaacaaccagatctygtatgaactcattaccactcattacttcaaggatggcaccaagccattcactagggatctgcgcctatgacccaaacacctcccagtaggcccacctccaacactgggggtcacatttcagcatgagatttggaggggccggatattcaaatcatatcgacagttctgtccaccagctcccagaggaggtcctttaaagtcagccaccttgatttggcatctcctattcaacttgtattttcacacggataatcttccaaatttctctatcattatgtagagatcaccctaccactggccagctagtttgtgttaatgtttttttttgaaatggagtctcgctctgtygctcaggctggagtacaatggcgtgatctcggctcactgcaacctccgccttccaggttcaagtgattctcctgcctcagcctcctgagtagccgggattacaggcgcccaccaccacacctggctaatttttgtatttttagcagagacagggtttcaccatgttggccaggctggcctcgaactcctgacctgaggtgatccacccacctcgacctcccaaagtgctgggattacaggcgtgagccaccacgcttggctctagtttgtgttaattttatagtaatatttattatcttttcagtggyttctggtatctggaggtgtttttgcaagcagcagcaatactttttttgggagtgcgtcttgggtggggtttttaaagtctccctttcataaatctactttacagcattaatctgtgaggacttgcagtctccacctaacctcaaaaagtaacatgtaaaatcggtgacatsaagattccactgatgtgtgattcagaaatgtcacaccacccgctcatgccatggtgttatcaacattaaaaaatattctgtgatttattttataaaacaatagctttaaaaaataaactttaaattttagaatggttttagatttacaggaaaattgcaaagatagtacagagaatttatcaccaacgttttgaaatttgtttaaaaatgtttaggtttggggttctctttggggttatttgtggtgaccctgtactcttgtataacggctaagtaaaatatttcaagyagtagctggatctcagtctcctgtaatctgagtacactatatcaagaaactcctctattgaagcagcatttccctcttattatatctatacaactgtggttgctttctggtttatagtgggatacacttctgcacagccagtgaagtgattgatcagtgaaaataggccgttaaggttccacctatcagattttgaggataatatgaggatgcacaatatatgactttgttttatacaaagtatcaatgttagtaaggcttttgcatatgtgtaggatatgtcttacaattggattggaccttctcaatcatcttaaacccaaatggccaaatatgccgtattttgtaacaaaaaatatacagttaaatattttactgtatcttaaattattttgttcttttctttttcataaaatgatataatttgattatctttctaatgttttgtaaagggattttaaatcaagtgtatttgaggtagagctcatgtacaatacaatgtattcatttcaaatgtgcgtttccaagtttcagcaaaygtacacacccatgtatccatcactagggaacattttcatyaccttaaatgttcttttgtgctcataccagtcagtctccctggctccaggaaacagctggtctgctttctgtcactacagatttgtcttttctaaagttgtatataartagaattayatataatatactcttctgtatctggctttatccactcagcatcatgtctttgtaatttattcacttttttgtggctatcagtaattcattacctaaaacaatttcttggctgggcatggtggctcacgcctgtaatcccagcattttgggaggccaaggcgggtggatcacacggtcaggagttcgagaccagcctgaccaacatggtgaaaccccatctctactaaaaatacaaaaattagctgggcatggtggtgcacacctgtaatcccacctactcaggtggctgcacatgtaggctgggtgcggtggctcgtgcctataatcccaacactttgggtggccaaggcaggtggatcacctgaggtcaggagttcgagactagcctggccaacatggtgaaaccccgtctctactaaaaatacaaaaattagccgggcgtggtgacaggcgcctataatctcaggtactcgggaggctgaggcagcagaatcgattgaacccgggaggcagaggttgcattgagctgaggctgagatcgggcaactgcactccagcctggcgacagagccagactctgtctcaaaaaaaaaaaaaagaaagaaacctgcatatgtatccccaaatctaaaataaaaattgaaaaaaaaaaaaagggctgggtgcagtgggtgcagtagttcactcctgtaatcccagtacttttggaggccaaggcttgtgcatcacctgaggtcaggagttcaagaccagcctggccaacatggtgaaactctgtctctactaaaaatacaaaaatgagctgggtgtggtggmgggcgcctgtaatcccagctatctgggaggctgaggcaggagaatcacttgaccctgggaggcagaggttgtggtgagccgagattgtgccactgtactccagcctgggcgacagagtgagattccgtctgaaaaataaataaatgaatgaataaataaataaataaatgtaaaaaaaattttaaatagaaaaaagcttgtgaaattaggatataaagaaaaaattcatacaagtgtaaaatatgtttgtgttttaagctaagcattactacaaatgagtcaaaaagttaaaaagaattaaagagttaaaaagaattaaagagtttataaagtaaaaaaattatagtaagctaaagttaatttattattgaagaaagaagtttttttgttttcttttgagacagagtctcactctgtcacccaggctggagtgcagtggcgcaatgcgcgatcttgactcactgcaatctccgcctcccgggttcaagtgattctcctgcctcagcctctgagtagctgggattacaggcgsgcaccaccacgcctggctacattttgtatttttagtagagacggggtttcagcatgttagtcaggttggtctcgagctcctgacctcgtgatcttcccgccttgggctcccaaagtgctgggattacggtgtgagccaccgtgcctggccaaaagaagtttttaaagataaatttagtgtaggggagatgtacaatgtttataaagtctacaggagtgtccagcaatgccctgggtcttcacgttccctcaccactcactcactgacccacctgcagcaacttccagttctgcaagttccattcatggtcagtgccctgtacaggtatgccattttgaatctttaataccatacttttactgtacattttctgtgttgagatacacaaatacttacaattgtgttgcagttgcctacaatattcagtatagtaacgtgttgtgcaggttgtttgagcaatggactatactatatagtctaggtgtgtagtgggttataccgtctaggtttaagtgcactccatgatgtatgcacaacactgaaattggctagtgatgcatttctcagagtgatgtacatctcagaatgtatccctgtggttaagtgatgtgtgactgtatttaaaaaaggctgttctacttccttgtggcctctgtgattgctgatgagaaatctgctgtcactcaaattatttcttcctgaaggtataatgttgtctgtctctcccattgttttcagaaatgttttctttgtctttagttttcagaaatttgattatgatgtgtctttggcatagatttctttgagtttactctgtttggggtttgctaaggtaggtttagatcttttgccaaatttggggacatttcatctatcatttttttgaatattttttcagctccaccccctgtctcctttccttttgtgactaaagtgatgtgattgctggatcctctgttgtagcccctcaggtccctgagattctttttattttattttattttgtttttctgcccattttctttctgttgttcagattgggcaatttctattctgtcttgcatttcgttaatttttcctctgtttcccccattcgctagtaagcccatatattgagctttttatcttggttwttctatttttcagttctaaaatttccatttggttctttttaaattttttatttctcagctgatatttttcattttctatttgtttcaagtgtgtttataattgctcaytgaaacctttttttttttttttttttttttttgagacaaagtttcggcctgtcacccagactggagtgcaatagtgtaatctcagctcactgaaaccttcgcctccctagttcaagcgattctgctgcctcagcctcctgtgtagctgggattacaagcgtgcaccatcatgstcggctaatttttttgtacttttagtagagatggggcttcaccatgttggccaggctggtcttgaactcctgacctcaagtgatctgcccccttcagcctcccaaaatgctgggattacaggtgtaagccaccacgcctggcccagcaggggaattttaagtgtgccttgtcccagccaggtaagggtagaaatccaggctgccactcagcatttgctaatgggatggcaacagggttgtggttctttccatgatgtttggcaaggatagtgtgatttttgtctaaaagttttctgtcttgccaaattagtcctttcctggtcttttggccagagagaccaggctttcttggggattttattttatttttttcgtttgcgcccattggtctttccagtggtttctccagcatccagttccagatatatgaggaagaaaagaaaacccagagaactcactgccatgccattcccaaggtcccaaggcttccaattgttctgtcttctctccaccttcaagagccttttagtgtttgttttatctataatatccatggttttagctatacttagtgggaagtataggaagaagtgcctccatttaatcttaaattcattcctttttatagctgagcaatatttcattgtatagaaatgtcacaatttgatcatccgtttcatcaacctgttgacaaacatttggattgtttccagcttttggctttaggaaacagtgckgctttgaacgtaatttaatgctgttatgaatatatgttgtcgggtctttgtgtggactgttttcacttctcttgggtaaacacctaggagtggaattgctgagtcatgtggtaattgtgtgtgtaactttatgagaaattgtcaaactgtttttcacaggagttgtaccattttactttcctaccagcaatgttccagttgctctacaacctcaccaatgtttggttttaatagtcttttaagttttagtcattctagttttaatttgcgtttctctggtgactgatgatgttgaacatcttttcatgtacgtatttgctattcatatagcttattcagtgaagtgtctgttaacaaatttggcctctttttattgggtcgccttcttgttatgaagttgtagaagttctttatatattctgaatacaatctttcattagatacgtgttttacaaatctttttctctcagtctgtgccttgtgtttttgtagtctttttaaaaagaaagatttgttggacttgaaattttcattgttttaactgtgtcttttgaagacaacaagttttaaattttgatgaagtttgttctttttttcttttgttgcttgtatttttgtgtcttatttaagaaaactttgcttcagccaaagtcacaacattactctcctatgttttttgtctaaaagttttatagctttgggaagccgaggtgggcagatcacgaggttgggagtttgagaccagcctggccaacatgrtgaaacccccgtctctactaaaaatacaaaaattagctgggcatgatggcgggtgcctgtaatcctagctactcgggaggctgaggcaggagaatcacttgaacccaggaggcagaggttgcagtgagccgagatcacaccactgcactccagcctgggcgagagggtgagactctgtctcagaaaaaaacaaaaaagttttatagcttcaattcatatactgaggtttattatttattttgaattatttttatatggcgtgagataaagttgagctctattgttttgcctatggatatctgattattccagcaccttttgcgaagattatcctctattatcttgatacctttgttgaaaatcaattaattatatacatgtaggtctatttctggactctgtcccattgatctatatgtctatcctgatgccaacactcttgctaataatatatattaccgtttcatatattaatatctattactgagctagctttatagttagctaagtcttgaaagtcagatagtatcagtcttccaactttgttcttatttttctagattgttttggatcttctagatattttgcttttctatttaaacttgaaattctgcttgtctccttctataaaatagctgtctgaggttctgatttttattgatgcctaaatcagtctaggaagaattgatgtctttttttttttttttttttgagatggagtctcgctctgttgcccaggctagagtgcaatggtgtgatctcagctcactgcaacctccacctcctgggttcaagcaactctcccgcctcagcctgtcaagaagtggattacaggcacccgccaacatgcctggctaatttttgtatttttgtagagacagggtttcaccatgttggctaggctggtcttgaactcctgatctcaggtgatccgcccgcctcggcctcccaaagtgctgggattacaggcatgagccaccacgcctggctgaaaattggtatctcaactatactgagtcttctgctccatgggcatggtgtacttctttattatttatttatgtgtcaacgtctctcagtattctgtagaatttcaattttcaattttggtcatttcttgtgactttgaaaccagttttattttctttctatcttcctctctctatccctctatccttcttttgccttcttccttctcttcctctttccctcctttctatagttttttattctttttttccttttaaaactcagccatatagtacatatcttgaatccttgttgacttttcatcgatgtattacaacttaaaatgcattctttagacaaatacatttggcaaaccttaaaatgacgttaggcagcggttgcagccaagcacgcagcactttgtgtggagaagctgttgtgcgtagagtagttgttgagagcgcagaccatggatccagaccacccgtgtttgcaattctgtctccgttattactagatgtgtcatcttgggaaagttatttcatctttgtgcctcagttgcttcatttgtaaattgtgaagaaaagtacctaccctgaatgatttttgcgaaaattaaaggtcaatacaagtgaaatgatcggaatagtaactagtaagcactggtttagtgtatgataataactactattattatgacccactgtctactgggaaaagaagccttgcagtgaaaacacaaataaaatgtgtaagaatcctgactggcatggccaggtgcggtggctcatgcctgtaatcccagcactttgggaggccgaggcgggtggatcacctgaggtcgggagtttgagaccagcctgaccaacatggagaaaccccgtctgtactaaaaatacaaaattagccgggcgtggtagtgggcgcctgtaatcccagctactcgggaggctgaggcaggagaatcacttgaacctgggaggcggaggttgtggtgagctgagattgctccattgcactccagcctgggcaacaagagcaaaactctatytcaaaaaaaaaaaaaaaaaaaaaaaaaaaaagaatcctgactgaagcctaggagcacagagattggaagagtcaggggagttttcaatgagaagttaatactgaagtctttagactacttttattcaggtatgattgatatgaaaagctattcctatttaattatcacatatcaatgaatttgcagttaaatatatgcctgtgaaaccaacactaccatcaaacccatcgtcatctcccaaagtttcctcctgtccccttctgtgataatgatgatgatgatgatgatgatgtgtggctcttttttttttttggcaagaacacttaccataaaatctactcttttagcaattttaagtacaaaatacagcatcgttagctacaggcggtatgccatataatagatttccagaacttatttatcttgcataattgaagcttcgtactctgtaattaccacttcctcattttcccctccctgcatcccttgttttttttttttttttttttttttttttttttgaaacaaagtctcactctgttgcccaagctggagtacaatggcatgatctcagcttactgcaacctctgcctcctgggttcaagcgattctcctgcctcggcttcctgagtagctgggactacaggcacccgccaccatgcccagctaatttttgtgtttttactagagacggggtttcaccatgttggccaggctggtctcgaactcctgacctcaggtaatctgcccacctcgtcttcccaaagtgctgggattacaggcgtgagccaccgcgcctgaccgacatttgttatttttgaatttttgataatactcatgctaacaggtatgagattatgtctcactgtgattttgatttgcatttccttgatgatgactgatgttcaacacctttttatatacctgttgggcatttgtatgtctcctttggaaaaatgtttattcaggtattttgcccactttaaacatcaggtttttttttttttttttgctgttgagttgtatgagttccttatacatttggaatattaaccccttatcagatacatggtatgcaaatgttttctcccattctgtggttgccttttcattttgttgattgttttctttgctgtgtagaaactttttagtttgatataattctatttatttttgctgttgttgcttgtgcttttggtaccatatccaaaaatggatatggattttgatggaccccccaaattattgtcaaaaccaatgtcatagagctttcctgtatgttttcttctaacatttttatgatttcaggtcttacatttaagtctttaatccattttgagttgacttttgtgtatgttataaataaggtctaatttcatttttttaatgtttatgttcagctcttttgtttttgctcacaatttctttagatattagaagtcttttgtagctcaatacaagttttaggatttcttttttctatttcagtgaaaaatgccattggaattttgaaaggggttgcagcgaatctttagatcactttgggtagtagagacattttgataatattgatttttcctattcatggacatgggattttgtggaataggtttactgtgcactgattaccaacttccctgagtccagtaagactgaacacacttatacgcagcaaattaaatatagtggatttattacctacagataggcagcaagggacaacagaaacccagtgttcattgcaagcattcccggagtctctggaaaactgcttgtggtggatggagtgtcatatgtgcatgctccacctgcattgcagctgagggacctcctcaaaaaaagcagcctgccctggcttttttttttttttttttttggagacagagtctcactctgttgcccagactggagtgcagtggcatgatcttggctcagtgcaacctccgcctcctgggttcaagggattctcctgcctcagcctcctgtatagctgggactacatgagtgtgccatcaggcctggttaatttttgtatttttagtaaagatggggtttcgccctgttgcccaggctggtctcaaactcctggcctcccaaagtgctgggattacaggtatgagccactgcacctggctggcttttttttaataccctggggtatgtgacatactgggctaaatcactgaaggacatcttatttctaggggagactggaatagagcctgggctattctggccaactccttatctcaggatggcgaattcccagcacattttatagttattcttgggaactacaagcaagaaaggggaagaactaagtcagtgcaagtctacctcctccctaaataactgtcctgcagatatctttccatttatttgtgactttccaatatatttcattaatgttttatagttttcagtgtataggtctttcacctccttatttaagtgtattcctaagtattttattcttcctgatgttattgtagatggaattgttatcttaatttcttttttggatagttcgttgtcagggtrtagaaatgctactgatactgtaggttggtttttgtatcctgcaactttactgaattcatttattagttttagcagtttttttggtggaatctttagggttttctacatataasatcatgttagcaaatgagacaatttaacttcttccttttctatttggatgccatttcattctttttcttgcctaattgctctggctaggccttctagtactatgttgaatagaagtggtgagaatggatatccttgtcttgttcctggtcttagaggaaaacttgactttcactgttgagtatgatgctagctgtgggcttgtcatgtatggccttcttatgttgagttacattgttcagtacttaatttgtaaaaagattttatcatgaaaagatgctaagttttgtcagatgcttttctgtatctattgagatgatcatttttatccttcattctgttactgtaatatggatcacatttattgatttgtgtattttgaaccattttcgcatcccaggaataaatctaacttgatcatggtgtattattcttttaatggattgttgaattttgtttgctagtattttgttgaggattcttgcatttgtgtttatcagggatattgtctygtatttttcttttcttgtagtgttcttatctggctttgggatcagggtaatgctggtcttgtagaaacagtttagaagtgttccctcctctttaatttttggaaaaaactgagaaagattggcattaattctttttaaaggtttgtagaattcaccagtgaagccatctagtctttgttagtgctctgttcagattttgtatttctcctgacttagtttttgtaggttgtaagttctgagaatttatccatttttttatgctacccaatttgttggtgtataattgctcacagtaacctcttctgatcctttgtattttcatggtatcagttggaatgactcatccttcatatataattttatttatatctcatctctttcttagtttagctaaaggtttgtcaattttgtgtttttcaaaaacccaactctttgtttcattgatttctctttattatttttctagtctctatttcatttatttctggtctaaattttattattccttttgctaactttgggctttgttcttatttttgtatttctttggggtgtaactttaggttgtttatgtgagawcttttcttttattaacgtaatcatttgttgctataaacttccctccaataactgcttttgctgcatcccatacatcccattttggtttttgtttgtttgtttgtttgtctcaagatatttttgtctcttcttttaatttcttctttgacccattggtttttcaggagtgtgttgcttaatttctgcatatttgtgagttttccaattttcctcctattattcctagtttcatttcattgtgattggaaaagatatttcatatgatttcaatcttcgtaaatttgttaagacttattttgttgcttaacatgtgatctatcctggagaatgttccatgtgggcttaagaagaatgtgtattttgcttctgttggatagaatgtcacgtatatgttcattggatctgtttggtatctagtgtttaattccactgtttccttatttattttctgtctggatgatccaaccattgttgagtgggggtattgatttcttctattatgtattgctgttttatgtcttcctgatgaattgacccttttgttagtatatataatgaccttctttgtctcttatgacagtttttgacctgaagtctattttgtcacatgtaagtatagccacctttgctctctttggttatcatttttatgggatgtgtttttcatccattcactttcaggctatttgtgtccttaaatctaaagtgagtctcttgtagacagtatatagttgggtcttatttttaaaagtccatttattgacccggtgcagtggctcaggcctgtaatcccagcactttgggaggccaaggcaggtggatcaccaggtcaggagttcaacaccagcctggccaagatggtgaaaccccatctctactaaaaatacaaaaattagctgggcatggtggtgggtgcctgtaatcccagctactcgggaggctgaggcagagaattgcttgaacctgggaggtggaggttgcagtgagctgagatcaggccactgcactccagcctgggtgagacagcgagactccatctcaaaaaaaaaaaaaaaaaaaattccgtttatccactgtatgcctcttaatgagagaatttagtctatatacatttaaagtaataattgataggtaaggacttactattgctattttgttaattgtagttcctttcttcctctctcgttgtcttcctttgtggctttattattattattgtttgtggtggtatgctttgattcttttctttttatcttttgtgtatctactacaggattttttttgtgattaccacgaggcttacataaaacatcttgtagttgtaatagtctattttaagctgataacaacttaatttttattacatacaaagactatatacttttactcctccccccacattttatattatttatatcacaatttacagctttttatattgtgtatcgaactatataccatcatcatggtattagagaattgtgagtttgactatatacttacctttatcagtgagtgtatgttttcatgttgctgatacatattcctttcatttcaacttgaaggtctccctttcatatttcttgtaaggcaagtccaggggtgatgaacttcctcagttttggtttgtctgggaaggtctttatctttctttcctttttgaaagatggctttgctgagtatgtttttggttggcagttttttttcttccagcactttgagtatatcattccactctatcttggtctgcagggtttttggtgagaaacccactgataatcttgtggaggtttctttgtatgtgttgagttgtttttcttttgctgctttaaaaattctctggtaaaaggaatttgaggagataaaaaataattaaaacaaaacaaaaggaagaaaattctttctttgtctttgatttttgactatttgattataatgtgtcttggtgaagacctctttattctcaatgtatatggaattctttgggcttaatggatctgagtgttttttttttctctttacagatttggaaagttttctgtcattatattttwtttatttatttatttatttwtttattattattatactttaagttttagggtacatgtgcacaatgtgcgggttagttacatatgtatacatgtgccatgctggtgcgctgcacccactaactcgtcatctagcattaggtatatctcccaatgctatccctcccccctccccccaacccacaacagtccccagagtgtgatgttccccttcctgtgtccatgtgttctcattgttcaattcccacctatgagtgagaatatgcggtgtttggttttttgttcttgcgatagtttactgagaatgatgatttccaatttcatccatgtccctacaaaggacatgaactcrtcattttttatggctgcatagtattccgtggtgtatatgtgccattttcttaatccagtctatcattgttggacatttgggttggttccaagtctttgctattgtgaatagtgccgccataaacatacgtgtgcatgtgtcttcatagcagcatgatttatagtcctttgggtatatacccagtaatgggatggctgggtcaaatggtatttctagttctagatccctgaggaatcgccacactgacttccacagtggttgaaatagtttacagtcccaccaacagtgtaaaagtgttcctatttctccacatyctctccagcacctgttgtttcctgactttttaatgattgccattctaactgatgtgagatggtatctcattgtggttttgatttgcatttctctgatggccagtgatggtgagcattttttcatgtgttttttggctgcataaatatcttcttttgagaagtgtctgttcatgtccttcaataagctttctttccctttctctttctctggtccttttgggatttctataatatttatattagtttgcttgatgttttcccataagtccagcagagttgagccagctgctaagatccatgcctgttgttaatgttcatgttctctctgcagcatttaatgtgggccatgcacagtggtgtgttgggccccatacatggtggggtggggcatgcaggttgcatagactcgttgggtggagggtcctcacgtgagtcatctggtgggatttgtgggcaagtctcctgctggagtctgtgagctaagtggcagaatctgtggttggttgttgaaaccacatgctggttgctgtgcagtccattcccttctccctgttcctagatgatcagtcatgctgatcatctgtattctgggcagggagacagaagtgagcctcccgggcaatgttcttcttgctgatcatctgtattctgtattcagtgttcttcatgctcatcatctgtattctgtattcagtgttcttcatgctgatcatctgtattctgggcagggagacagaagtgagcctcctgggcaatgttattcaagtctggggaagccaggtgttgactatgcttttaccttcccctgtggagagattgaaagccaaaggagcttctctcagcacaagctgtgcctccttgggggagggctgatgcaggtaaagtggaactgcacttcttacccttttcgatgcttccactcttgggttgatttgctccagtggggtgctggaacctcagccagactccaggcctcccacataatgattctcatctgtcactgcctgccttaactggtgtttctatggggggatgagagctggaacatcctattctgccatgttactgatttcactcctggactgaattttgaagaatgaacagaactcactactagatgtatgaagagaaaatcgcatcctaaacagagggaactccaggtacaaaggcagagaaatttaatatatcaaggtgcttgtgatggacagttaagttttttgtgggacttggatgtaggtttcatggaaggagacagtgggagtatgtaattggaaagttagtcaggggccagattaccatgggctcatatgtacagtgaaaactataaaagaaaatggaaaactcgtgatgactctgcttattgaactttaccagcgaagacttttctttctatctgagcaggattttagacatggattcatcaatgcgcagttgcagtactgtacatgggagaagtcaggagtgatagttgagctaagagatagagacatccgtagaggtatgtaccgtcacagtttgtgagacaggcaataagaggagttcattcaactaattcattcaactaatatttgctaagtatctaccacaaactcccaaacttctagaaaytgaagacacagcagtaaacaaagagacaaaaatcccactcttattctgttacacaccatatatttactatatatatatatattctggagtatttaaaagcaaatcccagacatcatgtcatttcacctttgaatattttagtatatgtctctaactgataaggactttaaaaatacatagccttcatacataactaccatatcatttatcatatcataatatataataccatgatattatttaatagttattatgcatttatattttcacttatgtttaaaaatgtctttttaaaattagttactttgggccaggtgtggtggctcacacctgtgatcccagccctttgggaggcccaggcaggtggatcacttgagggccaggagtttgcatccagcctggtcaacatagtgaaaccccatctgtactaaaaatacaaaaattagccggtcgtgttggcgtgcacttgtagtcccagctactcgtgaggctgaggcaggagaatcgcttgaacccgggaggcggaggttgcagtgagcagagagtgcgccatttgcactccatcctgggcgacagagcgactctgtatcaatccatcaatcaatcaatcaatcagtcaatcaaattaggtgccttgaatccaggttcaaatccagggccacatactgtatttggtctcttgtctctattaaaatctaacagttccctagccttcctttggtatccttttatgtctcttaaatttttttttttttttttttttgagctggagtctcacgctggagtgcagtggcacaatctcagctcactgcaagctccgcctcccgggttcacgccattctcctgcctcagcctcccaggtagctgggactacaggtgcccaccaccacgcccagctaattttttgtatttttagtacagatgggatttcaccgtgttggccaggatggtctcgatctcctgacctcgtgatccacctgccttggcttcccaaagtgctgggattacaggcgtgagccacygcacctggccttcaaatttttttattttaaaattatcatacagtaaaattagctttttggtatacagttctacacattttaacacctgtatagattcatgtaaccacgaccacggtgagtatacacaacagttttttcacctgtgtgtgtggggtaggaggggatttggtggttgatcctctatgacacactgttaggcacccccttgattgttgctctatggctcacctttccacattgaacctcccagggccgagcctttccaggttctgcgggggtttagtggctcacttgccattgcgttattcttcttcagggtaaggaagattgaattgcccaagcttccacatcgtattgtggaattcagactcgaacccaggttttccatcttcaaacttctgtgtttaaaatttattgtataaaactagaaaaaaccctgagcacataagagtaccagaagaaccaatttcagaatatagatgcaggattcctaaataaaacagtaaccaactgaatctagcacaaattaatgaaaaatatgtgcatggtagataactcaatacataaatatgaagtaaaatgaggtaccatttttgtgcagaggttactaacttggcagagattttaagagaaatactaccaactataggcaatggatggagaaaataggcattcttatatgtttctggtgtgaaaccaaattggtaccacctttcaaggggtcaattttactatatataacaaaactcttaatattccatgcaacttttaatccagaagttccacctctaggaatttattttcaggaagcaatcatgatattcacaaaaatttagctatgaggatattcatttcagtgttatttataatattgaaacattaataacaatgtatctgtccactaatactgacttcataaaataaaataccagacacaaaataatgttgaagaataattttaataacatgaacatatgataatgttacattcagtgaaatacacagtttcaaaacagtatttttttgtattacaagggattctttctgttgcaagtaatgaaaactcaactaaaaatggcttaagagaaagaaaaggaagatattgattcataatactggaaagtccagggccacagtgccttcaggtaaggctgcatccagcctcatcatcagtaatctgtttccgtctcttggtttggctttactttcagatagaccctctaaaagcattgttaaagagagctaccagcagctctgggattgtgctttaccaacttgataacctaacaggacaagagaatttcctttcaaatcattctagcaaaaatcctagggctgaatctcattggccaggtctggctcatgtactcctctctttaactgagaggaggtgtgagtcccatttgaactatgtcataataatgatagctgaaatttattgaatattgattatgtgtcagattatgagtctgagtcccatgatttgatgtgtaactttgagcaatttaaccttcctaagccagaaaagaacacataatctgtgtcctctgtattatttcactaaattctcttggcaatcctagtgaaacagattctgtgtccatcctcattttatggatgaagaaactgaagctcaggcaggttaattattgtcttagtccatttagcattgctataaaggaatacctgaggctgggtaatttctaaagaaaagaggccaatttggcttatgggtctttggctttacaagaagcatggcactggcatctgcatcaggtgagggcctcaggctgcttctactaatggtggaaagtgaaggggagccagcgtgtgtggagatcacatggcgagagaggaagyaaggtgtggaggcggtgccaggctctttttaacaatcagttctcccggtaatgaacagaggaagaacttacccttgagcgaaggcactaatttattgatgagggacccacccccatgacccacatacctcccactgggcccgaccttcaacattagggatcaaatttcaatatgggatttgaaggagacaaacatccaaactaaagcaagtttattatttaagttgaaagaattagcaaatgatgcattcactcacatggattgagaatatgggaggcagcagttcttcaaagaagaatcagatgctgcttcagacattgactatgaagcccaaaacaaaagtaaagaaaaacaaaacaaccccatagaataaacaagcatacaaaaactttaaaagtctactattaatatacttggaaaggtacagaatagattgcacccatgttataagaacagaataagatcctgataattttaagagaagaaaaaagggcccttaaaaattaaagcaagagagtagacctgaaaaatgtaacagaagagttggacgataaacttgaggaaatcgcccaagaagacacggagatgaacaatagaagagaaaagatacagaagattagagattaagactggcgtgttcaggccgggtgcggtggctcacgcctgtaatcccagcactttggaaggccgagacgggcggatcacgaggttaggagatygagaccatcctggctaacayggtgaaaccctgtctctactaaaaatacaaaaaaaattagctgggcgtggtggcgggcacctgtggtcccagctactcgggaggctgaggcaggagaatggtgtgaacctgggaggcggagctggcagtgagccgagatcgcgccactgcactctagcctgggcgacagagggagactctgtctcaaaaaaaaaaaaaaacaaaaaaaaacyggtgtgttcaatatttgaataattggtgctcaagagagaaaaagaatatgtaggagaggcagtcatcaataaaaccatacagaaaagtttactcaaaactcaagaaggacatgagtttccagattgaaagggttcttcaagtgcccagagaaacggatgaaaaaagacctgtcaaggcacgttatcatggagtttcagaacaaagtccaagagatcttaaaagcttagagagcaagggagagggtacatacgaagatcaaatataaaggatcgggaatcagctttggctttgccggcttcaataaacaatggtagaggcaagagacaccagagcaatgcttttcaaaattcttaagaaaaactattcccagcctagaattctgcacccagctaaattatcaatcaaatatgagtgtaaaataagggcattttcagatatgcaagatttacttcccatgcgttctttcttaaggggctactggaggctgtgcttcttgaatgagaggacaagccaagaaagaacatatgggacacaacaggtaggaatcaaacacaggagagtggtgaagggactctagggtaagggtgatgggagagtccagaatgacagttatgcactaggtgcagaaggaaacaagtccagcctgaagaagtgggacaccaggactccagggagagacacactgagggcttccatcaccaccrtccccactgccatcatgctaacttttaaatcaaggactcaatacccagagtctggcccagatttttcctttgtactttctttattttgaccacatgctgataaagttcctgctcattcctcgagtgctctgatgcttgatctactgtgggtgtcatccagaaatgttctgccttgacctcttctgggaagtggaggagaagtcgtgatgagcagaatatacacaacagccatctccttctgactatatcctggccaaacatctaaaactcggcccattctccagcgttaccgtatgtctcacctgtgctgagcccagtgattcccagtgttactcatcatcttactcaatgattttcccataaaaagctcttataaatgcttagggaagctgaagccagacaatgaccgagaggctgttcagtttatcttctcctcctgcgccttcctcaaacagtggtaacatcaccctttccttattcttctagattggtgcttgctgctcagtgtttcaaaactaagtcrtgttgtttagggatgtatatattggtggaaaactgtaaaggaaacaggagaatgattaacataagtcatcatcgtggttatcactgcggatggagaagagaccacaatttgggagggataagcagaggcttctaaaggactggttatgttttataccttaaactgggtagatgattatttaccttattattatattaggttggtgcaaaagtaattgtggcgtttgccattacttttaaatatttctgtcgagcaaattttatccatccttctatttgtatgatgcattttacaacaaaccatttaaaaaatcaggtgctggccgggcgcggtggctcatgcctataatcccggcactttgggaggccaaggagggcggatcacgaggtcaggagatcgagaccatcctggctaacatggtgaaaccccatctctactaaaaatacaaaaaattagccgggcttggtggtgggcacctgtagtccccagctacccaggaggctgaggcaggaaaattgcttgaacccgggaggcagagcttgcagtgaggcaagatcacgccactgcactccagcctgggcatcagagcgagactctgtctcaaaaaaaaatcaggtgctgttactcaataaaaggggaagtcaatgaaacaattagaaataagagatatttattctgaatctttggataacaaaaatacctgcaaagagaaaggataagaagggacaatttatttatttaatttatttttttgagacggagtcttgctctgtcacccaggctggagtgcaatggcgcgatcttggctcactgcaacctctgcctcccaggttcaagcaattctcctgcctcagcctcccaagtagctgggattacaggcgcctgtcaccacgcctggctaatttttgtgtttttagtagagctgggggtttcaccgtgttggccagaatggtctccatctcttgacctcgtgatccgcccgccttggcttcccaaagtgctgagattacaggcgtgagccactgcgcccggccctacattttattttttttaaagtgaaagcaaatttattaagaaagtgaaggaataaaagaatggctactccataggcagagcagccaggaagagacattttttttctctggctctttttttgctgtatctcaaaaagagtaggagttgttttgagcctacgcacggaaggaaccggaatagtaaaacttagcatttcctacaggcatctctgtgtgtctgtctgctctgttctctattagctctacagacactcctctgtttatgatggggctgtatcctgataaacccattgtaagttgaaaatatcgttaagtcaaaaatgcatgtaatacacctaacctagtctaaggtagcttagcctagcctaccttaartgtgctcagaacacttacattagcctcaagttggcaaaatgatctaacgcacagcccattttataataaagtgttgcctatctcatgtaatttattgaatattatgctgaaagtgaaaaacagaatggttgtatgggtatttgaggtacagtttctgctgaatgtgtattgcttttgcaccatcctaaagttgaaaaacaccaagttgaaccatcgtgggttggggattgtctgtataacgaatctccccaaaatgtattgtcttaaaataacaaccggccgggtgcggtggctcacgcctgtaatctcagcactttgggaggcgctgaggcgggcggatcacgaggtcaggagatcgagaccatcctggctaacacggtgagaccccgtctctactaaaaatacaaaaaattagccgggcgtggtggcaggcgcctgtagtcccagctaccgggaggctgaggcaggagaatggcgtgaacctgggaggcggagcttgcaaagtgagccgagatcgcgccactgcactccagcctgggcgacagagtgagactccaaaaaagaaaacagaaacaaacaaacaaaaaaaccaaccactacttatttgttggtttacaatgctgaactttgggaagggattgacaggaacagcttggttttgtttcatgtggtgttggctgggccgccttgcctggggctggagggtccgggtggtttcactcacctgtgtggctcagcagaggtgtctagaacagcaaaagactggccagaccaatctctccagcaggcagtcggtcttcttcttattatttttttattatactttaagttctggggtacatgtgcagaacgtgcagttttgttacataggtatacacgtgccatggtggtttgctgcacccatcaaccggtcacctacattaggtatttctcctaatgctatccctcccctagccccccaccccccaacaggccccagtgtgtgatgttcccctccctgtgtccatgtgttctcattgttcagctccccgttatgagtgagaacatgcggtgtttggttttctgttcctgtgttactttgctgagaatgatggtttctagctycatccatgtccctgcaaaggacatgaaatcatccttttttatggctgcatactattccatggtgtatatgtgccacattttctttatccagtctatcattgatggacatttgggttggttccaagtcattactattgtgamtagtgctgcaatagacataggtgtgcatgtgtctttatagtagaatgatttataatcctttggggtatatacccagtaatgggattgctgagtcaaatggtatttctggttctggatccttaaggaattgccacattgtcttccacaatgattgaactaattacactcccaccaacagtgtaaaagtgttcctgtttctccacatcctctccagcatctgttgtttcctgggcagttggtcttctttatgcagtggctcagggctccaagagaaggaaagtgcaagatgtcaagcctcttcgtggtcaagaactggcaccgtgtcacctctgcattctgttggtcaaagtaagtcacaagaccagtctagaacgcagggagacatagatttcatctcatgatgggagaattgcttactagatgagaagcatctgtggcaactatttttgcaaacaatttgccatatcttttcttccacctcataattttggtgtgtacgtaattttaatttgctatagccgaactccacatgtttttctgtcacctccaactttattgctaagtagcaaattctttttgtttaggtttaaattcctaagaacagttggtttaattcatctctttacctcgtgtcagtggtcggaggtcagaggccatcctattttttttttttcctgagtttttattttgaaaagccttagggtctgggcccagtggctcatgcctgtaatcccaacactttgggaggccaaggcgggtggatcacgaggtcaggagttcaagaccagcctggccaacatggtgaaaccccgtctctactaaaaatacaaaaattagccgggtgcagtgtcaggtgcctgtaatcccagctacttgggaggctgaggcaggagaatcgcttgaaccctgcgggtagaagttgcaatgagccgagatcgtgccactgtactctagcctgggcaacagagtaagactccatctaaaaaaaaaaaaaatgcctttgggatagttgtaagaacagtaccatgaatgcctatagacgcttcacttagattcaccagttttaacgttggccacatttgtttgatcacacattctttctccaagcatatatatatggagttggttgaagacatcatgacattttacctttaaatactttagcatatatctgctgagaacaagggcattctcttacataaccacaaccaaattaccacactcaagaaatttaacatttctatacaactatcatctagtgtactaactatattcatatttccacaattgccccgtcgtgtcctttatataccattcttttttgatccaatacttaatctgtgatcacacatcaaaattagttgccatgtccccctaatattctgtttttttgaaagacaggaggatctcactcccttgcccagataggaatgcagtggcttgatcatggctcattgcagccttgacctcctgggttcaagtgatcctcccgcctcattttttgatttttcttgtatatagagatggggtctcactatgttgcccgggctggtcttgaattcctgggctcaagtgatcctcctgcctctgcctcccaaagtgttgggattacaggcgtgagcctccctaatgttatttaatttagataagttctctgtcctcttttgtcttttaggacattgacattttggagagtctaggctggttgtttagtacaatgtctttcaatatggatttgcctgattgtttcctcatgattagattcagcttaaacatttttagcaagactacgccataggtgatgtgtggccagtcacttcaggggctactcttagacaattgttggccagttgcctgtgctttgctcccatcccaccccacctcccatcatttcctttgcctgaagtcttttgggtaagtttggccacagaaagatgatagcagatgactggagggtgggaggaggggaaagcctaggatattgccccctatttctctgttttccgtgacagcttttcttgtgtgtctccaattcctcccaaccaaacgctctctctgtggttccagctcctgcgggggaaataccctctccttagttctggctctttctgtttggcctcaacttctgtgctctgatgaaactacctcatcccgttgaccctttagttccagggtggcagttgcttttggctgttgccgacctctcagtggcctcatcatctcatcctgtgtttggcttctcagcttttccatttcctgtgtaaccaatttccttattaacgttcctctttatttggtttgaaaagtctagggtggtgtctgttttcttgactaaaccttgactaatataggtagggttttcatcgtcagtgtgatttgtgtgacttgtggaatggggccacgtggcacaaaataaggcagcattagcaacaggagttatatgagtggaaattcctttataaggagaaataagcagtgtaggcctcctccctggttacacaaaaggaaatatacaaaaaagaaacatctcaaggtggtagaattttgtatggtttttatattatttttcttcttttctgttcatccaaattacctaaatttttttttacaatggatgtagatacttttgacatgaagaaaaaattgccatatttgtaaacaaatgaaggagaatggtgtacaggtgtacaagttgtatacaataaaatattatcagaggatacaaaagtggctaacccccatcaaaagacaaaagacaaaattacaacaaatttagagaccttaattggtttttatttgccattctagagtaaggtaacacctcatcctacaaaatagaatgagtgctctgagttgctgagcagaggtggtggtaggcagaaaatggctgaggaaagcagaaatagaaaataaaaggtagactggttgtttcagagttactttcctcgtaaagattaaagcagagtggacttccttattataccagctaaaattgggttgtttggggatttggctattatgtctcactctcctgatttcttggaaggtcagataaacaacttagttttgtcttgatgatgtgggcctgtagcatgagtgactccattttggtttggtctgttggacttagtataggagctcagtcaaaaccaatggcctccgatacattttatttaatacccccacaaaagcatttggctcccaaaccttttaaatagaaaaaataagaaggtcattcagtgtaagatgataaaaagagtaacaagagactactcttatgaaatttcttcatataaaatgcttatactttttggtatgtctgatatagtttataatctaataatttaaaaaaatttcacaaaaaacaaaatcgtaaaatgggaaatggtttagttgttgaggttttcacgtgatcactctagctcacaaatgggcaagtctccagtgatcaagaaaaaactacactggtacttatggaaatgtttacatttaataggtgacataacagtgattgtttataacaattaaaggcacttttttcaacgtttaattacttagctatccttaggaattttggaaagctcattagaaactgaagaatttaaaggggtaccaaagtagctgaagcatgagttagaattcatagaaaatgagtaaaaaagactaggaaatattagtgaaaagatcaaatagactgcaaggttacaataaaactgcagtaaccaagacaaacagaaataatcagagataaaatggattactggaaatgagaagtgcaaaaatgtagaggtactcagtaagtatcagatttgaaaaattaacaagaagttttcacagaagagcctaacataggaaatatgtactgtaagtgagggcatgcgaaaacctgcttccaccctacgtataatccaatataatctggtacaaaatgtcttgaagagtcaaaagaaggtagtttcctaggtgtttaactgtttcaatggctcccrtcagtaagtcatagctagcaatggacttctgacttaaacctgctcatacctgctgctatggtttgaatgtctcctccaaaacccttattgaaatttaattgccatcatgatagtattaagagatgggacctttaaagggtaattaggtcatgagggcttggcccttgtgaatagattgacgttatcatgggagtggcttagctgtcgtgggagttaggtctccattttctgtctctgttttgtgtgcttgcttgcccttctgccatgggttgatgcagcargaaggtccttgccagattctgacaccatgttcttaggctttctagcctccagaactgtgagtcaaataaattgctattctttttaaattaaattaaatttatttatatattttgagatggagtcttgcactgttgcccaggatggagcacagtggcatgatctgggctcactgcaagctccacctcctgggttcacgccattctcctgcctcagcctcccggtagctgggactacaggcacccgccaccatgcccggctaattttttgtacttttagtagagatggggtttcaccatgttagacaggatagtcttgatctcctgacctcgtgatccacccacctcggcctcccaaagtgctgggattacaggcatgagccactgcacccagcagccactgctattctttataaattaccaagttggtgacagtccattatagcagcagaaaatggactaagacatctgccaaaacatgtatttagtcagagtctgattaaggttctctcaagagtttattcattgggctcactaagtgctatatgttagaagaataagattgttaattctgtctgaaatgaagcatattaataaataaatgcattgacattttattgtgaataattatgaccttctagtattgcatatttatgttatagcttaggaacttagaagaaagtaccaagtcagagtcaagcctgtttgtctttacgacctgcactgagacaagaatctgggttgaagtagtatctctgattctgagaatctcttactttaggattttccattgacaatattggaaaacatgatctggattatgcaatatttggctcttcataggctgcaaagttttgaaaggtgctggtgtgaatcttggcagagatctctggcttaggcattcctttactttctcccaacttcatcctgcgtaaatatctcattagagcgatatctactaattcacagggctatagtgacactctattgacacatcaggaaaactttaggacacaggactgggaggagaaaacgggcttgggataccttcttatagctatgtacctaacactaccaaaataataaaaaacccaatggcttttatgcttaaaaattgatatttattaattatataattcaagcccttttcttttaagtctccccccactctgtttgtagaagttcgaggtcatgattacctttccaatttccagagacactataaaataaccatcattagatttttagctgtaggtaataaatagaagagttattataacattctgagcataatagctggtgttcctagaaatatccaggacaactgtcatttgtcatttctggcaatgtctaaggccttgaggcatcaaacaggcatctaaatggaaaatctgtctgaactgtggtcagtggagggttgagattcttttgaaagctattgatgtgcagttatgtgaaatacaaccgccatttatgcctgtaatctgcttgagagtaatcatgtacatagttaatactccaaactacttttctttttttttttcttttattattatcctttaagttttagggtacctgtgcacattgtgcaggttagttacatatgtatacatgtgccatgctggtgcgctgcacccactaactcgtcatctagcattaggtatatctcccagtgctatccctcccccstccccccaccccacaacagtccccagagtgtgatgttccccttcctgtgtccatgtgatctcattgttcagttcccacctatgagcgagaatatgyggtgtttggttttttgttcttgtgatagtttactgagaatgatgatttccaatttcatccatgtccctacaaaggacatgaactcatcattttttatggctgcatagtattccatggtgtatatgtgccacattttcttaatccagtctatcattgttggacatttgggttggttccaagtctttgctattgtgaatagtgccgcaataaacgtacgtgtgcatgtgtctttatagcagcatgatttacagtcctttgggtatatacccagtaatgggatggctgggtcgaatggtatttctagttctagatctctgaggaatcgccacactgacttccacaatggttgaactagtttacagtcccaccaacagtgtaaaagtgttcctatttctccacattctctccagcacctgttgtttcctgactttttaatgattgccattctaactggtgtgagatggtatctcattgtggttttgatttgcatttctctgatggccagtgatgatgagcattttttcatgtgttttttggctgcataaatgtcttcttttgagaagtgtctgttcatgtcctttgcccactttttgatggggttgtttgttttttttttgtaaatttgtttgagttcattgtagattctggatattagccctttgtcagatgagtaggttgcgaaaattttctcccattttgtaggttgcctgttcatcactctgatggtagtttcttttgctgtacagaagctctttaatttaattagatcccatttgtcaattttgtcttttgttgccattgcttttggtgttttagacatgaagtccttgcccatgcctrtgtcctgaatggtattgcctaggttttcttctagggtttttatggttttaagtctaacgtttaagtctttaatccatcttgaattgatttttgtatgaggtgtaaggaagggatccagtttcagctttctacatatggctagccagttttcccagcaccatttattaaatagggaatcctttccccattgcttgtttttctcaggtttgtcaaagatcagatagttgtagatatgcggcgttatttctgagggctctgttctgttccattgatctatatctctgttttggtaccagtaccatgctgttttggttactgtaaactacttttccattcagatcattttagtttggttaattatgtaaaagcaaatatttgtttagagtaatgcygctgctccattaatgaattattgcctggttccctcgttattgtacatctcagtcactttcaattatgctcaaaaggcgcatctctcaaaggaatctttttttttttcttcccacactcactcagtttaacttcctctcctggtttatctaaacaggaattcatcttcattttaggaagtacttacttcacaaattagctttccttacattctttctaaagcaaaacaaatctagttttgtttctaagaatcgaaatcagaaatgctataacttaaattttgtaactgcttaacaacaaacacaccgactacaagtttttcttaaagacaacattgcccatttccagagtatatattttttcaattaatagacttcattttaagagaaattttagatttacggaaaaattaagcagaaagtgagaatctattttttgagcagaaatttttgagagctcacaaaatttcagggtctgttgtaatagttgggtttctgttycaatgagcttgtggatacaccaatagcttatagccaagtgcatatcagtacccatcaaatccatgagtgagatatttttctttaaatcacatggctctaaatgacaggttttacatatacttagccctctataatggcagaggtggaatctgtggatacagagggccgactgttacctggaaagccagggtttgtttgcctggtgagtaacaagcgaccctccgtgagaatgcaggttatgatgaataggagtgttcttagttggcacaagaaaggcaggtactgggagtattctcgaaaacagcgtcttctcaagggaaagtgacaggaggctgtcgacaaaaagggctaaagtgtaacatagttaaaaaggtttattctgagtgaaatgagtgaccaaggcccacgacacagccccaggaggtcctgtgaacatgggcccaaggtgctcgggccacagcttgattttatacgttttagggtgacagaagttacacagataccaatcaatacgtgtcaggtgtgcgtcaattcagcctgaaaaggtgggacaactcaaggcagcagcttccaggtcataggtggattgaaagattttctgactggaaattggttgaaagagttatgttatcttttttatttatttatttttttgagacagagcctcactttgtcacccaggctggagtgcaatggcactatctgggctcactgcaacctccgcctcccgggttcaagtgattctcctgccgcagcctcctgattagctgggattacaggcacacaccatgcctggctaatttttgtacttttagtagagacgaggtttcaccatgttggccaggttggtattgaagcaccagtgtaccagcagcagcggaggtcctcctccttgcagaccagggttaccgcataggcagtgtgcccagagtagcagctcagaggcaggtctgcactcatacccacttctaattatatgcaaattaaaggagttatgcagaaatttctagaatgagggtgatagcttcccagttgtcaggtcgttgccatggaaaggggcagtaacctccaggtgttgccatggcaatggtcaactgacttggcacactggtgggtgtgtcttatgagaaggtgcttctgccccccaccccaccccgcaccccgacctgtttttagctagccttcaactggtctagtgtcctagccccacctctggagtcaagtcctgcctcccacctcagaatcttggtctccacaaccccttatcttaacccagacaattcctttctattgatttcaggtccttagataataacaacttggctgggcacagtggctcacgcctgtaatcccagcactttgggaggccaaggcgggcggatcacctgaggtggggagttcgagaccagcctgatcaacatggagagactccatttctactaaaaatacaaaattagccgggcattgtggcgcctgcctgtaatcccagctactcaggaggctgaggcaggagaatcgcttgaaccggggaaacggaggttgtggtgagctgagattgtgccactgcactccagcctgggcaataagagggaaactacatctcaaaaaaaaaaaaaaaaaaaaaaaaagagagagagagtgagagagagagagagagagagagagagagagagaaaatggctcaacagcaaatgcaggcatttatgtccaggataaacttatagaggkgggggaccagcttagtgtcagtgcccactgcttacaggctggggtatttataggtatgggcgggaggggcctgggcagtatggcttgctgcctgataggatattgataagatgttcctttgatcaggcggtttggcccttgttctggtggagtgtggtgttccttgcattttctcctagcagaataagataagaggcaggctgtttctcacggtccgaacccccgtggaatgttccactttgaccaaggtctgtgaaatggcgggagacttacataatggtgcagtttggactaacacttttgagggctcttgttttttttgactgtatatattttctaggaggagaacaagtttctgggtactcttaaatattacttgtgagctttaagttactcagtgatttgacttacggtggtggttatctttaaataygtcatgctttttttcttaaccatttttagtgtggactgtatagaatacacaaaaggccaccatatttatatacaatttaaaaaataatttaaagcaaattaaaaagtacccagatagctacaacccagtccaagagttagaatatggacagagtccctttccccactccatcccctacctgcaacaaacctcttcctcttcccggaagtaaccactctccaaacgtgtgacaatcacttccttgcaaatgtttatagttttacacttctatatgcattgcttaattttgccttttatgtttagacctttaatctacttgaaatttatttacgtatgatataaaggtccatttttttccatatggacacttccctgtcccaccactgtctattagaatttctacttcctcgcctgatctacactaccactgaggcaggagaatagggtctggaggcagggaagctaaggctgattcatgctgcttatgagggaaaggaggggttgaattgggcttaggttcggaacccaagcccgattcatcccttttcaacccctccttttttctgcgaggcagttgaaaaatgaaagtacctctgattggtcccctcctgcaaccaatcagactggtcgggggccaatgggaaccctctagagggtatttaaacctcagaaaattcagtaacaggctttggagctgcttgcttgagcccactgtcctctgttggagtaaatctctgctttccctgccttgctttgtgtgttttgtccaattctcagttcaaaacgccaagaacctggccaactacccttcagctggtaacgtattttggtgagccagccaggaggtaagcccaacgtttgggatttattttcctttttgtcctctttctctctcttttcctttccaactcgggactctcggtggacagygcctaggcatggaggcaaccgcaggtttgtggttggggccactctccagggaaactgaaagggttccgtgtggaagcgcctgatcaccaccacccggtttgggtgagggacctgagtccttttcttttcagtcttgcagcagctgtttcctggcaggrcaaatggtcagaaataccatatgtacaggccttcacggccctacgccaaaacctaatcatctccgcaaagaaagtccaaagacaggactagatagtatagatgacccccttttataagggccacctgtctctcagggtgaacataaccgcccccacgtagccccttgccaagtgctcctgaggctaaaacccaaaccctggacaccctactaggtccccctcacgctcggaggggacactacattccactctccctccagccctgctaccccttcaggaagtagcaggagccgaggggccagtcctagtgcaggccaccttctctataactgatatacaacggtgtcagggaaagctaggaagctcttctaagaatcccaggaaattagcagatgggttccaaactttgacctcagccttcgatctctcacagagaaatgttcaattcattctagcaacctcttgcaccccctttgaaaaggaatgaatcttttgaggctgcccactgggaagcagacgatttatttgcccaaaaccctcagggcaatcacctgggcccagacacagtccccacaactgatcctaattgagactctaatgctctcgtgggaacgaaaaactgggctaaatttcttgaggctctccttggaggaatgagaaagggaataactaaggcagtaagtgatgatgaagtaagggaggttccaccggaccaggtaacccttgccatgctcatgctacaatctggaaaggaagagggctgctaactagcaaacactcccctgtaaagcataggcctgaaattctgcagcttttggaagcaatacacctgccaaaggctgtagctgtaattcattgcagggagcatcaaagggccttaacccttatagcacaaggaaacagaaaggctgatagagaagcgaaagctgtagttctcagggtgcaatcccaacagattccagctctacttcttttctgtgattccccaatggagcctgaatacacaccacaggaagaacagttaataaaggagcaagggggacaaaacccaggatgctggtggtacatggcatcaaaaccacatctccctcaagcagcctgatggagaattagaaaaactctgcatgactctttgcatatggggagagaagccaccctggccgtggttaacaggctcttcattgagcctaacttagcttctgtggttaagcatgtctgtcaaacctgctcactgtgtgcactgaacagcccaggaaacagaatgcctcctgtaatagaaccagtccagaggggagttgtattagaggacgctgatagaacatacccaggaaaagatgggcgattagacttcacacatatgccagctggcagaggttataagtttttgttagtgctaatagatatctttactggttgggtcgaagcttatcctaccagatcagagaaggctactgtggttataaggttctcttaaaagaaataatcccccagtttgggttacttcagcgtctccaaagtgataacggcccatactttatctcccagataactcaagtagttgctaaggctctcagaatcaaatactatttacattcagcatggaggcctcaatcctctgggaaagtagaaagggctaatcaacctctaaaaggatcgttagctaagttcgatcaggaaacatcagaagcttgggtcagcttactgcccatagctctcttaaaaatctgtaatacccctagagcaaaatttaatataagcctatacgaagsctattagtttgtttttakgtgtgtgtgtgtgtgtttttttttttttttttgagacggagtctctctctatcgcctaggctggagtgcagtggcrcgatcttggctcactgcaagctccgcctcccgggttcacgccattctcctgcctcagcctcccgagtagctgggactacaggcgcccgccagcacgcccagctaatattttgtatttttagtagagacggggtttcaccgtgttagccaggatggtctcgatctcctgaccttgtgatctgcccgcctcggcctcccaaagtgctgggattacaggcctgagccactgtgcccggccttgtttttttggacatggaattttcgctcttgttgcccaggctggagtacaatgccttgatcttggctcactgcaayctctgccttccgggttcaagcgattctcctgcctcggcctcccgagtagctggaattacaggcatgaaccaccatgcccggctaattttgtatttttagtagagayggggtttctccacgttggtcaggctggtcttgaactcctaacctcaggtgatctgcccgccttggcctcccaaagtgctgggattacagaaggctattcttaactgatgatgtaattactgattcagaaacagctggtttagtaaaatacctagttaacctaggacaatgtcagcaggtttatacagaagtttggaactcaaaggcttccggtactggaagctaaccagccacctcaaatcaggccagcagataaggtgcttgttaaagcatggacggaggggtcacctcctcaacaattacaaccccaatggaaggcaccgttttcagtgatactggccacgccttctgcggtcaaagtactgggattagatagttggatacacctttcaaggatcaagtctgtgatacctgaagccccggacctggaacctgaagttcccatcagccmctgcacctgtgaacctgtggcagccctgaagtacctgtttagaagacagccaaaararaaatgcctaccaacgttccttggtgtttttgttgcatagttactgtaggstggataatagtagccatgtttktttttttttttttttttttgcagattaattaccttctttcaaacagttggaatcacttccttcatagtaattaagtagaatcttttaattcwtttctataacaaacattcctgacagcataggtgtccacctcctgaagttcccatgaaatcttttaaccattcatttcctcttgcctggagatgattgtgcagtaaggtttccagccagttccaaatgaattcaccacccctggccatcaagaaactaccctgtctccactagacagagcagggtgagagttctgtgattccaataggcagggactgtcagtcaagtcagtgtgacgcagttacagaaaaaagaccatcagtccctctgtctcacataaagacttacggggatcctgtctctcagggggggaaatgaggcaggagaatagggtctggaggcaggaaacctaaggccggttcatgctcactggatatcagaggctactcttcaacaccccctttttctgcgcgacagttgctgcccctcctttttctgcctggcggttgaaaaatgaaagtacctctgattggtcccctcctgcaaccaatcagactggtcgggggacaatgggaaactcctagagggaattgaaaccccagaaaattctgtaaccaagaatcttgagctgcttgcatgagccacccccaccctgtggagtgtactttcatttaaaacaaatctctgctcttgctgccttgctttgtccattttgtccagttctttgttcaaaacgccaagaacctggacaactaccctcagctggtaacaccacctctgtcaaaaatgaagtgtccatatatgcctgtttctgggctgtccattcttctattccaattgttctacttgtcaatccctgtgttaataccatgccatcttcaaaacaggtcatttctattgatgtctggcttgtttgctcatactagccatagcatgtcttgcctgattgcaatctcctaattttgttgagacttactttatcgtccagcgtgattcactttgtaaaggtcctgtgagttctcgaaaagagtgtgtggtatgcagtgttgggtgctgtgttgtgtgaatgtccacttgatcaagtctgttaattgtgttcaaatctatgttcttactgatttttcatctacttgttctatcaattattttccttccataggtcccccttttctggggatttcctcctcaatttccagcttctctgggagccccaaatcgaatctctagctccacatcccctaaaattgcttctttctgtttgagatctcttccgctgtgtgcagcagcagcaagctgggaagtccctcaggagaaaaatcttggtaaatgtggagctcatctcacgtgcttccttcattttgaggactgtctgttccctgctcagtttctgcctgctaaggtttatctccagtcccttcaaagacctgtttgttatattttgcccagagtttataaataattttggcagaggggttaatctgataccgtctagtcctccaaaacaagaactagaactctggccacatctgttttcatccagtcttttgatgctcaaattataacggccgtgaccccttagttaaaagaagcttcatctttcctctgcagtatcttcttgtgatagtctaaagggattagtctttattaatactgactgtgagggaagaaacaagaaaggctgatttttcctctaaatgtcccatcctctcacaccagtcagaataggtattattaaaaagctgaaaaataacagatgctggccgggcgtggtggctcatgcctgtaatcccagcactttgggaggccgagacgggtggatcatgaggtcaggagatcgagaccatcctggctaacacggtgaaaccccatctctactaaaaatacaaaaaaaattagctgggcgtggtggcgggcgcctgtagtcccagctactcgggaggctgaggcaggagaatggcrtgaacctgagagtcagagtttgcagtgagccragatcgcgccactgcacyccagcctgggcgacacagcgagactctgtctcaaacaacaacaacaacaacaacaacaacaacaacaaacatgctggtgagattgcagagaaaagggaatgcttattcactgttggtggaaatgtaaattagttcagtcattgtgcaaagcattgtggagccttctcaaagagcttcaaacagaactaccatttgacccagtaatctccttattgggtatatacctgcagtagaccacactgctataaggacatatgcaagactgggtaatttataaagaaaaagaggtttaatggactcacagttccacatggccagggaggcctcacaatcatggcggaaggtrgagaggagcaaaggcacatcttacatggcagcaagcaagagagtgtgtataggggaactgccctttataaaaccatcatatcttgtgagacttattcactatcatgagaacagcttgggaagaaccygcccccatgattcaattacctttcactgggttcctcccatgatacatggggattatgagagctacaattcaagatgagatttgggtggagacacagccaaaccataccaatacccaaaggaaaataaattgttctaccataaagacacacgcactcatatgttcattgcagcactactcacmatagcaaagacacggaatcaacctaaatgcccatcatcaatacaccagataaagaaaaggtggcacatatacatcgtggaatactgtgcatccataaaaaagaacaagatcatgttctttgcagcaacatggaaggagctgggggccattatcttaagtgaactaatgcaggaacaggaaaccaaatactgcatgttctcacttagaagtaggacctaaacattgagtacacatggacacaaagaagggaacagtagacactgaggcctttgtgagggtggagagtgggaggaggctaaggatcaaaaactacctattgggtactatgcttatcagctgggtgacaaaacagtttgtacaccaaacccccatgatactcaatttacctgtacaacaaacctgcatgtgtaccctgaacctaaaataaaagttaaaaaaagagataaaatttgtaatcaacagcaacaaccacaaaagcttttgtttcacaaagcattcattacaatatgtaaaatagtaatacttaggacagttggcaactcattaagaatccaaaatgatggtgattatttgacaaattcccactctatgccagctctaagtcctagttcctgactacacggtgcagagtgggcttaaattagtcagggaccttaacatttttaaaatcacggtgaagttttaacaattttaaagtgtacaattcagtggcattaagcctgttcacccatgttatgcagccatcacctctatctcggtccagaactttaaaaaatcaccctaaacagaaatgctaactaagcagtcactctccatttctctctcttctcagcacttggcaaccactaatctgctttctgtctctatggatttgcctattctggacatttcwtataaatggaatcattcaatatgtggtcttcggtgtctggcttcctttatttagcataattttgtttgtttgtttgtttgtttgtttttgagacagatcctcactctgtctcccaggctggagtgcagtggcacgatctcagctcactgcaacctccgcctcctgggttcaagtgattctcctgcctcagcctcccaagtagctgggactacaggcgtgcgccaccatgcccaggtaatttttgtatttytagtagagatgaggttccaccatgttggtcaggctggtctcgaactcctgacctcatgatctgcccacctcatcctcccaaagtgctgggattacaggcatgagccactgcacccggccagcttagcatagtgtttttgagggtcatccatgttgtatttttcgttcattcctttttatggatgaagaacatttaactttatggtatcaaaacacattttttttattcatctgttggtggacagttagattgttttaaccttttggctattgtgaatagagctgctgtgttcactggtgtataacattttgtaaacaaatggaaacgtttttatttgaacacctgcttttacttctcttgggtacatatttaggagtggaattgctaggtcatgtgataattctgtgtttattgaagaatcaccaaactgttttccacagtggttgtaccatttttcatccccaccagcaatgtatgaaggttccaatttctccacagctttaccaacatttattctctatttttaagaaatggctatcctagtgggtgtaaaatggtatatctcattgtgcttttgacttgcctttctctaatgactaatgacattgaatatctttttgtgtgctttttggccatttatatatcttcagagaaatgtctattcaagtcttttgtccctttttaaattgggttgtgttttgttgttgagttggatttttaaagctttaaattgcagaaaacactagcttacacaaaaaatgattttcttttttttgaggaggaggcttacacagctggaaggtaaaaggagtgatttgtttagttccaggaattctaacaatgtgaggagggctctgtgtcctctttacatctgtcagctgtgatttcctcaaattcgttgcagaggtttcttttactacagagtggcaaggcgaccttcagtagcaccacatccatctcattcctgaccgacagtggaaagaaatcttcctaataccttccattttaaaggaataacattaggagaaatatctaacgtagatgacgggttgatgggtgcagcaaaccaccatgggacgtgtatacctatgttaacaaacctgcacgttctccacatatatcccagaacttaatgtataataaaaaattacttttawatttatttatttatttagagacagggtcttgctctgttgcccaggctggagtatagtggtgcaatcacagctcaccacagccttgaccacccaggctcaagtgatccacccacctcagcctcctgagtagctgggactgcaggtgtgcatcaccatgcctggctaatttttttttttttttttttttttttaagatggagtctcgctctgtcacccaggctggagtgcagtggcgagatctcagctcactgtaagctccgcctcccgggttcacaccattctcctgcctcagcctaccgagtagctaggattacaggcgcccaccaccatgcccagctaacttttttgtatttttagtagagacgggtttcaccatattagccaggatggtctcgatctcctgacctcatgatccgtccgcctcggcctccagctaatttttttgtttttcatagagacaaggtctccctatgttgcccagtctggtcttgaactcctgggctcaagcaatcctcccacctcagcctcccaaaatgttggaattacaggtgtgagccactacacccactctctaatacctttcagaaaatgtccagggagaacctagtttagatttcatgtccagatcttaaatgatcatggtagccgatgttatgggtagcataatttgctgagtctaggtcatgtacccactgatgtcgtcatggtggcaagtcagtgttggccctgtcctaaccacagggaaggggttctctacagaaaagtagagtttagatctgagaaggtagttgagaatgagtgccgtatagtgaataatagtagatttttaccccattttacccctttgtctttggttgtatatatattcacataccattctaattatacatatagtttcaaaaatgcctctgcttctccaaacacaactatactttatatatattttcaaaaacagttctacctccttcttccaaagataaatatctgtgttttgtgtcctccatggccacccctaagagaggtgcaaggaggatttcattcctgggaattacctactttaatagcctgggtatttactgaaggactgaagaattacaggcacctatttccaggcttggcatttttaagcagtatttaaaacctcagttgacatttgatgattctgtggcataataaccacatccagagatcttgtctaaacctggaccttgactcttgatcctcatcttgtggtttctatttcttgccaataatctattctggcttttccccatctcccaaaataatgctttcactttgctgtctgctttgaacaatgtgaaagacttgaaggggaaaatgaagctaaataatgtggcatttcccccaagattataacctactggatgcatttttataagggatatgatgcttttgtctggcaaagaatacctagaatataatatttgagagagaatcagacttcccaaattttctggctcatccaagacccaatattttatttattcatttaatcattttttcaacaatttaaaaaattgatggataataagttacatagtttcagggcacacatgataacttaatacattcatataatttgtatacatcacatcagtgtacttgggatatccatcaccttaatatttgtctttatcctagaaatgtttgaatttttctcttctaatttgaaatgtacagtatgtttttgtaaactatagtcaccctactcatctgttgaacactggagcttatttcttctctcaactttatatttgtattgatttatcaacttctttgaatcccctacttctgctacccttgctggcttctggtaaccaccaatctactctctaccttcatgagatccactttttcttagcttccacatatgagtgagaacacgtagtatttgtctctttgtgtcacttaacataatgacttctagttttatttatgttgctgcaaatgacaggattttattcctttttacagatgaataatattccattgtgtatatataccacgttttctttagccattcattcgttgatgggcacttagatcgattccatattttggctattgtgaatagtgctgcaataaacatgggcgtgcagatagctctttgatatattcatttcctttcttttggagatatacccaggagtgggattcctggatcatatggtagcacaatttttagttttttgaggaacctccaagctattctgtgtagtagctgtactaatttccattcccaccaacagtgtacaagggttccctttcttccacatcctcgctagcctgcgttattgcctgtcttcttgataaaagccattttaactggggcgagatgatatctcattgatttgcatttctctaataatttgtgatgttgaatattttttatatgcctgttggccatttgtatggcttcttttgagaaatgtctactcagatctattgcccatttttaaattggattatgttgtttttgtttgtttgtttgtttttgctattgagttgtttgagctccccataccttctggttattaaccccgtctcaggtggttagttatattttctgccattctgtgggttttctcttcactttattgattatttcctttgctatgcagaagtttttagcttgaaataatcccatttgtctatttttactttgtttgcctatgcttttgagatctgacataaaaaaatcttcacccagaccaatgtcctggagtgattcctcaatgttttcttctagtagtttcatggtttgaggatttagatttaatctttaatcaattttgatttgctttttgtatatggtaagagagaaggatccagtttcattcttctgcatatagttatctagttttcttggcaccatttattgaaaagcctatccttccccccattatatgttcttggtacctttgttgaagatgagctggccgtaaatgtgtggatttacatctgcgttctctattctgtcccattggtctattctgtctgtttttatgccagtgtcatactgatttggttactatagctttgtagtaaaatttgaagtcaggtagtgtaatgcctccagctttgttccttttgctcagattgctttggttatttggggtcttttgtggttccatatatgtcttaagatttttttctatttctgtagagaatgtaattggattgcatttaatctgtaaattgctttgagtagtattataatttaaccaatattaagtatttcagttcgtgaatctggaatatcttttcattttgttgtgtccctttcaatttctttcccaatattttagtatggtatttctttatctctttgcttttgtcttcacaaattttagcttaggatgcagaatttggccttttcaaattctgactcccagtcctcaaggattgcaaggtatgggtataaagatttttctaaaaaatgaagtttcattattccctctctgcttttagatagtatagcttggactgaacttctgcttttctcatataatattatttgaggccacaagtaatgttcaatatcttgctatttttcttggggctgagtccaaagatttaacaaatcattggatagccagttgcatttctactgtataacaaaacttttcaaatattatttagggatgggaataattatctcctctctgttttgcaccccacactatctcagctattttcatatgttagagcctgttacttaaattatctgattcttaggtataaatgactcaggactttttcctttgcagatgacagaaacccaactcaaaactgctttaacaaaattaaagtgggtggtggggagtgcagatgtgtgtttcagaggagggaagattatctccacatctacaagtacatgctagattgggcactgatggacagaatcatcagtttattagtgaagcataacttgtgtgaacgagacaagctggctcaagcatttgaagatgcttttgaggtactgaggcaacattcaactggagatcttcaaaacttacctggttttcatcagtgattgtmcccatgtcagaggagattccaactgctatggaatgttgcttacagaggaatctatttataattggagaactttaataaataatgctgcagacttctattttgaaggaaccattcattgatctttgtggaacataactgaaagccagctggtgcagtctgctgttttccagcaacagggaggacaaggcgggaagcttctctgactgtttgaataacttcacaaatctcagtataatcccaagatggcatctgcattcagtaagtagataaaaccaaaggcagtttccagtttgtatcaaaaaatgaagaaaaatttgccaaactttgaggaataagaaagggcaataggaagaccatggtctatcagaaaatggccagggaactgaggaattatggaaaaactcaggaaatcaacaaaatctggagaaagctcatttaccaatgagcttcagtggggccattctctgaagatctctccatcttgtttctctgagaaagagatcgtctactcacagtatgttcaactgatcaagaacatctcagtttaagtaattggaatgcaaactaaaattttacatatgccagttaccatgagcttagtcaccatgattgctaaatatactctcccatttcatcatcttttttggcattagaaatccctacaagcttcaggatttttctcttaaagcaaatactgaagataaaaaaattagcttcattsaggctatcttttatcaaatagcacataatttatacagacttggtgggaaattctgccagtgaacaactttgttgtttcaaatcatcaagccccatttgaaagtatggactaaatatccttgcttttactattctctatgcagccactttcttctaggttaacaatgccagtgcagatgatttgatttatgtattaatttaaacattttcctgtcttacactcaggtgaaaaatcatttggatatatatctgatggctttacaaaaattatttacaaaaagtaattgcatataatacagtgtttwtgccaaagtatgtttatgtcttaaaaactttagtggaaatgtgtattcaggtcccttgctcattttctaattgggtttcttgttttcttaatattgagttgttggagctccttctgtattttggatattaatcccttgtcagatgtatggcttgcagctgttttctcccaatctgtgagttgtttctgcatgctgttggttgtttcattggctatgcagaagctttttagtttgatgtaatctgatttgtctatttttgcttttgttgcctgtgcttttggggtcacatccaaaaaaccgttgcccagagagtgtcatgtagtttttcctccctgtgttttcttccagtaagtttagagtttctggtattacgtttgaatctttaattcattttaatttgatttttagttctatatatggtgtgagataagggtccaattttattgttctgcaggtggaaatttcattttcccaacactatttattgaagggactgtcctcttcctattgcgtattctggtacctttgttgaaaatcaattgactgtatagtagtaggttaatttccaagctctctattccactccattagtcaatgtgtctgtctttttttttttttttttttccaataccatgttgttttgattgctatagatttgtagtatactttgaaatctggtggtgtgatacctccagctttgtcctttttgttcatgattgccttggttgtttgaggtttttgttgtccatatgaatttttgttttgttttgttttttgagatggagtctcactctatggcccaaactggagtgcaagtggtgcaatcaaggctcactgcaacctccgcctcccagcttcaagtgattctcgtccctcagcctcccaagtagctgggattacaggtgagtgccaccatgcctggctgatttttgtatttttagcagagatggggttttaccatgttggctaggttggtctcgaactcctgatctcaggtgatcctcccacctcggcctcccgaagtgctgagattccaggtgtaagccaccatgtccagccccatatgaagttttggattttttttttatttctaygaaaagtgatgttgggatattcatagggattgcattgaatttgtagatcactttgggtagtataacattttagtaatattagttcttctgaaccatgaacatgaaatatctttccatttatttgtgtcttattcagtttatttcatcaacaccttatagttttcgttgtataagtcttttgtctccttggttaaatctattgccaatttctttttcttgcttaattgctctgtctagaacttccaattccatgttgagtgggcattgttgtcttgttccagatcttgggggaaaggctttcagttattcactgctgagtcactgttagctgtcagcatctctggatagcttttattgttgagctacctttcttgtatacctaatttggtgattgtttttatggttaagggatgttgaattttgtcaatttttttctgcttctgatgagataatcatatgatttttgtcatttattctgttaatgtggcatatcatttattgacttgcatatgttgaacmctccttgcattccagagataaagacatttctcaaaagaatacatataaatggctaacagatataatgaaaaatactcgatattgctaatcattagggaaatgcaaattaaagccataatgagacatcatctcatactggtcagaatggcttttatcaaaaatatgaaagataaatgttgtcaagaatgtggagaaaagggaacaattgtacaatgttggtgggaatataaattagtatagtcaatatggaaaacagtatggaggttcttcaaaaaactaaacataaaattgccatatgatcttgaaatcccacttctgggtatttaccaaaaaggtttaaaatcagtttgttgaagagatgtctataccccatgttcattgcagcactattcacaatagcaagttacagaatcaacttaactgtgcatcaacaaatgagtggataaagacaatgttgcatacttacagaaaggaatactatgaagccttaaaaaagaaagacattctcggccaggcatggtggctcacacctgtaatcctggcagtttgggaggccgagatggatggatcagttgaggtcaggagttcgagaccagcctggccaacatggtgaaaccccgtctctactaaaaatataaaaattagctgggcatggtggtgggtgcctgtaatcccagctactcaggaggctgaggcaggagaatcacttgaaccggggaggtggaggttgcagtgagccgagctcgcaccactgcactccagcctgggtgacagagtgagactcagtctcaaaaaacaaacaaacaaaaaaaacaagaacaacaacagaaaagaaagacattctgacatttgtgacaacatagatggaattagagaatattatgctaagtgaattaagtcaggttcaggaaagcaagtactgcaggttctcacatatatgtggaatctaaaacccacagaagcagaaggtagaattgtggttacagaggctgggggttgtggggaagggagagatggtgatcaaagggcatcagattttagtcagacaggaggattttaaaaatacttttgagttctattgcacagcatggtgaatatagttaataatagagtattgtacatttcaaaattgccaagagagtaaatttcaaatgttctcaccacaaaaatgttaagtatttgaggtactggatatgttaaccagcttgatttagttattccacattgtattcataaattgtaacatcactttgtatcccataaatttaattataaattatcaatttacaatttcaaaaataaagtaggaaggggatttattggctcatagagctaagtctgaggtcaataggattaaggtgtggctggatcagatgtcatcagtactctgccttcctttctattccttcttattcttttttttttttttttttttttttttttttttgagagagagtcttgctctgtcacccaggctggagtgcaatggcttgatcttggctcactgcaacttctgccccctgggctcaagtgattctcttgcctcacctcttgagtagctgggattacaggtgcccgccaccatgcccggctaatttttgtatttttagtagagacggggtttcaccatgttggccagcctgctctcgaactcctcaggtgatccgccctcaggtgatccgtccgccttggcctcccaaagtgctgggattacaggtatgagccatcatgcccggccggaaagggtttcttaatgagagctgatgggatgggatttgaactggcaggaaataaagtggcagatactcctttgggcggctgcatcagcaagaatggaatcagggagttgagacgaggtgggacaggtaggaggaagccaactctcacttcctccttctctccccatttatcttcttttttaccctgagcagatacctgtcatcctttttttcatttaatattatatcataagcattttccatgttgctaatgtattttctcaataaactttttattttggaataattttagacgcacagagaattaatgaagacaacagagagttcttgtattcccctcccccagtttgcttctcctgatgttctcatctcacatgactggtcaattgtcataactaagaaaccactcttgtatgttactatttttatttttgagacagggtctcactctgtcacccaggctggagtgcacaggcacaatttcagctcactacaacctccacctcctaggctcaagcgatcctcccacttcagcctcctgagttgccaggactacaggcaaaaattaaatgggtgtggtagcatgtgcctgtagtttcagctacttgtgaggctgagaagaagaatcgcttgaacccaggaggtggaggttacagtgagccgagatcgcgctactgcactccagcctggcgacacagtgagtctctgtctcaaaaaaaaaaaaaaaaaaaaatgctggaaacaataagtggagggaaagtaacaggtacgggaaccaccatgaacaaaacattagaggcagaaacaagctctctttttatgttggcccctgggacagtttactcttctccccacaaagagtagctgaccaacacttggaggaaactatgtcaaagagtttaaagcctggagtggaaagattaggggtgtgctgggggagagacggggtgctgagaaggagggaagaggcatggctggagagagagagagagagatgtgggagagcaaagtgacttgtcaccactgctttttggctggcgtggcagtggggataattattaaaataatcactactaattgtaaaaattcatggacaatagaagggaacatcctcagctccttttcaccacttttttgtttgctttttgttttttaactgctcctaacaatctggtgtatttcttcacatgctttcttcctgtgcatacaaaccataagaatacaaacttacaggataccaggcaacaccaacctcctaagcctcgaacctctctctgccactggctgcttcgtccctgtgctggttctcctcctaacctccaggtggkctctctattctttccccttccttctctctttttttttttttctgattgagacaaagtctcactctgtcaccagactggagtgcagtkgtgtgatctcggctcactgcaacctctgcctcccaggttcaagcgattcttgtgcttcagcctccgagtagctgggactacaggcgtgcaccaccacacctggctaatttttgtatttttttttttttttgagacagagtcttgctcctttgcccaggctggagtgcagtggtgcgatcttggctcactgcaacctctgcctcccgggttcaagcaattctcctgcctcagcctcctgagtaggtgggattacaggcacccgccaccacgcccagctaatttttttgtattttcagtrgagatggggtttcaccatgttggtcaggctggtctcaaacccctaacctcatgatccacctgccttggcctcccaaagtgctgggattataggcgtgagccaccgtgcccagccaatttttgtatttttagtagagatggagtttcaccatgttggccaggctggtctygaactcctgacctcaggtgatccatccgcctcggcctcccaaagtgctgggattacaggcatgagccacggcgcctggcccccttcctcctcctgaaaaggcggatctcaaggctcagtcctgctcttccctccacatcctttgctcttgcargtctcctcttccacgcaggtggctccctcatctcctcttcaatatctgacttctctcaaaagttccaagtctggatttgccattacttgctggacatctcttcctttatctcatacccaccactgctcataaagatttgtcgacgaccaaagtcagtcatttgtctcagtttccttctttaagctttccattttttatcactggcatttgtgtatacccaaagtcatgggctcaaaacattggccttatccttgacttttctcattaacatccagctctaactggttcttctcctgtaatatctttctcctccatcccatagtttcagtctattttaccacctagatcatgatagacttcctaccatgaatctgtccccactccaacccatctccttacagctgccacatgaacctttataaaatgctatttacgtgttaatcctcttcctcctgaacacagaattcctcaccttcttgcttacctgccactgtcccaatttctaatcctggtaattatacctcccaccgtctaccaccaaactgtcttcctagactcacctcctgctcttcccacgcccgtgttccactccagcccaaatcatttagttattggtctcttaaaacactgcatttgctgactcctgggtctttccttgagccactaactcaatctgaaattttgatctccttttttttgaacttgttgaagaacttttttcccagctcaaatcccagtcaagccctgtctctttcaagaagcattcttttagctgggcgtggtggctcatatttgtaatcccagcactctgggagtctgaggtgggaggattgcttgagccctggagttgagactagcctggacaacatagtgggaccccatcttcacacacacacacacacacacacacacacaaagcattttttgaccacctccacagtccatggaactgacccttccaaaacctgaggccaatgcttattgatagactgggttggtatttacatattatatattatctctttggcctccctgagtttcccctgtgcagagactctacctatctctatttaccttctatttctctatttatcttcagtgcctggcacaggatctggacatcatagatgttcaataactttttgaaaaaattatttatatattgagagacagggtctctctctgtcacctaggctggaatgcagtggcatgatcatagttcaccacagccttgaattccttgggtcaagggatcctccagccccagtctcccaggtagctaggactacaggtgcaggccaccacacctggctaccattttttttttttwacttttcatagagatgggggtctggctatgttgcccaagctggtcttgaacttctggccccaagcattcctcctgctttgtcctcccaaagtgctaggattacaggcatgtgccaccatgcctagtctcaatagcttttatgtagaatgattatgcttatgcataggttgaaggtttgaaggcaagaagataaagtttggggaataaacaggggacatgttataggaatggatgaaggataaaactgtggtggggacacagggttaaaggagaggcaaaattgggtttggggattaagatcgcagaagagggatacgagtatgagattgtgtgagactgtcctacatgtcattggcagtgctcatgttagagggaccatctggatgtgctcatgaagttgttgggtgagaaccagatgggcctcagggtagggaaaattaggtggagtttggcctcctcagatctacaaaggcagacaacccagtgaattacttacttaatttgactcttgtagaggctcaaagaagcccgtcctggaaggtctagctgcttgtttcacaaaggccaaagacagggaagtattttgtttactggattcattcagaaaagtatttattgagcatatactatgcaccaggcattgagaacatagagattttgttttccctcaaggagttcctagtctagtggggggaaacaaagacataaaaagtaaatgcaacagtgtgttacaatggagaaagaatcccgtgtggggtattatgggggcacaaagcagggagggataggttcacctygaggagatagaaaaggcttctcagggaggcaacttgagctgagtctttaaatctgtgtagatatctaccgggttgatgggaatgaaggacagttggggagagggtaggcattctgggcaaacagacagcaagagttgcagggagctgatgaaatttcagggaaattcatgaattttgggtcaggaagagatgagtgatgtggttgcacagaaaacaggagacccatgaggagacgtctttggtgtgctggggagagataataaaggcctgcagcaagcaggggaagcaggaatggagacgggcagggtggaagacatgcraaggaagtggagcggtcaggactccattgtttaattggtgatgacaggaagagaaagagaaagagtagactgtgtgagagagagcagaagagaaggaaagattggtcattgttactccctggttcttggctggggtaactaggtatatgatgtgtgtgtatttgctgagatgtgggacacataaggactagaagagttgcttggtttttgataaccaagtctgaggtgcttttgggaatcatggcccacttaactttccactccttttcatctgtgaaagctctgatgtctgagaaaggtcaaagggctccttggtagagaactataagcaagtacgatccaacttaaaaataacttactgaacattcactatgtgccagacacagtgtggtccacgctaatctccgagggggcagggactctgacttgttcacgtttgcattccagtgcctcatacagaggctgacacacagtggacattcaattaatatttgttgaatggatgacaagacatgaatgaatataacggttaatgggcagtaggaatatagtaatgagaatctcctgatgcctccttttgggagcaagctgtctggttggggcgacaaatgtatagacaaccagtgtccaaagagcatattaaatacttgaatagaggttggatgtaagggcaatggggactgaagagaaaggaggagtgactgagccctcgtgttggatttttaaggatatgtacaagttttctaggcaaagaggaaaagaaatcccaggaagaaggaatagaccatatcaaggcttagaggggtgtaaatgtgtggcatggttctcagaataacaaaatgtttaatgcatctgaattctacatggcgatcataatacctgccatccccttataaggaaatctgccccatccacagtcagaggtgtacttggatgggaccactccccagacaaaagagcagggtcagtttctcactatgggkgtgtgtgtgtgtgtgtgttgatctggaaaatacagagaggatcaggcagttagcaataggaacaaagacggaragaagccagaggggccaagatggccatggggaacagaagttacaaagaagtagaacctcatggtagagaaaagacatgctgagcagagggagaagccgtggttrttttttyggctgagagcagatgaactcagatggtcagcccattaatcacatctgtgtatattaaaaatcttttagtcatgttaaaatatttgcttctaaccatcaaatatattttaaagaactcattaggagagggatagtctgttatatttacccagatatttaatgtttctgttgttctcgcttgattccccgtgttccaggtttccttctcacatcacttcccttctgtctgaagaaatttcttaagcaattcttttagattacatatgctggaaattgattgtcttagtttttttttcttcttttcatctgagaatgtcatcatttcaccttcatttctcaaagatatttttttctggatatagaattctgagttgatagctcttttctttcagcactttaaaaatattattctactttctttttttaaaaaaattttctttccacaggttattggggaacaggtggtgtttggttacctgagtaagttctttagtggtgatttatgagattttggtgcacccattacctgagcagtaaacactgcacccaatttgtgttctttaatccttcaccctcttcccgccctttccccctgagtccccaaattctattgtgtcattcttatgcctttgcatcctcatagcttagctcccacttatgagtgagaatataggatatttggttttccattcctgagttacttcacttagaataatagtctccagttgcatccaggttgctgccattaactcgttgctttttatggctgagtagtattccatcgtatgtatgtgtatatgcatatcacagtttctttatccacttgttgattgatgggcattttggttggttccacagtttcgcaattgcgaattgtgctgctataaacatgygtgtgcaagtaccttttttgtataatgacttcttttcctctgggtagatgcccagtagtgggattgctggatcgaatggtagttctacttttagttctctgtgaatctccacactgttttccatagtggttgtactagtttacattcccaccagcagtgtagaagtgttccctgttcactacatccgtgccaacgtctattatgttttgatttttttgatgatggccattcttgcaggagtaaggtggtatcacattgtggttttgatttgtgttttcctgattagtgatgttgagcatttttcatatgttggtcattttgtatatcttgagaattgttgtctattcatgtccttagcccactttttgatgggattgttgttttcttgctaattcgtttgagtttgttgtagattctggatattagtgctttgtcagatgaatcttctggcctccattgtttttgatgagaaccctgcagtcattcaaattattatttctctatgggaaatacattgcttttctctgcttgctttcaagatttttttctttggctttagttttcactagtttgattgtgattatctggatgaggatttgtttgttttatcctgttggtgatttgttgagattttcgaagctgtaagttatatcttttatgaaatttgaaaaattggaagtcgttatttattttttttgtgcaccacacactcttatctttctttgactctgatgacatgaatgttagaccttttggttttgtccttcatgtccttgagactctatttacttaaacaattttttcttgatgtcattcaaattgcatagtttctattgagctatcttcaaattcactgactgtttcctttgctgtctccattctgctgcaagctcactcagtgagctaaaactttttttaaaaatttattttattattaatttattaatggggtacaggtggtttttggtgacatggatgaattatatagcggtgaagtctgagattttggtgcacccgtcacctgaatggtgtacattgtacctaatgcatagattttgttcccttggtcctcttcccaccctcctgaatctccttctgaatctctaaagtccgttatatcactctgtatgcctttgcgtattcctagcttagctctcacttataagtgagaacatacagtgtttggttttccattccattatctcctagggggttggaatggtagaggtttcttaaagcttatctccttctcccatctcatgcactttttatttatttattttcccccagtattttatttactggtttgatggttcaggtttcaggccagtagaagaggtgtccctgagtaggaatcggttgtgggtraagcaagtgggtaaatgaagacccaggcttgacagaggtggctggaggagccctcggtgagtcacagtgaggtcttatcagggagaagggttggagccaccttagctcccctgcaaggtcagcagggacgttttccacttcttagatatgctcctgtcccagcgctctggctattcagatcagacaggcacctcttttcatctgtaggtgttggtgttccaaatagagaggaattgtgactgtttcttgtgcaagcctgatcctggagggtgctcctcttgtggggatgcagtcgccttgatgtgttccagaatggccgtctatagttgcatccatgtcgagctcctgtgggagaagtcccaactgtgcatatggtggtgaacaaggggggaaagactgcctcttctccaagatccttcccatgcaccaaagctgtctgactgttgcgatagagctgaaggctttccccgctgagcctakcacttcagctgcgcctctgctcaaggaagctttccaccagcggaaggatctgatgctcaaggcctgccatcccgattctttggtcccacagggtcttcccttgatggggcgcactccccctttccctatgagtgggagtccctgtgagccacgctactgtgaatgttgttgctcctctgggtctagctgcccagtgacgttgccaccctccaggctggtgttgggaaatgccagttgtgaatgccagtttcccagaagtgggtagcaacaccagctctactgggggtagcaggggagtgacgtagactctgaaattccttggttattggtagccatagtatgttggctttcttgaatgctagttatagtagtaatgagctggtcatgtggactcaggacctcctggttagccggagtgatgcaggcagtggtaatagctgagatcatagagcctccttcttcctgggtgcaatgttattctaccaggagatgctgtaatggactgtgctggttggcctccagccaggaggtggtgcttgcaaatgaacmccggctgcggtaggtgggtgtgtggggggggggggggggaggggcgtggtggtgggggcgtggagggaggaatactctggtttcacaggcaatagtcagggccacagagctctcaagagattctgtcctttgtgttaagctaccagggcaagtggcggggcaaagcgagatgggggctgcgtcggtcaggtttgtgctctgattctccgtgtgcagggcaagcagcagctcctgtgaatgttgggggatggagtgggtctcaggccactgggttgatgttcttctgcccccgctgcgcagaagagtttgtgcagagtggggagtagcaggcagcggtgagcccccaattcccatgcactcagtgaggcagatctactaccacagcttccactggcagcggcgagctgaattccagccagtctgtaatcggaacttgccacagttataagctttccccacgggagatcgcaattgtggttttcacgccacacccttccctgtcctgcaaagccggcacccgaggttcctgcacccgcggcttccgcactcacggccccctgcactcgcagcccacttttcactctcccacgcctggccctggccaagggagttggtccccacccaaggttatgtatatatatcatgaaacccctcgggagcttcgttcaacctgcgaccgccgtctaaactttttgcctgtcctccacgggggtcccctgtgaggaacagtaaggaacggctgccctcctgtgttgggatttgggagtgcacgcaagtgtcttctgccactgctcctatttttatattccgccaccctccccgagttggtccctttgctgggtggggttagggccttcctccgtgtcctgtactttcagggtccctggtgggggtgtgtatcccagaggcaaaaactcttcccctctcacactctgggactcacagtccttcacctgactcacagtgtagactgcagcctcctgcgtccttcaaagcgtccctgggttttcctgttcaatgactgcatcgcctcttgaaaaaagttcacaaagtgaatgtctctacactattttgtccttccacgtgggagaggcgtgccagcaatgcctctcatccgccatcttgacagaaacagttaaaaaaccttattgcatttttcagttctgaaatgttcatttggttctcctttatatttttctatttagttcctgaggtcttctaccttttcaacagtgtttgccccgacttggagtattttataacttctcttcatagtcatctatgtctcttcccatgtgaactgagattttcctgtcttcttatgatgagcaattttggattgtatcctaatattttgaatggtatgttatgagacaatcttgtttatgtcctgtggagaatgctggtatttttctgaagcattgacctggttgagttcagcccacgagttcgaatgagtcttccgcggtggtttcaattctagttctgttttccaggcctttgcaatgctatttggatctagcccatgcatgtgccacccagttaggaacctggatgggaccctatctctgaattcagctctcagtctttagtagtttggtccgtgatctaatctctgtttgtgcagtttaggaatgagcccctgagcttataaacaatattttggggtttccttcctgagctcctctctccctgtgatctcctctgtgcttttcagtttcctggcattttcctttttggtccttcagccagaaatttagggcctaatttagcctaccttgctgtacacttcttgcatctgtgccctcattcggggtcaagtgataagaggaaagagagaggaaaaaaaatccacggaggtgttccccgcgctcttgggaccacacttcttctgattggagaggaagattccccttcttcagactgcacgtgcttatcggcccccgctgctgttgtcatttccaggagacccctttatcactcccttatcccagaactgagggctttccctaaagcttgatctgtccatgctgacttgcacctctaggttttaggctgccttgaagtcagtctaggagttctgcagggaaaatctagtaagctgattactagttttccttctgctttcactccaacccccgtgatactgctgcttcacgcattctgcccaggtcttcattgttacattcagtggcagagaggaaccagcatatctgcctttaaaaaaatactacaaattataaagcatgcttgtttcaacctgacactgttgcttttggtttctttacatattaccacgttcttggcatctcagataacttttatagtattatttttccttttctttctgagcacattaccaaaagtttttgtgaggcaggtctttctttagaagtaaattttctcattaaaaaatgattgaaaccattttttttagagttctgctgagttcacatttcttggttgaccrataatttttttcaatacaccgaagacctgattctgttattttctggcttccgttgttgttgggagttttgttgttgtgctaattctggttcctttgtaggtgatctttccttcctttttgcctgtattccagattatcttttgatctgcggtgttctgaagtttcactctgatgtgtctagttatagatttatgttcattttttctgcttgggatgtaccagtctgtggggtttgatgtgaagcctgcagaactgtgtaccagttaacyctcttttcttcataaattatccagcctcaagtatttctctatagcaatgcaaaaatggcctaatccaccttctttgtgtctttttacagtttttgacttgaagtttattttatctaagtgtaacttctcttactcctttttggtttccacttgcatagaatatctttttctattcctttagtttcagcctatgtgcatctttatgaagtgagtttcttgtaggcaaaatatagttggatcttgttttttttttaatccattcagccactctgtctttaatttggaaatttagtcaatttaatgttattattgataggtaagaacttactattgatattacatagttgttttctggtcattttgcaactcctctctcccttactttcttttttactgtctacctttgtgcttaagtgattttctctggtagtatgttttaatttccttgctttttatttttagtgtagctattataggtgtttgctttgtggctattgtaaggcttacagaaaacatcttataacacattattttaaacttaaccagttgtcatttaagatgaaaattaactttagtcacaaagaaaaggagaaaaactgaagaaaactttacactttaactccatctccctacattttgacttttcattgtctcaactcacattttttataatgcctatctcttaattttcaaactagagacaggagtagcttacacatcactattgcagtattagagtatttgtctatttgtctatgtacttgcttttaccagtgagttttatacatttagatgttttcttgttacatgttaggatccttttctttcagaatgaagagctccctctagcgtttcttataggatagatccgctgatgatcaaccttgtcagtttcatttgtctgggaaagtctttatctctttcatgtttcatggatagtttcttggatatagtattcatgactgaaagtttttttcctgccagttgtggtggctcatacttgtaatcccagcactttggaaagccaaggcaggaggaaaacttaagttcaggagttcaagaccagcttgggcaacattgggagaccttgtctctataaaaattgaaaattaaccaggcttggtagctcatacccgtagtcccaactactcgggaggctgaagtgggaggagcacttgggcttcaggaaaatagaggctgcagtgagccatgattgtgccactgcactccagtctgggtgacaaagtgagactctgtctcaaaaaaaaaaaaaaaaaaaaaagtttttttctttgcattttgaatatgtttcccattctgccttggcctgtatggcttctgatgaaaagtctgttgccagacaaatcagagctcctttacatgttatcatgttattgtcttcttttctcttgttgcttttaggatcctttctttgttcttttttttttttttttttttttgagatggagtctcgatctcggctcactgcaacctccacctcctgggttgaagcagttcttctgcctcagcctcctgagtagctgagattacaggtatgtgccatcatgcccagctaactttttttttgtatttttagttaaagatggggtttcaccatgttggtcaggttggtcctgaactcctgacctcatgatccacccaccttggcctcccaaagtgctgggaytacaggtgtgagccaccgcgcctggccatttctttgttcttgacccttgagagtgcgattattatatgctttggggtggtcttatttggatctgaatctatttggtgatatttgaacttcctgtacctgtatatttatttctttctctaggtttaraaagttttctgctattatttcttggaataactttctacaccttgctatttctcaactccctctcaaattccaatgactcctacatttgctctttggaggcttttccctagatctagtaggtgtttttaatttcttttcattctttttttcttttctgtgtgcattcaaacaaacagtctgagccttaacatgcaaattgctgctccaagatggcctactagatgcagccagtagaaacatctcccagtgagggaccaagacatcaggaagactggtgcactcctagcagatcttcagagggaaggcattgagagtggacagagggaaggcacagaggctgggctgaaggggaggaagctgggaaccctgaacagggatactgcacaccaggactcattctggcccccactgattcctgtggaaggggtgagtctaacaggcaaggagcagcccaccctcaccatgggcctccagaatcccaacaagaggagagctctcaaccaccagatatacttgagttggcaggaagagatgtctagagaaggggtaggggcagaaatcctgctggtgcagagcccagagagttcggtgcaacaatgtctgtactggagtacagccagggaaacccatgtccctaggcttgacttgctcccataggacactttagccctaggggcacagtcagacctgaactctgaagggtggtgttgcccatgagacaggaccagtttgacctcagcatcccttggtctgctggcgtctcacagagccccagcctggctgcacctgcctgcagtgcagctcccagatacctccttgggggcccacatcatagctcctgtgctggtggaccatgcctgaccaatatatggatccagcagagcagccttcacagatatgcaccaggctacccttgccctcccttaactatagcctcccccatgcagctttctctgtacacactcacctgtggccacccacattgctttgccactgcatgtgtttacaggcaaactttgcctttccttccccaccagtgcacatgtgtgcacaccctgccatgccactgctgctggcatgaatacactccgttctcctgcccctcaccatacctgtcagtgttggtgggcatggaacacaccagctctgctaccaacagtgccctggccctgtgccaaaactgcaactggcacaaagctaggcatggagaacagcgaatcccaccccttccctgagcagccaccaccaccgatgtgagcacacacacaactgcacacacagtcctgctcccaacaccaccctgtctccatgctaacaccaccgccacaaacacatgcatggtcactggcagaagacccttgtgccgcccaagccatgctacctcttttgctgctatgaatgcctgcatggaggctggtaccccagcacccactagcatcctgccgcagccaaggagcattcaccttaccatggtgccactgctgttgctgctggtaagtgcagatgaaaactaatccagtggccaccaccctatgagtaactggaactctagtaggaacgtaaacagatatagacactttgggaaacagtttggcagtttctacaaaagttaggcacacatataccatgtgaaccagtcatccccaagcaaattatttcccttatagatatttacccaacagaaataaaatcatatgcccatacaaagacttgttcacaaatgtccatagcagctgtattataatttatatatatgtcaatattttgactatcacaagagtcaaaaaccggaaacaactcaaatgtccatcagcaagtggcagatttttcttaagttgcagtatatacatatagtggaacactactcaacagaaaagaatagtgaactgtggacacaggtcacaacaaagataaatctcaaaataattttgccgagtgaaaaaagccaaataaaaaaccctgcatattttataattcaacttatataaaatttgaggaaatgcaaactaatttatagtgacaaaaagtagatcagtggttgcctggggtcataggtgcagaatgcagggaggaaggaaccataggaaggggtcataaaagggcacagggacactttcagagttgatggatatcatggtaggtagaaaatgtccatgtcctaatccccagcatttgtgaatgttttcttacatggtaaagagactttgcacatgtgatgaacaatcttgaggccaggggcggtggctcacgcctgtaatcctagcactttgggaggcccaggcgggtggactgcctgagctcaggagttygagaccagcctgggcaacatagtgaaaccccctctctactaaaatacaaaaaattagccaggtgtggtggcgggtgcctgtaatcccagctactctgggggctggggcaggagaatcgcttgaacccaggaggtggaggttgtagtgagtcgagatcacgccactgcactccagcctggcgacaaggtgagactctgtctcaaaaacaaacaaacaaaaaaaaccaactcaccagaaatatgttgctaaggagcaaataaaacatgtatccaaacacttccatatgagtttaaaatacttatgataaatcaagaaaagggcaaacatgtcttctagagctgggatacactcatctcctcccttagacaacagaactccaggtttgccagcctggattccaggacttacatcagcagcttcacaggttcttaggaccttggcctcacaccaagaattacacaatcagcttccctagacctgaggcctttagacttggattaagccatactaccagcatcccggagtctccagttcaccaatggcctgttgtgggacttctcagcttccataatcacatgagccaattcccataataacccccctcatatatgtgtatgtgtgtgtatatgtatctataaatctatatttatatatatatctgtgtgtgtaatctatatgtgtgtctctctatcctattgggtctgtctctctagagaactctagtacacaactattgcctgtttaataatgacaattcaggtagtagaagtacacacacatttaagaataaatttttaaaagatatcaataaaaatttggtgatgagagggaggaaatatctacaagccaatttcatcattgctcatactaagaaatattttaaatgaggagattaaggtctttatatcaaatagaaactataaagattattgctagatcaaaattataaaccttcttgaatagtctaactgcaataagaagccacagagtaaaacattataatttatatatataaaaaatcacatgaaaaacttaaaaatagagcatatcaatagatgtaaatgatgtaaatgaacatagcatgtattacaagaaaaatattttcatattagattacaaagaaaaacccaactgtctactatacacaaaaggtacatttaaaataaactaattctggaagttgaaaataaaaggatgggcaaatgtataacagacaaaaaaagtatcactcataatcttaaaattagatattataggccaggcaccgtggctgacacctgtaatcccagcactttgggaggccaaagcaggcagatcacgaggtcaagagatcgagaccatcctggtcaacatggtgaaaacccgtctctactaaaaatacaaaaattagctgggtgtggtcgtgtgcgcctgtagtcccagctacttgggaggctgaggcaggagaattgcttgcttgaacccgggaggcggaggttgcagtgagccgagatcatgccattgcactccagcctggtgacagagcaagactccatctcaaaaaaaaaaaaaaattagacattatagaattcagagcagaaagcaaggctacgtgtttttttttttttttttttttgagatggaatctcgctctgtcgcccaggctggagtatagtggcgtgatctcagctcactgcaacctccgcctctcgggtttgaagcaattctcctgcctcagcctcccgagtaactgggactacaggcacgtgccaccatgccaagctaatttttgtatttttagtagagacggggtttcaccgtgttggccaggatggtctcgatctcttaacctcgtgatctgcccgcctcggcctcccatagtgctgggatcacaggcatgagccaccacgcccagccttttgaaggctagagggaataattcacaataaaaatataacaataatccatatcaatataaaataacaatagcaatttttatggtagagaaaataaaagagatttacaaacaaacactgactttgattatgccaactgtttcctgccagggattctgattgctatgtgtgtgtcccataaaaatatcacacatgtcatcttttatgttctctcttattttgctacctaaatgttcttaagtatggtgaccacatgttaaatatgcagagccacaagatgaagggagcctgagtccctaacttagtgaaggaggactacgcaccaattaggaaccattgttttaaatttatcaggagtgaaacaaaagaacaactattgtctttgaaccattatttatttgggctgatttgttacagcagctgttaccttaacaatgtaccttctaatcaattaatgagaaacccagtcattctcctatgggcccttcccaaaagcctagagacagagtttccagcctatttgtttaaatattaagggtagcttgtgagtgaaaatcaggatgactttgggaaccagggactccctggaatgggtacctgcatggcagagaaccattaaggaaagtggacaaccaggagactatgatgtcatagaaagtaagagataaaagtatttaagcaaagtgaaagtggctgtgtcaaatgccaccaagaatccacatagactgctgttgactgtgataactatgatctatatctgaccagcagacttcctacccgttctggtaaagtatccaaataataaggtggtatggggaaaataggcatcccagtgacccagagttagtcaaggatagcctctttggccacatataagagacacagatgtagatctcctggagatgtgatgagaggccttggagatttctgtaagatttgtataatacaggacccttttgctaggtttggaaatttctctagtattcaaatatcttaaaacttcatgcagtatggaatcaggcaattctctggagcagtaaccaaagccagagatacaagcaacgaattgagccatacgggcatcagacttacccagaatgggatcaaytcctccagataccataaaagttgatgtgatattaaactgacaaatagaatcatcaaatataatcctttccgtatatttactgacatttggatgtccccatgagaaatgtatgtttaagtcttgagtatatttttttcttttttgagatggagtctcgctctgtcaccaggccggagtgcagtggcgcgatctcggctcactgcaacctctgcttcctgggttcaagcgattttcctgcctcagcctcccgagcagctgggattataggcacacatcaccatgcccagctaattattattwttttttttttggtagggacggggttttaccatgttggccaggatgatctcgatctcctgacctcatgatctgcctgcctcggcctcccaaagtgctgggattacaggcatgagccactgtgccaggccttttgtccattttttattgaactgcctatttcttcttactgatttgtagaaagtctttattctagtctggcaggtattttctttcaacacttccaagattattcattgtctctggcagctaatgtttcatttgagaaaatgctacctgtattattgatgcccatgtgaaagtaatgagatttttctccacattgaagatttctctttaatctgtggctgatgttgtctttgaaggattctcgaccatccctgtatctctctctctgtctctttctcacccactttgggttgggacctcaaagagctgcaccctagcagtaaaggtggggtggaaattcaggccttaaaggggttaaaacccagcatcaaataatcttagttcctgattgaattaaggtgatctgtgactgctagatcctcagtctagctctctgcacatcaaatattttctaaaggaaggtaagtctagttagaaagttagaccaacagacttaagctaggctttacagaactgataggttcgaagtacttctaatccaccgttgcctgaatgccatggcattttatcttttagttataatagttaactcttctcttctacaatgatatgtgatttattgtgtaatgttgcttttggctaattaaaaaaaaaaaaaactctgcctctgccctggagaagagaacatactaacaccattcattagcttagcagaaatttagagacaaccctgtgattttgaataaagatccctctatgggccagaaacgaatacaaaggacctgctgttaagccgctgtgaaatggaatgagagaaaaatgaagagatgaacttgaaactggggttctcagcctaatagaatcggcgcagctccagaactcaggatgctttcaatatcatttttacagacagctgctatattgccaaactccagaggacaccttccacatggaatacaacataaatggtaccctgtggagttttgtaatagcatgaccctacatgagtgcaggcggactagggagcgaaggaccaatcaaagccagaacactgagctttaatgattcccgaaggcaatttgagcctgttgtagaaataaggggaggtgatttcataagacatctagaggtgagcagtccacgtaggattaccacaaacatagattcagagatcacagtaagcctctcataggcacaggtgcctgaacagattatctgagtaaaagagtcgttatatcagaccctcctgagagatgaggtgggagaatttgaaagctggactgaggatatgactgtgctgtgcagagatggggacacttgctgaggaaacacacgaggatggggagtagattggggaggaaaatgggagtgaggtgacacatctagaaaatgggagagccgctgggtgyggtggctcacacctgtatgtaatcccagcactgtgggaggccgaggcgggtgggtcacctgaggtcaggagtttgagaccagcctgaccaatatgatgaaacctcatccctactaaaaatacaaaaattagccaggcttggtggcacatgcctgtaatctcagctatttgggaggctaaggcaggagaattgcttgaacctgggaggcggaggttgcggtaagccaagatcgtgccgctgcactccagcctgggcaacaagagtgaaactccatttcagaaaaaaagaaaaaagaaaaaagaaaatgagagagctcagggagacaacccagtcataggaagtgatgacagggcttccgtgacctgcatcatccagcttttcttcttacctttcaaactaggatcattctcacttcctggcttcattttcttttttctttttttgagacaagtttcgctccatcgcccaggctggagtgcagtggtgcgatctcggctcactgcaacctccaactcctgggttcaagcaattctcctgtctcagcctcccgagtagctgggactacaggcacgtgccaccacgcccagctaatttttgtacttttagtagagatggggtttcaccttgttggtcaggctggtcttgaactcctgacctcaggtgatccacctaagtcggcctcccaaagtgctgggattacaggcatgagccaccgttcctggcctcatgttcttttttatatccctaattcttgttagggccaaggacaccttggccctctgcctcttctttttcccttgttcataaattcagctcctaagtcatccaaactgtagaactcacctccatttttttttttttctcttgagacggagtttctctctgtcgcccaggctggagtgcagtggctcgatctcggctcactgcaagctccgcctcccggttcacgccattctcatgcctcagcctcccgccaccacgcccggctaattttttgtattttttttaagtagagacggggtttcaccatgttagccaggatggtctccatctcctgacctcgtgatccgcccaccttggccttccaaagtgctgggattacaggcgtgagccaccgcgcccagccagaactcacctcctttcttttttcagttcagcctctccaattacctgtttaatttcttcccataagaaccacagtattacatcaaacttaaacaaccttccttctgaatctttgtatttctcgccagttgtgccgcaactgaaaacctcagcgtgacctctgcctcttcctcatcccctccctctcttctgactctccttgctaccattccatgcaaccacaaaaacttctagcaaccaagtcagattctgtgagtctatggtctgtggctatcttaaaattctttcgtcatctactgaaaaaagtcatatgatggacggaagcaatacacagaacaggacgggacattagaaggttgagggcatcagtaggtgaatctggatggctcacacatgtctatttctaccgtattaaccgtattgtatatgttccttttaaaaatatatgggacataagtaatttgaatgcataagattctttaaaagactcaaagaatctttatctctcctttttttcccattacatcagatccatccgaggctttcattggcctctagattttatgatcagtcttttaactgttattgctatgaccacaatcctgggctttgcttccttctagcaaatggaatctgactctgctgcattttggtcccaggtcatttctgcccttatctctccaaccttcattttcctgttataagatggtgatagtgataccaacctcacagagaagttgtgaggataaatttttttttttttgagaccgagtttcactctttgytgtataggctggagtgcaatggtgcaatctcggctcactgcaacctctgcctcctgggttcaagtgattctcctgcctcagcctcccaagtagctgggattacaggcacctgccaccacacctggctagttttgtatttttagtagagaaggggtttcaccaagtcggtcaggctggtctcgaactcccaacctcagatgatctgcccccctgggcctcccaaagtgctgggattacgggcatgagccactgtgcccggtgtgataaattgagattatatatttaaaatttctaacatagagtctggcctactagttccttctttatccatttatctccagtatctaggactgtgggctagatggtatgttttaaggatgcaaggatagagcatgatgagaagagggtttatcaagagtcctgggacaggactgagaggaaggctgggatgcagctggggagggatcatgcaggagggctgtgctgggagttgcaccagaggcgttgctgcaggtagcctaagggatggcttattgaggattcagagaggcctcaagccaaaaacccttgtcaagagccaggtttcttagccccagtggactcagtcatccagaacacttgtcatttaacttagagaggttccaagatacccttggaaaaagcattgattgctagaaaaaattttcattccaggaaaacttttctttccttctttggaatctgaataaaggggcaggaaacaaagcaaggtctctcctcccaccttccaccaccacacatataatccgttttgttatttaatcatatatttttacttgtatctaagccaggtcctttggcaatgaggaggtgtgcagggatcggggtgaggaagtgcaggactggatggacatttaaggtagggcagctttgggggatgccacttccaaatgcaatggggaccatcactgtgtattccccatagttgtgtggtgagcagctctggataccctgaccacaaagctttggggacaatttgttcaccagaggatgtgaggaggacggaatactcaaaggcactcasggatggtggagctttggagctgaggcgggcaaggcctctcagatggtcacgctgttctctaccatgctgggtcaaaggtactcacagggcaggtccaggactgcattccggacctcaatctccttgtccatggaagccagttcctcctggaattgtctcagcacagcttggggctcaggaccagagaaatatttctcctcatgctgagaggcagaagacaagttggctcagccccttgggactctcagcccrgaatacttcccctcctttgagctgcctccttcccaggacccaggcatttgcttctcaccatgacaggctggcgtctgccaaggaactttgtgaaggtcttttgcatacgtgcctggtggagattgggcagtaagtccactakatccttctctgtcacatccttagagaygggygggggcttctgcatggtgcatgggccattagggatccaggrgtaccagtccagctgcagggaggagagcccagagaaatgcaggctgatgacctgggcatttgatcccccacttctccatcccaggagccsttgtgggatgatcacatrggttacctggcccaggtggttagaagcatgctgacctgtgcatgtgaagatgcacatggtgacaaagtggcagagctgagcccgggactctaaggagatgaggaacctggtgaaatgagaatcctggtgaaatgagaatcagagatctcgaaaccagaacacgaaataggtctcasgcagggaaagctatgtggagatacagaaaagaacttttctgtggttctggcctgcacaccctaggactcccaccttgtgtgtgctcaaaggttaatgcacktgggatgaaccttgagctatggggagaggggagggaagagtgagggaaaatacctaagagaagttttgtatctagttccagaggaagctcttagtgcagaggagagagaacactgtgtaggaacagggctggggagatcaggagtgcttgttagcatttctggacacactctggagaattctcagcttccttgggcaggtggggtgtctcatgatgatgtgagaagaagcagattgtttgcagrggagtrggtgttgacagggttcagtggggarggatccatgtctcacccctggtcttgggcyctctgcagtccagtctcagtcatctctctgcaccaggyctgcagctctagatcatccttcatggcttggtcactattgtagaaaagcccaaccatcccctccaygtacctattccctgggaagaagacactcagtctcaggggccaatgcaggaccttctggacctacagtcccccgcccctccgttcattgcctctctgtgccaccttcacctaccggctgatgattccccacagcctgatggcatcttagccataaaaagaagatttcacatccaggagcccacggtcagccaggtcatcaggaggacagagggaatgataggtcaaacaagccatggctctctgaagaatgtccacgtggcttccactaccagtgctcaccacctgaggataacccacagccatgccaagttgcagagggagggagatgagtatcaggaaactccaggcctatgatcctactctagcccttttaagcaggaagctcttcaggcatgaggcaggtttgggagaggccttccatggaggaaggagagcttgggggaggaatgggaaagggaaacaacccctaggattcttccaatattgaaccatcctccccttcacccatccatttccataccaggtcaaaaattccccattcggagacaagactactctgggccagcgtgttgatcgccatggtgtagcggaagtgggggatcaggagctgattatggaagaaagaaatgggacatggtcaaataagagagttcccagcatccatgagggaagaggatgttaaaggaagtgacagaaaagaagggagaggatgggtctttatgaaatggagagacttctcgttaaattggagtgggtcagggtaacatttgggaatatagagatgggaaaatgtcttctcagagcatcccgtggtgaaagttttaggagttcacttatttccacagtttcatgtccttggaagaattctaaaaatcccatatcctcgcaggtacccacatatgagcccatccctttttgccttcaccctcctataattatattccttctcctctctctgtcatacaaacatgtgcaatattggataccctaaagaaaacctgtgcttgacccccacatccttgtcttgccatctccctgtttcttgctttccctttcacagcaaatcttcactcagtgttgtctttgcttacccacctcacatttgctgctcacccccatgaatcaggcttcctccacttccctgagatggcgcatgtccatttattaaccaatgacttccatattgagaaatccaaatgtcacttctctgtaactttcttgatctctcagcagcacttgagacagataatcacgcgtccctcttgaaacgctttcttttcctggctgccatggattgcactttttgattttcctcctacctcaatgaggttccttctcttgtttcttttctcactctgctcccttctctcagtctgtaaatgttggttcaccctagagttatatctcggtcaaattctctacaaaccctagagaacttcatccagtacaatgactttgatacttttgttttctaatgactctaaaatctgtattttcaacctacacctcttctaggaactccagactcacatatccagttgccctcctgacatgtgcaaatgggtctttataggcattggaagccccacatggtcagaaaataactcttgattcttctccccgctaagtaacatggcttcttctctcatctcctcccacttcttcttcctcctcatcccaactcatgccctacactttaatctcacccaatctcagccattatccatgttcccttctttcctcgcctctttagatctttgtggctgtaatgttccacccctcacttgcccacctggaaacctcctcagccaaaatttcaactcctttgcaaaacctattctcacttctccccccaactcatagtaagtgtgtgtcctgggtgtttccatattactgtgtatgtgtacgcgtgtgtgtatgtatctgtgtatgtgtctccacatataaattgattgctgctagactgaaatgtacaaggttagactctttgtaggagtctgaaatatgaaggacagtcagatacagaatgacagagatgctgaagtaccttgtagataggatggaggctaggcaagcttctcattgtagccacagcaataacctcagcaatcaagtgtcccctcagcagatgtgactgtaactgctgcagctggaaatcagagctccggacccaggtcttggccaggagccaggccatggggggatgcgagggcagaaagagcagaggtgggggacatccgtgtcaaggtggctggagctagagcaggagagagagtgggggctgagaacttgtgtatctaagtccctaaaggagatcagtgtctggtagaaaaatacctgggccctctcacctggatgaccatgggtaagagtcctccatcaggctgaagcttcagcatgaccaaaggggctgccacgcattgctgcttaaaaatgatgacattaggcttgactccatccagcaaggagaaatccacttcaaacagagatccagcctacagggccaggggcaggaatagaaaacagggttggagttgtttctggagctgcccttctctcattttccagggtggatccttcctctacccacccaagtcttttttactttaaacaccaatcactttctgcagaaccaaaaaactgaatgcaaagttttcatgactgatgtcttccttcagacttggagctccctgcagcgaagtttctggttttccaccacataaggccactgcattcttcacgtatcccctcttctgccagctttagccaatgtagcaaaaatatttcctttagctacccatctccccccaaaaacagattcagcttttagctctccaaggctttgtttagtttttcttgctatttctctccagaagcttgcgcttttccctaaggctgatatatgttcaatgaagaaggaagagaggaatgtggagaaagaaaagaagatacaggaggagatgttgtagatcaatgttctcaatcaggggcaattcctcctctccccaaccccaggacattcagcactatctagacacatttttggttgtcacaaccggggggatgctgctggcatcaatgggtagaggccaggaatgctactaaacaccctacgatccacaggaaagccccccccccccccccccgccagccaacagagaattatgtggtgcagaatgttaatagtgccaacgttgagaaaccttgggtgtagatggaggagatgagagaaggggctggagatgggaggagaagggaggtgggggtaatggctgggatggtggatgggcagaaagcccagcagcacctggagttctttctccagctgggtcttcaagtcttccatccctggaggcagcaccaggcaggctgggagccttgaagaacacctcaggagcatggggtttgcaccattgagaaactggtacccaaagaaggcatcattcttccaagaatcataaacccgctctaggaacatcaattggggagcaccctgtgagctctgagctccgaactcctaatcccactgatctaatcctccatccccctcctttttcaaatccctgggttggaagtctgtatattggttttgggaggttgtgaaaactgaccagccaggacagtctttccatgtgggaatatttttttgaaatcttccagccttttcacacaatttatgaaatccagtgtccccttaatggccaagtccttcaacctgtggaaagaatggagtgcaagaagatcaaggaagcatcccaccttgtgccctaggaagcaagtgcccagcctctacctggtactcacccttttgctagggagacattaaagtctaaatccttatcctcgaggaatcgctcgtccctaggaaggtccggttgcctattccctgctataggcaggattaacccatctttccaggagccccacctggaggaagaacacacaggtaggggtaaggaggcaggtggcaggtttcttgggatctggtaggggatcaaagacttcctggggctcaacggtacaccttccttctttcctcgagctcctgttcccgatatttcttaaacaggttctgggggtcatcactcacggtccgggctgggggagagggacaagagcacatgccctccctggtcacccctccgcgctcgggtctccccatcagccaccctcccccttcacttctccccatctccctcatctctcattttccctcttttacagtagcctccccccacccgcttcttcctccagcctgccaggggctgtgccccttctccaccgagctcaccagtaccctcaggcaggcagataattccgtggccctgcacccagcggtagcaggggaaaaaggcctcgccttgggtccccgggccctgcactgagatccacttgcagaaccagtcgagactcaacagcacgttgtgtttgcgcagcttcaccatcaggaggcgccccaggtgcagggggacgtcgatctcaaactctgcctcctgcgcgacagtacacagctcaggttttggggtcttcagggaggacggcggggtcggtgaaccttcagagaatcctggctccgtttcccctccacagcacagccggggagaggtggaggtgaggaggagcagctggtactgcggggcgccagcctccccccgggcctgccgtgcccaccccagcgggcgtctctgtccttccgctcgggcaggaaaatgcctctcatctctcctgttcctctcgcttttcctatcaggcgcaccaagtgcacccgacctcagcccctaccccgcttcccaggtttctcatgggtggggcagcagcaccctccgaatggccccggcccccagtgacacctctgagtcccagggccccagctctcaccgcagtccgcgctcacctttccccacaccggtggcagctgcttccctaggtctgcctccccgtgctcgcccaccagccatagctgcaccaggttgggagagcccgccaggagcaaatccccggtggctacgcggaccgtgtacttgcccatcttgcccggagatccggggagaaatcagctttaaaaggatctgagacccagctcccagggaaccacgcccagcccagagtggctgttgtatttgggtttcaggctccccacctcccacccacagattcctccccgactaggaggaacgctgggactggcgccaggctagggtctctgtatccagagtttctcccggcggctctggaaagggcagcctcacccttattcacttggcaaacactccctgatgccagtttcacaccctgccatgagccaaacacagcagcctacggacgatgacagctaaacactagctcccacccaattttggtgaatacataaataagattgccacggaagtgaaatggcttgatcataggggtatttttcaatggaaagttgacactccccagacactcctgctcacccacggctcgcctctctcctggacctcctgggctatcgtgaacagaagggcttgaacagcccttccacctcctcatgttgaaagagaaataaagggccattgtgttttcattgaatgggggtccataataagagctcttctaggtctttcttgcataagctacatccagatgagttgacatttatttgaaataaatgtctagaacctaaaggttcttgtggggaaaaaaactaaatgcagcctctatttagatctttacagttttctcaaaaccttttatagttgtatggctgactcctagtcatcaaattgacagtgacttttaaaagattattgtttatgtagtcataaaatattcaacttatttttaaaaaatactggtatgtttatactcctatttcattagtttgtctataaatttcatcattacaataacaaatataactgatataaacagtttttttttcttttgagacagtcttgctctgttacccaggctggagtgcagtggcatgatctcggctcactgccacctccgcctcctgggttcaagcgattctcatgcctcagcctcctgagtagctgggattacaggcgcccgctaccacgcctggctaatttcttttttgtatttttagtagagatggggtttcaccacgttggccaggctggtctcaaactcctgacctcaagtcatctacccacatcaccctcccaaagtgctgggattacaggcgtgagccactgtgcctgccataaacagttttggaagtttacacaactattcttgataaacataaagctcaactggtggacatcaaagtgccgggcaggtcagtttttttttttggaggagatggacagtgtcagtctcctgataagttggtgatgggtaggtaatttaaaagcttctattataaaatctagtctctctgacactgccctgtccactgcagtcacatctcccaatactgaagaatcctgagaatacgagcggtcatgacacttactcacgtcattcaccagtaaaaccctctatccttcctcctcaaaatcaggaatgctctcctatcctccccattgacccccacccctcacaagcttcacctccactctgtgccctaccattatcctctagagcctcaacttctctttgaagaagatccttctaacattttggcaacatattccctccacttaacctctaattcccattttcagtttcagtcaccgaccagtgcaataacagcttagacttcatttgtcacttaaaactcacctatagtatattacccattttgtggtttatccactcagcccatgagccactctccccttcctgaaggttctgactggagagagaagaaagagagagaacaattgagtttctgagggttttccaggtcctgtgaaatccagctcaattctcttccttgggtt

SEQ ID NO: 96942 - DNA, 62332 bp, Homo sapiens
  misc_feature (1)...(62332): n = A,T,C or G
accccctgccagagcattactgtgaactccgccacctgtcagagcattactgtgtgagctccgccccctgccagagcattactctgtgaacaccacctgtcagagcattaccgtgtgagctccgcctgctgccagagcattactctgtgagctccgcctcctgtcagagcgttaccgtgagctccgccccctgttggagcattactgtgtgagctccgcgccctgccagagcattactgtgtgagctccgcccctgccagagcattaccttgtgagctccaccccctgccagagcattactgggtgagctccaccccctgccagagcattactgggtgagctccaccccctgccagagcattactgtgagctccgcctcccgacagcattaccgtgtgagctccgcgccctgccagagcattactgtgtgagctccgcccctgccagagcattaccttgtgagctccaccccctgccagagcattactgggtgagctccaccccctgccagagcattactgtgtgagctccgcctcctgccatagcattactgtgagctccgcctcccgacagcattaccgtgtgagctccgcccccgttagagcattactgtgtgagctccaccccctgccagagcattactgggtgagctccgcccctgccagagcattaccttgtgagctccaccccctgccagagcattactgggtgagctccaccccctgccagagcattactgtgtgagctccgcctcctgccatagcattactgtgagctccgcctcccgacagcattaccgtgtgagctccgcccccgttagagcattactgtgtgagctccaccccctgccagagcattactgggtgagctccaccccctgccagagcattaccgtgagactccgccccctgtcagagcattactgtgagctccgccccatgttagagcattactatgtgagctccgccccctgccagagcattactgtgagctccgcccccctgtcagagcattagtgtgtgagctcctcctcctgtcagagccttaccgtgagctccgccccctgccagagcattaccgtttgagctccgcctcctgtcagagcattactgtgagctccatctcttgtcagagcattaccgtgtgagctccaccccctgccagagcattaccgtgtgagctccgccccctgccagagcattactgtgagctccttctcctctcagagccttgccgtgagctccgccccccgccagagcattaccgtgtgagctccgcctcccgtcagagcattaccgtgtgagctccgcctcccgtccgagcattaccgtgtgagctccgcctcccgtcacagcattaccgtgtgagctccgcctcccgtcagagcattaccgtgtgagctccgcctcccgtccgagcattaccgtgtgagctccgcctcccgtcacagcattaccgtgtgagctccgcctcccgccagagcattaccgtgtgagctccgcctcccgtcagagcattaccgtgtgagctccgcctcctctcagagcattaccgtgtgagctccgcctcccgccagagcattaccgtgtgagctccgcctcccgtccgagcattaccgtgtgagctccgcctcccgacagagcattaccgtgtgagctccgcctcctgccagagcattaccgtgtgagctccgcctcctgtcacagcattaccgtgtgagctccgcctcccgccagagcattaccgtgtgagctccgcctcccgtcacagcattaccgtgtgagctccgcctcccgccagagcattaccgtgtgagctccgcctcccgtccgagcattaccgtgtgagctccgcctcccgccagagcattaccgtgtgagctccgccccccgccacagcattaccgtgtgagctccgcctcccgtccgagcattaccgtgtgagctccgcctcccgtccgagcattaccgtgtgagctccgcctcccgccagagcattaccgtgtgagctccgcctcccgtccgagcattaccgtgtgagctccgcctcccgtcacagcattaccgtgtgagctccgcctcccgtcacagcattaccgtgtgagctccgcctcccgtcagagcattaccgtgtgagctccgcctcccgccagagcattaccgtgtgagctccgcctcccgccagagcattaccgtgtgagctccgcctccccacagagcattaccgtgtgagctccgcctcccggcagagcattaccgtgtgagctccgcctcccgtcagagcattaccgtgtgagctccgcctcccgtcagagcattaccgtgtgagctccgcctcccgtcagagcattaccgtgtgagctccgcctcccgtcagagcattaccgtgtgagctccgcctccgtcagagcattaccgtgtgagctccgcctcccggcagagcattaccgtgtgagctccggctcccgtcacagcattaccgtgtgagctccggctcccgccagagcattaccgtgtgagctccggctcccgtcagagcattaccgtgtgagctccggctcccggcagagcattaccgtgtgagctccgcctcccgacagagcattaccgtgtgagctccgcctcccgccagagcattaccgtgtgagctccgcctcccggtcacagcattaccgtgtgagctccgcctcccgtcacagcattaccgtgtgagctccgcctcccggtcacagcattaccgtgtgagctccgcctcccgtcacagcattaccgtgtgagctccgcctcccgtcagagcattaccgtgtgagctccggctcccgtcagagcattaccgtgtgagctccgcctcccgtcagagcattaccgtgtgagctccgcctcccggcagagcattaccgtgtgagctccgcctcccgacagagcattaccgtgtgagctccggctcccgtcacagcattaccgtgtgagctccgactcccgacagagcattaccgtgtgagctccgactcctgtcagagcattaccgtgtgagctccgcctcccgtcagagcattaccgtgtgagctccgcctcccgtccgagcattaccgtgtgagctccgcctcccgtcagagcattaccgtgtgagctccggctcccgtcacagcattaccgtgtgagctccgactcccgtccgagcattaccgtgtgagctccgcctcccgccagagcattaccgtgtgagctccgcctcccgtcacagcattaccgtgtgagctccgcctccccacagagcattaccgtgtgagctccgcctcccgtcacagcattaccgtgtgagctccgcctcccggcagagcattaccgtgtgagctccgcctcccggcagagcattaccgtgtgagctccgccccccgccagagcattaccgtgtgagctccgccccccgacagagcattaccgtgtgagctccgccccccgtcagagcattaccgtgtgagctccgcctcccgtcagagcattaccgtgtgagctccgcctcccgtcacagcattaccgtgtgagctccgcctcccgtcacagcattaccgtgtgagctccgcctcccgtcacagcattaccgtgtgagctccgcctcccgtcacagcattaccgtgtgagctccgcctcccgtcacagcattaccgtgtgagctccgcctcccggcagagcattaccgtgtgagctccgcctcccaacagagcattaccgtgtgagctccgcctcccggcagagcattaccgtgtgagctccgcctcccggcagagcattaccgtgtgagctccgcctcccgtcagagcattaccgtgtgagctccgcctccccgcagagcattaccgtgtgagctccgcctcccgacagagcattaccgtgtgagctccgcctcccgtcacagcattaccgtgtgagctccgcctcccgacagagcattaccgtgtgagctccgcctcccgtcagagcattaccgtgtgagctccgcctcccggcagagcattaccgtgtgagctccgcctcctgtccaagcattactgtgtgagatccgccccctgtcatatcattactgggcgagctccgcctcctgccagatcagtggtggcattagattctcataggagtggaaccctgttgtgaactgcacatgcgaaggatctaggttatgcgccgcttatgaaaatctaatgctgatgatctgagatggaaccgtttcatctccaaaccatccccaccatccccacacttgtccgtggaaaaagtgtcttccatgaaaccagtccctggtgccaacaaggttagggaccaccagtttaaataaccaaatactaaaagaactggcatagaagtaaatgggctgctgctttatttttaggctgttctttttagagaacaatgacaattatttccaagtttgtcattagaaagtaatattaggttggtgcaaaagtaattgcagtttttgccattactttcaatggtaaaagccacgattacttttgcaccaacttaatatgataaatttgttccttaaagtgtatttttggtaagaaaaaccttttgtttttccttatattaattttttgttttttttcttggtagagacagagtcttgccatgctgcccaggctggagtgcagtgctgtgatctcggctcactgcaacctccacctccggggctccagcaatcctcccacctcagcctcccaaggagctgagactacaggtgtgagccaccatgcctggctaatttttatattttttacagagacagggtttcaccatcttgcccaggctggtctcaaactcctgggctcaagcagtcctcctgcctcagcctcccagagtattgggattataggtgtgagccactgccagaaaaacttttcctaagacaaggcaggttttacattatatttagattttttttttaatgatgtcttttttggcagtgcacagccagagaacaacacatcacacacaggaaacagttgtgctcatgtgatgggggcctcagcactaggaaggagcggactattggtgcacgcagcagcttgaataaatctgaaagtcactatgctgtgtaagagaagccaaattttaaaagtgcatactgtgtacagagggtgtcgagaatgcctcctacgtgacggaaagcagatccgtggttccctgcagactggcaggagcagattccaaaggcacaggaagaagcttgtgggtagagtgtgttcattatcttctgtgcattacaccataaaaaagctggtcataaaaatgcgaaccaaaaacaaaggtgaaactaggataaaatttctcacctgtgtgattggtaaatgtgcaggtttgacatcatgctttgtttatgaagctgtgggatacaaggactctcatacgtcactgtggaatgcagaacattgcaacctcatggaagaggatttggcagcatctaacaaaagtatgtggcatttgccctttgactcagcaattctagactgcctcaaaaaaaactctggcaaaaaaatgaaaggactttactcacagagttcttttcacgcctaaatatgtttgcaaccaagttcttcactgtggcatttgtaaaactggaaacaatcaaaatgtccatcagtaggggattaggaacattaattcgtacagtggggaactcagtaccagaaggagggatgaggaagacctattgataaggggcagagtacatatcatataatgcaaatatatatttgctttttcttaaaacagtacaaagataaaaaactaaagtggttgctgtggaggacaggggtcaatggtggaagtgagactgaaatagactctgaagtaatatctggactttgaaattataagtgttttacatattaccaaactaagttttaagatagtccctaaaattgaaagaatagtatctgaaatgaatgaatctaaattccttggattgtcttctgcaggtgccaaccctgagaccaaaatttggaaggtggccctgagcagcagctgaagggaagcgggaggtaagacaggaaagaggtgagggcacagggtgtctgggagccggatcccacgtgggcagctgggcccgtgctcattgtgggagctggtgcattccttcaccagcccacgctccacagggtcaggatggtcaattccgggcaccccggcctaatccaggacatgctcctgccaccagagaaagcccctaggcagcatcccgggtgctggtggtgtcagaatcaagtttgagtctgaggagtgacctggggctggctgggctaggcagcatcacagggttctgcagcccaactgcacatcaggctggtgacagtcacacagcctattacttcgtgtgtcatcagagcatcgccagaacgcagcacttcaagtatgcagatttagtgagccatagtttaaagacaaatagagccactgaaatcctaaatttcaatcaatcatctccttgttacttgtcttattggtattaagcctttgaaattatctggggtgggagttaaaactataactaattatgttaatgctaaaactaagatttttctggccaggtgcggtggctcacacctgtaatcccagcactttgggaggccgaggtggacagatcacctgaggccaggagtttaagaccagccttgccaacatggtgaaaccccatctctactaaaattcaaaaattagctgggcatggtggcaggtgcctgtaatcccagctattcaggaggctgaggcaggagaatctcttgaaccaggaggcggaggttgcagtgagcctagattgtgccactgcactctagcctgggcaacaggaacaaaactccatctcaaaaaataaaaaaagatttttctgagaaaaaggtgtaaaaccatatactaaatttgaaatagaaatataagcattaactctgttgttcctttcacatagacacatttcctagctctgccccaggagcagtaggcacatgaagcacctagacttggtctctaatacatgaaaaccatgaattcatagtgatggtttcaaagccaaaaccaaccaaccaaacacatgtaattggtcactcttggaggtacctagggcactaactcctaacactgggagtggacacttgagggaagatcagcgattatcccaccttctgtctacaaattgcaatcagggaaaccttgctgattaggaaaagttctttacagaagaattcctgcaaataagtgagtaaagaatgacagtttaagaattgtcccagcctggccaacatagtgaaaccccatctctaaaaatacaaaacattagccaggcatgatggtgggtgcatgtaatcccagttactcaggaggctgaggcaggagagttgcttgaacccgggaggcggaggttgcagtgagccaagagtgcgccattgcactccagcctgggcaacaagagcgagattctgtctcaaaaaaaaaaaaagagttgtcaaattgccaccccaatgctgtggttctctaacctgtgtaacaggatcacctggagggaccctacccgagaccttccgattcagtcctgggggaaccctaccccagatcttccgattcagtcctggggggaccctaccccagatcttccgattcagtcctgggggaaccccaccccagaccttccgattcagtcctggagggaccctaccccagatcttccgrttcagtcctggttcggcctgagaatttgcatttctaacatgtccagggaccacagtttgaaaacctccacagctgacatgtaatgggatgacttggtccaataaatgaaggaaaagtaacaggtggcaacctcaggcagcttcatcccaaccagtaagaaagtaaatccttttgtaaactaagaggaagtattaatatgggcgtttgagcaaacatttaagtgttaggacaaagaattaaaaactagcacaggcacccctgaagcatgataggatggcaacagaagggctgatttagtttccaagaaataactgacaggcagtgttgtgtgtgtgtctactgcttaggaacccaaaacaaaccttcagaccattttcatgagtactgagaccargaaaaccactgggcastgggtggtctggaaatgtaaatgtttatagtactccatggagtactatatgagtcatggaacgatgtttcatattgaaaatgttttataaatgtgggtttcaaggttttaaagtgaacccatgtgtgtgaggagaaaggacacaccaaagaagtaaaataattgggtcaatataaaaagaaagtagaatattgcccagagaggagatgtggataattcctaacayggatcaaaggtgagctgtgtctaagacagtcagacctgcaccgtcccgtgcagtagacaccgtggccgctgtgtctgagatattcagaccctcgccgtcccgtgcagtagacacggtggccgctgtctgtaagatattcagaccctcgccgtcccgtgcagtagacacggtggccgctgtgtctaaaatattcagtcccgtgcagtagacacggtggccgctgtgtctaagatattcagacctgcaccatcctgagcagtagccacagtggcaagtagcctctgcactggacagtgcagctacagaatgatgctatcactagaaagttccatcagccagcactgatgcagacctttgcaaatgcccctcacactgaatagcacctagctgatagattgtccactactcagtgaaaagcctgtgttaaaagcagtatttggtagaaaagcaaaaaaggggaaaaaattaaaagtggtaagtcattgtcttccttactgaattctagcagaagaatgttggaaggaagatgggagtcacgggagaaagtatcattgtcccaggacaggagggggtgccaggcatggttggctctgtccctggaattctatggcgggaatctggaaaaaggaaaagtgactggagaagaaaagattctgtgtgcaaatgtcatgatgcagccatcagtcatcctgagaaaataagcgaacaaagtggcttcagatggatgctgttggatacatgtacagatacaatgtacacttgcatatgcttgttcacacaaaggacaggatggttatctgttcatttaacaaatacttgttgagggcctatatgtgccaaagacrtcagatgcataagagggtgcactatggaaagcctcaggaacacaagtgcccagaaacatttagaaaaattctaatgaaaacagaaaaggcattttcaaattagctgagagaaacgagaccaaaggaaagactgacccagtatttggatacattatgtgatgaaccttaatgcagggaggaaagtgttatctttcagttaatttctcaacttctggagagcttagaacagacctggctaggaggaaattgaatctgaggcagatgaggagatagtggtgccttgatgcttccagtgattgggtcagcagaaccaggggtgggagatgatctctctttttgttggcagatggtggtctctgctgtagctttgtcccctggtgacgggactcaggcagcaacccccatcattggcaatacccccacctctgagaatgtggagaggacttgtgaagacaatgttgtcccaagcagcacagcccaggtactgacaggattcagagctagaggtttcttagaggtcagggttgtrgaagcagcagggactgcagctgcatagtttgtgtatgtaacaggctagtatctcttgttctagactcatccatttgtacattcatatgagtatgcacgcagggtgttttttctttctttttttttttttgagacggagtctcactctgttgcccaggctggagtgcctggtgcaatctcggctcactgcaagctccgcctcccgggttcacgccattctcctgcctcagcctcccaagtagctgggattacaggcacctgccaccacgtctggctaattttttgtatttttagtagagacgaggtttcaccatgttagccaggatggtcttgatccacccgcctcagcctcccaaagtgctggaattacagctgtgagccaccgcgcctggccagggtgttttttctttaaaccttaatttcatagtaattaacctccctttcaagagtcagccttgctgcccctgagatgatgcagaaaaagcacaaaaggatctgggcttgaatctcctcttactgcctgcttggctttaggcaagttaccttctctgaactctagttttctcttcagtaaaatgtggatatggtgccttggcatggggaggattaaacaaagccacatatttaaatattataagggtggattatatttaaatattaaaagggtggattctagctggttgcattcattaagtgtgtcctctcttgaatgaaggcattttctacccctagaactaaagggaaagcatgacggagcactcctgggtgccatgggtgatgatggctgtggtactccaggttggagactcggccaacagttggtagagcccaactaactgttgggagtggaggctgaggcctgctgcagtcactgagatgctcccccttttaaaaaattttaaaatagcccaagctagtcttgaagttctggcctcaagtgatcctcccacctcagcctcccaaagtactgggattatagacatgagccactgcgtctagcactgagctgtttcttgctgaggtttccctgtaagaacttccaaattgkgtcacaaaatcatagttgttagtattttcagagttctggagaacaaaacaggagccagtgatgggagggagaataaagatggacttcagaaactacagctcaaagagctgtggaagattctagaaaggattcttcaacaagtgatatgaatactttgtcaatgaaaaggctgaamctctgtgaaatacttgaagagatttattctgagccaaatagagtggccacgcccatgacacagacctcaggaggtggctggggtgcaacttggttttatgcattttagagggtcgtgagacatcaatcaaatctattcaagatatacattggttcagtccagaaaggcaggacaactcaaagtgggggcttctgggttataggtagatttaaaaatgttctgattggcaattagttgagagttattaccaatagaaaggaatgtctgggttataagaggttgtggagaccaaagttttatcagcagaagaagccttggggtagcaggcttcagagagaatagatggtgtttctcattagacttaaggtctgtgttggctttccctgaattccaaaagggaggagggcatagtcagccatgtcccacccgcccccacttcatgtcgtggcctgaacggttttcaggttaatttggagtgccctggcccagagaaggggtccattcagatggggtgggrccttagaattttacttttggtttacaactttatgaagagaccattagaaaccacytgaattcacatcatgaaaaaaaatccacactgtaaaaaaggtttgtagattaacacattaggtgaatgccaaagccacagaatatctaaatttctctgaggaatttgaaaactctcaggtatatgccttgtggacaagagagacagaaaaatgggacagaggatgagatagtttggagaatggatagctgatcagatctgtagctgtgcccagagtgctgaataatggatttgcgtccacagggaagaaagtctcaggtgccactgataaaagaccacgtccttggctctgggtccattcaacatcttggtagacaactgagtgaaaattcagagacaaccctaggaagtatgaggatgaaaaaagttagcattcatggaatgaggcactgaagaaactgaaaagctgaaataaccccatgaaataatgagaataattgtagtattctgaaccggggcacaggacacaggaccggggtggaaggcggcacgagactacgcgcgtgggaaagacccagggatcacagtggcccaaagctgggcacttcccaattccgggatttgtgctacaggcactccaggctccaccttagaactgtgtccagcacgaaggcagtgctgtcttgcgggaggcagggctgcaccaccaccggggtgtgaaggggcccagcaggcaggggtgtgaaggggcccagcagtgtttccasctgcacggggtcaggggccgcgctgatgcagagcacgggggcgcaggttaaacctaaaggagggaagcttttgggggcggaacagacaaccgagaatgctgcacactgcctttcccacccgaattgtgttttgacttttttttttttttttttttgagacagagttttgcacttgttgcccaggcctggagtgcaatggcccgatctcggatcactgcaacctcctcctcccggtttcaagcaattctcctgcctcagcctcccgagtagctgggattacaggtgtgcaccatcacgcccggttagttttgtatttttagtagatacggggtgtctcccaattggccaaggctggtctcgaactcccgacttcaggtaatccactggccttggcctcccaaagtgctgggattacaggcatgagccaccgcgcccggcctgcttttgctttcttttttttttttttttttttttggcagagtctcgctgtccacccctgtagtgcagtgagctcggctccctgcggccttgacctcccgggctcaggcaatcctcccgcctcagcccacggagtagatgggaccacaggagcccaccacgcccgactactttttgtaatttttgtagggatggggtctagccatgctgcccaggctggtccgaactgctgggctcaagagctccgcccgcctccgcctcccaaagggcagggatcacaggtgtgagctaccgcgccccgcccagagtttccgactgttagcaaatcacattcacctcaaaactatttatacaagaactgaaaggcaaactaagtccgtgctccatcacttcctgtcccaggtcgcggggccggacattttctccaagcgctttcctggcacagcgcgcaggcggcctgcgccaaagctctggcttcctccaggcgcccagaccccgccctccccgcaggcgccagggcgttgcctggcaacttagctgcgaggggattggctgcgcgggaccccgtgaccatcccggagaccacgcatttcctgcgcccccggaagtggtgataatgccaggccctgcccccggcagaggcggaagcggagtcggcctgagaggtctctcgtcgctgcaggcgcctcagcccagccgcgtgccttggcccatggccgcctactcttaccgccccggccctggggccggccctgggcctgctgcaggcgcggcgctgccggaccagagcttcctgtggaacgttttccagaggtgcggcctggcaccgcccgggcacctcccgcctccgccgcggcggccccgacccctgtcccgactcccccgaccaaccccgttccctgccggttctactgcggcctcctccgtcccctgtcgggtcccccgcggccccctcccgtcccctgccgccgcccccgacccctgccccagccgacgcggccgcccccgtcccctggcgggtcccccgcggtctcccccgtccgctgcccggtctcctggggccgcccctgcctcctgcccggtccctgtcctgtgcgtcgggcccttcccaagatgcagagtgcgccactgcagacccgaggtcgcggccaccggctcctgggctaggccctttttctcgcctcaagagccgccaggtggagggtctccagggtgcttgtttggggaaagcggaaacagactgtctgggccgctgttaaaatgtcagcagccaaggaagaagcagcgacctggcgtctgctcgggccaggtgacctttatggcggcgccttctgtccctggtcgcttttccaccgaatgtccgaaactgtagtgactgatggccagggaatggcttagttatctgagggaatcttktcttgtctgtgaaaaagggaaactggtgcaaatgggaattcagacaggccaggagaggaaggaagggaaggattgaggtgaagatgattgtcctcttaggggaagaccacactggacgtcggctcctggggcacttccttgattccgctgtactcstcagcgggacgggagaggcggaggttccaggagggagccttccagagtcggtgcagggttgacagragacgtttgttttgcttttcctgaactttcgatcgccagcttatttggtcttcttgatgttatagggtcgataaagacaggagtggagtgatatcagacaccgagcttcagcaagctctctccaacggtgagtgggccagtgggaactgggtctccggaccaagaagccgygagcctgccctgttcacagtggataactttctgaagttgtttttccaaggacaaaggaatcattaggacaaattgttawtactgcttcrtrgtggagatgcttctggtttattttgtggctaccgctgttactgcttggagtgcctcaccgagccagstaacaactgcgtgcgtgagcacagggaaaggcttcttgagaaatgaaaactagattgtaggtttaggaggggaataggaagcttagctctgtacagccgaaagccttttggtaagttggaggtccttgaatttcctgggtgactgcatcttggtgacttctctgaatagaccttcgagggcactggggggtgattgttggagggcttggggagctcaggcagcccttgtrtgggaaygtggctgttacaggaactgcagaaactgggactgggttcctggggaaaggattgggggtgttggaggcgctggccaggggattatggggaggtgttcttatcagtgtgcgaatactgggcgttcaggcagcgggaaatccgggtccttgcgtgttgtgagctccctggaattacgttcttgccagtttcagctcagttgatccccctcccctscgctatcattggacacattttacttcattgaaacctgactgccactttttctgtaatccctcaggggcagtcatcttttctgattctgwgtrtagtttgcttttccagatccgtgccatttaagctagaaaaggggtcagttttgagatgttgtgaaaatgttgaaaggcttcttgttattagtgggaagtatctgaagttgccagagactgaactggggcgcggggagcactacggctgctagacactgcctcactgcgctgtgggtgggggggtgctggattcagccttactgcctaatgatttgtgaggatttgtgttttcagagtaacatttttaccttatattacgacatcagttcctaatatgtggcgtgtgggccacagatgctggtgtattatttcacatgcatttctatagattgttttcagggaattcagaaatgctgttatctctacactagtgattgtgctttcttggtttttctcttttcattattcttaaatcctcgttttttttttttttatttgcatctcagttcgtttttactcgggaagtgcaagacgtggctactagaaagagatgtcaagagaacccggaatccagtaggctacaatttggcaaatctcagcttaaaacttcctaaatgttgaccacagtggatgcaaatggctctgtgcatcacctgttaaatatggtcagatgaccatccaggttcaagtggtttgtcascarggtgatacragccacacrgagtgccctcctcagaggccatgtytcagagacrtttattttgagtggttttccarygagtgatgcaagatttatgatccattttaacagcctgctttttatgcatttgctcwaatttttagattttaggtttagttttaggttttctgttaaacttgctcaaataggagtggtggtcaaatactggaccgcattagtatggtagcctgcccaccttggcaggctccactggagtgctttggggcctgcctggattccagtcctggctctaccagttttgtgtcctcgccgttactgggagggagtattgaggaaatgcatgcgaggtgtttccgtgattcctggcacggagcaagtgctcagtaattgtcagctgtgagtattagtagtagctaatacactggtactattcttggctaacaagccagctcaaagctttgatrgttttccattacctgatgatggtgatgatggtttccacttactcaacactcacacgctgggctaggcacttaacccaaatccaaggtcagcattattgtttgggggtgggggagacacctcctgctctgacttgtgtgtttgggttcccgtattttcaccagagggagttagtcctgccccagttcagctggtcctcaaagtgtatatagctctttaaccatcagcaagtgtctatcagaacataatcttgatttcagctgctactaaatatctaccaggagactgcttgagagaattgcctgatgggtgctgagtccaccattcctgagatactttgaaatcagtggcttaacccaagctgtgtgtcgggaccctctcaccgtggtcccaatggagtcacttttcttaggcgcccccctttaccttgggctctgagcttccctgcctttcatctctgtgggatgaagccccaccgcccttcaggatgcaaagccctcttctctaatgtgagtgcagggccaggtgcagtggctcacgcctgacctcccaacactttgggaggccgaggcagggggatcccttgagcccaggagtttgagaccagcctgggcgacactgtgagaccctgttgcctgaattgccctgggagatttcctcagcttgtgctgggggcatgtggccccatgaagcccgtagtcactgttcaccctgagagacgctggctttcgggctcacacacctgctgcggggcagccccaggaaatggccaccccatttctcctggagctgcgcgtgttctcagaaactgtggtggccgttctgttttgtttgcatcttataaacgtttacctgatkacattttcctcttcaatttagctgctagaaaatttaaagtcaggttggtggctcaccagtaatgagagtttagagtagaagtaaactttatgacatagtcttagactcttcactttcttctcaaccaatatgattcacatttactttattttgctgtaccgtgagtgtctctgtgttycctgaattcyttctggaataaggcaggttgttagtaagcacaggtttctggtccatctcacagcctcaggcagtgggcattgctgtcggtgctccctttccgggttacctgtggtagctctcaagttgcagggctgcgatttgaagcctgatttagtacaccgtgtttctgttgtgttctgtggtggtttgctcctcacatgtgagcattcaccgtggccctgtgtttttccaccacacctctgcctggtggcatcctactggatgtctcagccgagccactctgttctgaagatgcccttgtcctccacccctttgctttgggctctaagcttcttctgcctttcatctctgtaggatgaagccccacccgcccttcaggatgccagccttggcaacattgtgagaccctgtttctacaaaaagtaaatgagtgtagtggtgcacgcctgtattcccagctacttgggaggctgagatgggaagatcacttgagcctgggaggttgaggctgcattgagctgagatcaagccacggcactccagcctgggagacagagcgaaaccccatctcaaaaaaacaaagaaagtggatgcgcgctgctcctgccattggatcatcgcagcatttttcttttctctgatatgcacctttttcctcatcgtgggggctcacgttttcatagttccctctcactactaggttgtgagctgygtgaaggaaggttcatagttgtgttgtatgtacaggcacacaaaatttgtccttggataaacacatatcctcttccttcttctctctgaatttctttattttaagaaaaaaattagagatggagtctcactgtcttgctcaggctggtctcmaactcctaggctcaagtgatcctcctgcctcagcctatactaatatgaattcctatactaatatgattgaaattagtttgayttstataataattgtgctcccagattgggcttctgttttgatagtagaactaaattattaggctatttcaagaaattaatatattactggtagaaaaactgaagctacaaaatggcctggtttctcacttcagttaaatttgtgcttctgagtgcttgtattctaggtgaaaccacactgagaaggtatttgtggcccatacactgattccttcatgagacttgtttgcacaggagagctgctaaaaattactgctctcagggaggtctgtggtgaacaggtatgaagaagaagactgttctctgcccttctttttgcaataaaatgttccaaactatcttgagtttgatcccttttcgggtgtttggggtttttttaacattcacatatttcttggaattataagaaattaactttgtgcttctgaagtaggtttgccttaatataacactgatgtatttgtaaggggcatttttaaagctgtactttaaaaaataataattcttacattcgtttgaaggtttttttatgtgtgtttttgagacagaggcttgctctatcgcccaggctggagtgcagtggcacgctcttggctcactacaacctccgcatctggggttcaagcgattctcctgcctcagcctcctgagtagctgggactacaggtgcccaccaccacgcccagctaattttttgtattttttttttttttttttttgaggcagagtctctgtcgcctaggctggagtgcggtggcgctatcttggctcactgcaagctccgcctcctgggttcatgccattctcctgcctcagcctcccgagtagctgggactacaggcacccgccaccatgcctggctaattttttgtctttttagtagagacggggtttcaccgtgtcagccaggatggtctcgatcttatgacctcatgatccacccgcctcagcctcccaaagtgctgggattacaggcgtgagccaccacgcccagcaattttttgtatttttagtacagacagggtttcaccatgttagctaggatggtcttgatctcctgacctcttgatctgcccacctcagcctcccaaagtgctgggattacgggcgtgagccagggggccaacatggtgaaaccctatctctactaaaaatacaaaattagccgggaatggtggtgcgcgcctataatcccagctactcgggaggctgaggcgtgagaatcacttgaacctgggaggcagaggttgcagtgagctgagatagcgccactgcactccagcctggggggcagtgagactccatctcaaaaaaaaaaaaaaaaaagaatagaataacccttgtttaggtgttaacaaaatccaggccagacaaatctaaactttaatctcatacccagttcctagatgagtcccttctccagctcaggttccgcctaagcctcagggttccttacttggtgggcaccacctgctcccttccccacctttgtcctctttttcctctgctggctcctccggggttgggtgtgttcagaggcagagacaggctaaaggtctttggcttttaggttctgttggtgggtgagttccagatatagctttctcttgtaggatatttcatttatttatctattaaaaatatttatttagaacacaccattcatgtgccagaccctgtccaggcactggggatagggtgataaatgagatcaacaaaaatacctgcccacattaagctcctgttctagggaagacagaaagaaaatacacgtgtccttagtatattagaagattccaagtactgtagagaaaaataaagcaggctggactcggtggctcatgcttgtaatcccagcactttgggaggctgaggtgggaggattacttgagctcaggaatttgagaccagcctgggcaacatggcagatcctgtctctcccaaaaaaaaaaaaaaaatttagctgggtatggtggcgtgcatctgtagtcccagccactggggaggctgaggagggagaattgcttcagcctaggaggtgaaggttgcagtaaaccgagatcgtgccattgcactccagcctgggtgacagagccagaccctgtctcaaataaaacaaaaggaaagaaagaaaatgaaaaaaagaaagagatggggcaagcaggggagagggctggggacacaggggagggtgctggggatgcrggggagggtgctggggacacaggagggtgctggggatgcgggggagggtgctggggacacgggaggggctggggacatgggaggggctagggatgcaagctttcctgagttcccacagttctctgcccctctcctgtctcacggggtgtgggccacctgtggcttgcggttgtttcgcgccaagctaatatcttgttcttcccaacagagaggcccgttgaggcttctctgtcctccatggggaacagcattggcctaaacctgcagacaccattgcaaagggaagtcagctcaggcaaacccgctggtgaagaagaattccagtgtggggacacagagactgacatttcttgccatgggtgatttaattttgggcctcagtttttcattcccccctaagagtatgacgcagccgcatccttgccagggccggagggagggtggatggacttataggtgttgcttgtggctgggtgacttgcttctgccaacgagattttcacagacacagcacaagcagaagcctggaatgtgtggcactgccaggcctgccctcttaggctcttgattttccccacgagatatgcgtgccccagggaacggcggctctggctgtggaatgagaggcgtgtggagcaggcatggttcccaccctcagcctagagtcaaggccagactagatcagcctaagcccagccacgccacgggtgcagcagtgaagagcaaatgccaactgtccatgacagtgactttcaaaggggcgtgtcatgtgcctcatcccagcaacagggaaggcatttctctatcagtcagttggtaaatgattattgacagtgtgtgggaaggtggagttatttgagtagatttggcctctattctcatggagcttcctttytagaggggaaggcagatgatggatgaataaatataaatgattytaataggttggtgcascagtcattaaaagtaatggcaaaaaaaaaaaaaaaaaaaaaamcgaggasccggtgctgcagttcattaatagtaatggcaaaaactgcgatgacttgtgcgccaacctaacccagtaatcacgggtgtgcaaaatgtggcgatgggcaagttccgagtgctaggaragcatctascttcccggagtcaggaracgggggttggcaacctaaccaaggttaagtccaagggaggggggtgggcagggascgatatttcagtggagactccaaggacgaatggtatttagagagtaaaccccgatagagagggtttgtgtctggcacagagaagagcctgtgcaaaagccagcggggcgagaggacaccatgtgttcatccacctgaggggcgaccagcaggctggagctcagcgggttgagaggaggatgcagagcccgggaaaggcaccctaggcagagggcacagcagggcaaaggcctggagtcaggcctgagcctgtgtggtttgaggaacggatagaggcctgtccggcaggaagggaacagcacaggggagagaccttaggccagagcagagggcagggctgtgctgggcactgtgggctgtggatggtgctggcatttaagaggggagaccatagaccagggcagagggcagggctgtgccgggcactgtgggctgtggatggtgctggaatttaagaggggagaccatagaccgaagtagagggcagggctgtgctgggcactgtgggctgtggatgggagctggcatttaagaggggagaccataagccagggcagaggggtggggagggctgggccaggcaccagagtggagaccacaggccagggcagagggcagggctgtgagggcactgtaggctgtggatgggagctggcatttaagaggggagtccatagaccagggcagagggcagggctgtgagggcactgtaggctgtggatgggagctggcatttaagaggggagtccatagaccagggcagagggcagggccgtgctgggcactttgggctgtggatgggagctggcatttaagaggggagaccatagaccagggtagagggcagggccgtgctgggcactttgggctgtggatgggagctggcatttatgctcaagtgatgggaatatgttaaaagattttaaggaggggagtaacagttgggattaatgtgtattctgggaatctcaacaaagtaaattcatagttcgaattttcataagacttctgcacaggcagagagaaataagatcgcatctacagctgtgtggtgattttctttaaaaatactactaagtttttaaacgtgatttcaaatggtgtgtttctgtttcacmttggacataagtagattgcaaggctaatggaaagtagaaaagttaactcatgaacataaaagagacatcgatttgaaaacaaaacatttattcatttacttytgctgcagttttcttgactgctgaatttcgyragaagggattggtcagggagggtcttggggctgaagacctggagaggagctggtgctatcgctgttcaaatctgaaggtggtggagatggagccttggggaggagccggtgctgccttttaagtctatgagagtcgttgagctggaggtccagggaagagctggtgctgccactgatgtcttaggttgtggagctgaagacagtgaaggagctggtttggctgttctgtgagggtcgtggagctggagatccaggtgggagaggtgttctagtttgagggtcatgcagatggagatctgtgaggagctgatgttattttaattggtgggtcgtagagctggagaccagggaggaactggtgtggttctagtttgagggttgtggagctggagacacagggaggagctgaggttctagtttgatggttgtgcagctgaagactcggggaggggctgaggttctagtttgagggccctacagctggagatccggagaggagctgatgttttagattgagggtcgtgcagctggagaaccagacaggagctgatgttatagattgagcattgtgcagctgaagactcggggatgagctgatgttgttcgctttgagggtctttcagctgaagactcggggaggagctgatgttctagattgagggtcatgcagctaaagacttggggaggagctgatcttctagtttgagggtcatgcagctgaagactcggggaggagctgatattctagtttgagggccctgcagctggagatacagataggagctgatgttgtagtttgagggtcttgcagttgaagattcagggaggaactgctcatgtagtttgagggtcatggaactggaaacccagagaggagctgatcttatagattgagggttctgcagctgaagactcggggagcagctgaggttctaacttgaggaacctacagctggagacctggagaggagctgatgttctaatttaagggtggtgcagcggaaaaatcgggggggggggagctgatgttgttcgcgttgagggtctttcagctggagactcggggaggagctgatgttctagattgagggtcatggagttggaggcctggagaggagctgatgttgtagtttgagcatcttgccagctgcaaacccggagagaagctgatgtagtttgagggtcttgcagctgcagacccagagaggaactgatgttctagattgaggatcatgcagctgaagactctgggaggagctgatgttctaacttgagggtcatgcagctgaagactcggggaggagctgatgttctagtttgagggtcttgcagctgcagacctggagaggagctgatgttctagattgagggtcgcacagctgaagacttggggagtagctgatgttgtttgcattgagtctttcagttggagactcagggaggagctgatgttctagatttagggtcatggaactggagacctggagagaagctgatkttctagtttgagggtcttgctgctgcagacccggagaggagctgatgttctagtttgaggatcttgcagctgcagacgtggagaagagctgatcttctagtttgagggtcgtgcagctgaagtctcggggatgagctgaggttctagtttgagggtcgtgcagcagaagactcggggaggagctgaggttctagtttgagggtcgtgcacctggagaactggacaggagctgatgttctagattgagcatcgtacagctgaagacttggggaggagcttatgttgttcactttgagggtctttcagctggagactcaggcaggagctgatgttctagtttgaggatctcgtagctgcagaatcagagaggagctgatgttctagattgaggatcttgtagctacagacccatagaggagctgatgatctagattcagggtcatgcagctgaagactcggggaggagctgatgttgtagtttgagggtcatgcagctgaagacttggtgaggagcttatgttgttcactttgagggtctttcagctggagactcaggcaggagctgatgttctagattgaggatcatggaggtgaaaacccrgagaggagctgatgttctagtttgaatgtcttgcagctgcagacccagagaggagctgatgttctagtttgaggatcttgtagctgcagacccagagaggagctgatgttctagattgaggatcttgtagctacagacccgtagaggagctgatgttctagattgagggtcatgcagctgaagactcggggaggagctgatgttctagtttgagggtcgtgcagctgaagactcgggaaggagctgatgttctagattgagggtcatgcagctgaagactcggagaggagctgatgttctagtttgagggttgtgcagctgaagcctcagggaggagctgatgttctagtttgagggccctacagctggagaactggagaggagctgatgttctagtttgagkgtcttgcagctgcagacccatagaaaagctaatgttcagtttgaaggtcttgcagctgcagacccggagaggagctgatgttctagattttgagggtcctgcagctgaagactcggggaggagctgatgttctagtttgagggtcatgcagctgaagagccagggaggagctgatgttctagcttgagggacctacagctgaagacttggagagaagctgatgttctagtttaagggtgttgcagctgaagactcggggtggagcttatgttgtttgcattgaaagtctttcagctggatgttcagggaggagctgatgttctagattgagggtcttggagctggagacctagagaggagctgatgttctratttgagtatcttgcagctgcaggcctggagaggagctgatgtagtttgaaggtcttgcagctgcagaccgggagaggagctgatgttctggattgaggatcttgcagctgaagactcggggaggagctgatgttctaagttgagggtcttgcaactgaagacttgaggaggagctgatgttctagcttgagggtcgttcagctgaagactcggggaggagctgttctggtttgagggtcgcgtagctgaatactccaggaggagctgatgttccartttgagggtcatgcagctggagatccggcaggagctgatgttccagtttgagggccgggtagctgatgtaacagtttgaaggtcatgcaactggagacctgtgcgggggagaagatgttccagtttgagggccatgcagtttgagacccagcgggaagctgatgttccggtatgagggccatgaagctagagacctggttgggaggtgatgttccaggttgaggaccgtgcagctggagaccgggcgggagctgatgttccagtttgaggtccgtgcagctggagacccaggagggagctgatgttccagtttcagggccgtgcagctggagacaccgcggggagctcatgttccagtttgagggccggggagctgatgtaccagtttgagggccatacaactggagacccgggggggagaagatattccagtttcagggccgtgcagctggagacccatggggatctgatgttccagtttcaggttggtgcagctggcgacccgggtgggagctgatgttctagtttgagggccgtgcagctggnnnnnnnnnnnnnnnnnnnnnnnnnnnnnnnnnnnnnnnnnnnnnnnnnnnnnnnnnnnnnnnnnnnnnnnnnnnnnnnnnnnnnnnnnnnnnnnnnnnnnnnnnnnnnnnnnnnnnnnnnnnccaggtctccagctgcacagcccttaacctggaacagtttgaacctggtgggggagctgatgttgcaattggagggccgtgcagctggagacccagaggggagcagacgttctagttttagggccgtgaagctgtagactcaggaggaagctgatgttccagtttgagagctgtgcagctggagacccgggggggaactgatgctgcagtttgagggccatgcagctggatacccggctgggagctgatgttgcagtttgagggctgtgcgcctggagccctggggcggagctgatattccagtttgagggccgtgcagctggagacctgatgggagccgatgttccagtttgagggccatgcagctggagacccggcggggagctcatattccagtttgcaggccgtgcagctggagacctggtggggagctgatgttccagtttgagggccgtgcaactggagacccggcagggagctgatgttccagtttgagggccctgcagctggagacccatggggatctgatgttccagtttcaggttggtgcagctggcgacccgggtgggagctgatgttctagtttgagggccgtgcagctggcgacccgggggcgggctgatgttccagtttgaaggccgtgcatttggaaaccctggggtgagctgaatttccagtttgagagatgtgcagatggagacccagtgggggagctgatgttccagtttgagggcccagaagctgatgttccagtttgagggcccaggagctgatgttccagtttaaggctgtgcagctggagacccaggggtgagctgatgttctactttgagggctgtgcagcttgagacccggcgggtagctgatgttccagtttgagggccgtgcagctggagacccaggtgggagctgttgttctagttttagggccatgcagctggagacccggggagtggggggagctgatggtgcagtttgagggccatgcagctgaggacccaggggggagctgatgttctcctttgagtgctgtgcagctggagacccggggggagttgatgttccgtttgagggccgtgcagctggagacccaggtgggagctgatgttccggtttgagggtggtgcagctggcgacctgggcgggagctgatgttctagtttgaggactgtgcagctggagacccagcggggagctgatgttgcagtttgagggccatgcagctggagacccatgggggagctgatgttgttttgagagccgtgcagctggagatccgggggtgagctgatgttcccgtttgagggctgtgcagctggaggcctagcgaggagctaatgttcctgtttgaggtccttgcagctggagacctggggaggagctgatgttcttgtttgagggccttccagccggagacccggggatgtgctgatgttcccatttgagagctgtgcagctggagacccgtgggggagctgatgttccctttagaggaccgtgccactggagagcctgcggggatctgatgttccagtttcagggccatgcatcttgagactcggggaggtactgatgttcccgttggagagccgtgcagctggagacctggggaggagctgatgttcccgtttgagggccgtgcaggtggagacctggggaggagctgatgttgttctagtttgtgtgttgtgcagctgcagatccagggatgagatggtcctgcggttcaaatatgagggtcccggagctggagtctatgtgaggagccaatgctgcctctgatgtcttaggttgtggagctggaaactcgcggaggagtcggtattagtgtttctagttgagggttgtggatctggagatacagtggggagcagtgttctagtttgtgggtcgtggagctggagacccagggaggagctggtgtgtttctagttgagggtcatggagctggagacccacggaggagctggtatgttctagttgagggtcgtggagctggagatctggggaagagctggtgctgcggttcaagtctgagggtctcagagctggagcgcccgggaggagtaggtactgccactgatgtcttaggttttggagctggagacctgtggacaagccaggctggtgttctagtttgaggttcctggagctggaatcctggtcaggagccagtgatgctgtttaagtctgaagttcgtggagctaaacacggagccgatgttagggaagtagagagagagagtttcaggacgccacttgaaactgtccatgtagctgaatcccaagcaagttaagcctgggagcttctcagtcctcgggatcaatgcattcctttttctcttacacagtttggatttgttttctgtctaatgagacagaaagaccctgattaataccctcaggaattgaaaagcttaaaaaaaactaaatgatattggtataataataatagaaattaagctatgattatcctgacagacaaaatcacacaccacacacaatatacatcttttcaatcagttagtcaaataaaatataaattgaaaaatagacccatgcaaagctataaaaagttactttttttcttcatgttcaaaaatatttaattcacttcaaaatgtcatacaaattatggtggtttctatgcacccctaaagcttcagtcatttagctcaggtacatattaaagtaatatattaattcttccagtacaatggtgtttcataccattgacacttgcatactctagaataatttggaaagacgtgtaatattcgcaatgttcagaaaagcaagcaaaagktcaaggaacctgcttggttctgagatggcctcatatcagcttcataaacattcattctacaaaatagtaagctaacatttgaacacaatttccaaaaataaagaatattttctcataaataatgaagtctgtttctcaggcacctcagaagtatacaaaagaatttgagtttgaacagatctcttggaatgtgtttaacctggtatttcaacagacttaagatttctagggtttcacaaaggccagattttatttcagttactcagaagagaaagaaaatgtcttctgaaagaggtgaactcaatcactaccaatagaaaaagtatccactgtattcatctcttatggaaacagaaaaatataacatttccccccttaaaataatatatatattwtatatatatatatatatmcacatatgtatatataacttaaagttccattgtacgtagccggacaataaaatctggaaaccagcatgaaaccctrttattcacatgttaaaatgttgaaactatgaccaaaatgtgaaaactgctagagctatcagaaagagacaagacaaaaaccttctttcatatgtataaactaaatgtgataatctcaaaaaacttttcaaaattatgattaccttccagtttaaaaactttaatcctaaattaaaaaaaaaaaatctatacacaaaccactgatttgcccagaccaaaagaaagaaagaaagaaagatcagcggtaaggtaaacaggacccagaggagctgatattcacagttcttacgtgtacaactcttccaggaattatccataaagtactttattgttttacaacctgcttttcttgtaaaactaaacgtggacttttttacataaaagttttatacggcgttaaaaccagaactgtatgtaaaatactgcatctaaatgtttctaaatagtcttgttccattggttcatcggtgacttctgtggcttcgtcatcattttccatggatgattctgaaagaatctctccagttttactggaattagatcctactaattcttctgtttcacggcagtcagaagaaccactactttcagggccttcgttttcattaccttcggaatgtagtaaatctttctcagcttgagacacatcagattcctccatttgattattttcctcaaaagtctcttcattcacagttgaggcatcatcagattatttttcttgattttttctttccgggatcatttctcttgatgtcataaaagactctaaaaataagcaaatgttgttgtacttaaattttattttcagaatacctccacagttaagtttcatgaattctgatgttctataattcaaatcacattccctgaaattcagcaacaactacatacaggtgggagaaaagcccaatgtcggcattacaaggagttctattatgtacaattctttcacgaaagcaatgaatacaagaatttgaggatcttcttactcctcccttttacagatggtctctcaataccttcttcttcctcttcatcctcttctgtacgcgctgccgggtacaacggctttctttgtctttatcctgagatgaaggtgatgcttctgtttcttctaccataaccgaagaaatttcgctgcaagtcgcttgaatggctgtttctctgacttcgccttttttgtcaaacatgagtctttttacctcatgcccctcagcttccacagcatcttcatctggatgtttatttttcaaagggctcactgagcaaacttctgattcagatgtcgaagagtcactgtgatttttctcttcattttgctgcaaatttacctctttgctgtctgtgctgtcaggcgacccatttgttgtcatgggggctgacaaagaaacctttggtcgattacgtggtctgggtgtcccaggcccatttacattagacctctcaggatagcttggtgaatttccaggaaacataacaccattcattcgatttaaactattggaattgtttttctctgaagaaggataaacacagctaacaaccatcacatccttttctactcctctgagaaatttgtctgttcctgtatagtttctccttggatctgttaacaattcacatagtcgctgaatagtaaaagggatactgttaaatccagtgacaattctcagtattctttccttcatttcatcaaagggaatatattcgacattagggttgggaggacctcttggctcaggagctgaagttctgaaatcatccatcactttctccagtttgaaaataaaatagcctttaaattgggaccactgaatctgtttctccagtcttggctatatgacaaagaaactgatccaggacaggacaaacttcctttttcccctcttctcaaaatctttcagcgcctcctggagactctcaacgtccatggcttcctggagtccctcacagcctccgcctccctccgcaggtctcttggggaccggaatgcctccccccaccccccgacgtcctcccactccctcgcacacactcccgcatgcaggccaagtkgggtggggggaacgaagggagccaggggaagcatgtgagagagtgagaccaacagagcgagcatctccccaagccactaccaccaaccctccaacatggcgcctggcacrtcaccctaaaaagttatttcttggagaagcaatggatgacagagattaatctgagagttactattagtggagaaacttagaacttaccatttttcctgtgaggtttcggcgctgatactgctattctgtgagttctggcaattgagtccgttcacacagcctggtgatgcagcaggtgtcacagaaggaccctgtcccagctggtcctgctccactgctatgatggtgtggcctctgatctctgaccgtgtcttgaggggagaccaggcccttgatcacaagcgtatccatggtgaggttccgtggatggaagctcatgaatgttccttcctgatgttcatctgccaccttgctattgaatgcatcttgtttataactgccttctaagtattgaatagaaataaagcatttgtacaggatgggtaaggtataaagaatattgacacattggacacagaggacctccaccaagtttagggagtagaatctcaagaaacataactgtggatgctccctggaggccctgcctgagtcccgggtcccttcccttctcctgcagagggaatcagttcctgctttagtctttattattcccacacttttcttcatagtacgtttctttcaccacgtatctgcacatccctaaaaaatatgccatttagtttttgaactttctgttttctttttgaggcagggtcttgctctgttgcctcggctgtagttttgaactttgatgtaaggaagttctcctgcgtggctgctcctgccctgcatggctctgagcatctgctctgtctatttctgtcctccattctctccctgagacccacccacactgacatggttcattttcattgctgcgtgatctcccgtctccattctctscctgagacccacccacactgacatggtycattttcattgctgcgtgatctcccatctccattctctccctgagacccacccacactgacatggctcattttcattgctgcgtgatctcccgtctccattctctccctgagacccacccacactgacgtggctccttttcattactgcgtgatctcccgtctccattctctccctgagacccacccacactgacatggctcattttcattgctgcgtgatctcccgtctccattctctccctgagacccacccacactgacatggttcattttcattgctgcgtgatctcccatcgtctgaggggagcatgggaaatgtcttccatcttcctgtggatgagtgtttggccaggttggggccctgaggactgtgttttgttgggaacgttcttgggcgtttcttttgtacacaagtgcaagttgcttctggtcagtagctttcaagttttaaaatttcatcccaggtaagaaatgtaactttcctcataacccacaacatactctttcatatacaagcataacaaaaatagacttcacaaccgttcttagcagggcgtggtgttcctgcttctctccattctccccaacactggcatggattgggttgttggtggtgggatttttgcccatctggtgggtgtcacgtgatatctcccactgttaggctgagcccctcttcatgttttcattagccattcctccacatttcctcttctgtggagggccagttcagctcttttccccagtttctgttaagttgtttgaatttttgcacttttcttttattattcctattgttatgtttttgagacagagtctcactctgttgcccaggctggaatgcagtggtgtgatctcagctcactgcaacctccaccttctgggttcaagtgattctcctgcctcagcctcccaagtagctgggattacaggcgcccgccaccacccctggctaatttttgtatttttactagagatggggtttcaccatgttgtccagactggtctgaaactcctgacctcaggtgattctcccacctcagcctcccaaagtgctgggattacaggcatgagccaccatgcctggcctgcctttttctttttcaaaaggactctttatacctgttcattccggtgactatctgtatggcaaagatgggtttgaatccaccaggataaatgtgcaggatctcctctctggtgggagaagagacagagagggatagaagggtatggagaacagagccgagaggaggccgagtcaggcaggggtggcaggctgctgtgaggacttggctccgtctctgagtcgggtggggattagcagaggatttaaacagaggaaccatgggatctcccttatgcatttctgccatggttggctcagctgaacgcacctcttgaacaagacttggccttggacacctagaggcccttggttgagggtttacctcctggcgtggccactgacacatccacgtttggctcccacacagctgggcggccccaagacctgctctgcctgggcttctcattggtggcatttctcaagtttgtcccctctcaagtctgcaccatccggaaaaccaaacacctctctctcctacatggaaacccccatcagcacctccccctgactcacagggcatcccgtcaacatcacagtcccgactttcccatatggacaagcccacaggaccccctgatggaccaggacagcgccagcactaagacatgccctgaaactcacaggaagacctgatcaagaagacgggaacagcacagggcactgggagctgcaaacacccacgatactgtcagagatggagaaaggtatgacaggaagagcagatcaagaagacgggaacagcacgaggcactgggagctgcaaacgcctgcgatamtgtcagagatggagaaaggtatgacaggaagagcagatcaagaagacgggaacagcacgaggcactgggagctgcaaacgcccgcgatactgtcagagayggagaaaggtatgacaggaagagcagatcaagaagacgggaacagcacgaggcactgggagctgcaaacgcccgcgatactgtcagagayggagaaaggtatgacaggaagagcagatcaagaagacgggaacagcacgaggcactgggagctgcaaacgcccgcgatactgtcagagacggagaaaggtatgacaggaagagcagatcaagaagacgggaacagcacgaggcactgggagctgcaaacgcccgcgatactgtcagagacggagaaaggtatgacaggaagagcagatcaagaagacgggaacagcacgaggcactgggagctgcaaacgcccgcgatactgtcagagacggagaaaggtatggccatggctgacacaaaatgttactcaacatttatcacaggcctaaatggagaacataacgctataaaacccttagataaaaacacaggaaaatttgtatggcctggggttgggcgaaaagttcttagacatgacaccaaaagcatgattcataaaagattgacaaattaaattgtcataaatttaaaattataatgctataaagcaatataaaaatctaaagagaatgaaacacaaaccatggtctagaaataaacatttgtgaatcacacgtctcacaacgtactggcacgcaggatatgtgaagaaccatcaaaacttaaccataagaaagtaaaagccccagtattaaagagagggcagatattggaacagaggcctcatcaaagaaggtataaggagggcatattgcccgagaaagaggctcaacgtcgtagagatgctggagaaatgccagtcaacagtacctctgcaaatctattaaaatggctaaaaacagacaaaaaccacaggccgacccaggttctagtgatgatgcagaggaactgggaccctcataagctgcagtgggaatgggaggggtcccgccatgctggaaagtggtccgggagtttcttacgaagttaagcacatccttaccctgtcatccagcaaccccgctcctgaaacgtcccccaagagaaaacttaaacrtgcatgcacaaacctgcacacaagtgtttaggcctcattcctcattgccaataactggaagaaaacaaaatgtccatcggcaggaggaggcgggaaccaacgcggatgcttccacacagggggcaccaaccagcagtggaaggatgcacccaaatgccccaggtctcccaggccayatgcccrgtgaaggaagctagtttcggtgcgcacaggccgagggatgccgccrcrtgacatcttggagaagacagtgctaccgtgttggggagcagggcagtggtttcgaggggctacgggtggaggggcgaatggaggagctctctggggcggtggcgtgagcacctgcacctcactgtgggctgctgcggctgaggggctgtacagcaaacactagcttcagtacacgcagactgaaggaggaaggctgccacaagtcaaagacagagggtgtcacctccatgaaacaaaaacatattaaaaaaaactcttaaaataaaaaaaccacaaaaagtatttcataagcgtattggactttgagttgacatcatctacctgggagcatggaactgaaaccacaggcttggcaatcccagagggagagagtggagggtttagacctccattgaagggctcagtacctggctataggaaataacatttaaaaagcggcagggtggaaataatttctgctgatgaggttgcatttctccagataaccggcagagtaaattaaagcaatatagtaaaacaatgcacatattgatggaatctcaggatcacaaggttgtggtgaaggaaatttgaagatgtccaggaaagaaagacaaatgagatgaatcttgcagctgcccttcaagggggcatgggccgggtggccatgattctccgtgatgttgcaggaattctggctgggtcctcaggagccttttttttcttgtccacattcaccttcggtgggtggtccctggtggtcatgaccgcactcagggcccggggcctgctgaggctgctctccctgttcccggaatgcaggggtttgttccagatcccgctgctctccacacagaaagccaatcactaagacgatagttactgccaatgaagaaggcgtgcatcagaagctacaggccaggagatgggaggtcagcttcaaatccatcttcctgactgactatatagcagggaagaagtgtgactgtgtgtaaggaaaacagaaattagggagagtgaggaagaggagttggtcaggaggaggcaggtggctggtcaggcactcatgatgggtgaggggtttggcgtcttactgtccagatggcgtgatctggtgagtctctcttccttcacactacctgggaggcctgatggtcagtttcctaagaaaggwactcaaataagacaaatgtcactttctcaagttttaagaccaaaaggatccatttctatgttattcagagaaaccatgaacatcaattctctgggacaatcaggccagttcaacacgagatctgatcggccacgacacctgctgctcgaccctcagataaggcccagaatccagtgtcctctcccccaccccagcctggccccacacccacacctccccacttcaccctgggcctctgctctctcgccacagaggggtcagggagctgttcacgccccrygtgcacctgggcacgtggcatatttcagatgcacctggtgtcactgtttgcacagacctaagtgggaagagatccaaatgctcgttcactgcaggtggatgaggacatcccagcaagtccctcagtggagtcagccagtgcaaggcgagtgagggacccccagagacatgaatgggtctcagatagtgtgtgagtggatgaagcagcaaaaacacacgctgctaattaattgatttatgtcgagctcaaagtagtccacatcaaaaagactgtttggggctgcaggaattcagtggataattgcaggcaaggcaagggaaggtggaccagaaaggtgaggaggacgctcccttcgagggtggagagagtaagactggcattgcacatgggtgggggggcccgtcgaggcccctctttgcttctgagagtctgttttcatcgacagtcttctactaaatgtacatagcagcttttcagggcaagggtcaccgggattcrtctttatgcctccccagcccgggagccaccacctccaccagacccatccacacagttgaatctyatctcaagttctctggtgcccgaccccccacgcacaccgtgctggtctgggcatctcacctgcatccgcacaagtgcctcaggagggtggagtgtctggtgctcggcgctggaggctcagcccacactgtgccgggcagtcgcaggcctcccagatgaatgaagcatgaatgaatcccgatcctgttatcacagcttctccccacgcatcccaggcagaatgttgtgcaaaaaccacaccaggattcgtacatgccagaggactgaacttctgcgtgttgcagataattcatcttcctgaatcactgtggatctaccatgtggttaaccacggaataaacatgggggagagcgtaagcgctgtcctagcagaaacttatgcttcttccgttacccttaaaaagtaaagggtacggatttcataattgtgtttctcttgtaaatgagactctcatggaaaaatcagccatgtaggcgatagatttgtatacctttagattaaaatgtcacttcgattatttcaagtgtaaaagtgtttcagcttttttgaggtataattgctacacaaagagctgcacacatttcatgtgtgcactttggtgagacttgacctgagcaaacacccatgaaaccatcaccaaatcaaagcaatcgaggaattccacacttgctgggggcttccttgcacctgtgcccgtggtgagaacacagcacgagatcttccctctcagccaatcgcaaacggcccacaagaaaatgacaccaggcctcctggtgaacacacaccctgtgatttaattgttgatctttttaacctggggctcacattcttcattcagaatatggcaaagactttagaagtcatccaaagtatcagtaatttgaagtcctttaatacaaaaagtatagaatatgaccttttgtcacatagcaatagggaaatgaaaaaagaaaatcgacttatgttctttaatggctaggaaaatattcttaaaaagagatctcaagcacaggtgaatctaacaaatgacaaatttatttctttacatagataaatataaggttagatccacgtaaataaatgaagccattaagggtagagtcccacagaccacagcgtccagctctgctatcgatatcagggagtaatttccaggcacacagaactgacccagcatccagctctgctcatgatttcaggggtaattcccaggcacgggtcgagctggagaagctgggggcccccatagccccactgtccttcctgcctcatggggtctctgaggggtgcctggaacatttcctcttgggctttgaagatcatttcacttaaacacattttccaggtgccatggacctgagcccagaaacttcacggtaccaggaccacccgagacagtggctccccaggagtgagcaccaggcactgtcaggggttctctccccagcacatttacaaggacatgatgggttcttcttcctgcagagcaatcccagtgggaagaaggaggggacgggaggcctggcaaactctcctccccagctccgttccaagctctgtggggctccggcaggccccatgtcatgtgcagatgagggattagggttcctcccggcctcgctgctctcaggccctcawgggctcctctcaccacccccgtgcagccagcggaccctgcccccacccagctgctccccccagctgctcccactcagctgctcccactcagctgctcccactcagctgctcccactcagctgctcccacccagctgctcccacccagctgctccccccagctgctcacccccaactgctcccccccagctgctcccccccagctgctcccccagctgctcccccctagctgctcccccccagctgctcccccgcagctgctccccccagctgctcccccagctgctcccactcagctgttctcacccagctgctctcacccagctgttccccccagctgctccccctcagctactcccacccagctgctccccactagctgctccccccagctactcccacccagctgctccccactagctgctcctccccagctgctcccccccagctgctccccccagctgctcccccccagctgttctcacccagctgctcccccccagctgctcccccccagctgctcccccccagctgctctcacccagctgctcccccccaactgctccccccagctgttctcacccagttgctccccacaagctgttccccccagctgctccccccagctgttccccctccgctgctcccccccagctgttcccccccagctgttctcaggtttctcatccttcctggatgacgccctacctggggcacccgttcctgtggcatccccagtcctgcactgcagcactcaaaccccgtcacctccctggcgagaccatgctggaaccgtgatcagcccatcggtttcatccattatcctcctagcccaatttctgtgctgatctctcgttcccaaaacatcttggaattataagaaattaacttttttcaagtctctgtgcttctgaagctgtacttttaagaaataattcttacgttcttttgaaggttttttttttttctttaagacagagtctcactttgtcgcccaggctggagtccagtggtgcaatctcagctcactgcaagctccacctcccgggttcacgccattctcctgcctcagccccccgagtagctgggactacaggcacacgccgccatgcctggctaattttttgtatttttagtagagatggggtttcaccatattagccaggatggtctcgatctcctsacctggtgatccgcccgccttggcctcccaaagtgctgggattacaggcgccagccaccgcgcccrgctggtatttttttttttatttttttatcaaatacagttgaggctctcttggagatcacatattaaagagaactgagaaaaatcagacctcagaagcagkacagtgccctgtraagtacatgtccagtcccatcactgtccttctctcacatgggcccagggatgtgggtgatggtatttattgcccctggtgatggagcagatttgatctgcctatgtgggaaggggttaactcagcgggtgtggattgctcaaaccctgcacgttcccaggaggggcccttggctggctccyrggagctgagctcctgcagtgttctgactgatgagagagacttgagccatgttgcactactttgcctgggtagttgaccaacaaggtgatggatggcaaacacctgctttcgctgtgggtggctggaacttccctgactgacccccaggttcaggagagcctccctggtccgcaccacggcactagctgtcccagcttcttgctggaggaatccggcgcaccctgtgtgactccgctgggagggactctggaagcgcctggcttccctggcagccctttcccttggctggtttactctgtaccctttcaagttggagggtggtctcagggacccccatgcagtctttcgtgctttcaccagaaactcaccttggcagggcttcaggggaaggcttgggatttggtgacaagtgactccatggccttgggcaaagcacagcatctacttaggttttcaggcggttgcccaggtatgtctagcacctaatgtaaccgaggcgtgaaatgcctgtgcgccacggtgcttcagctcgttacgggccgttaggccttgtggtggttctctcttggtttctgtggagaagccagaccccgctgtggttggcaaggaaggcgagtggagacatcaggagtgtccatccctcagcggccctttctagtggggtggctgcctctctcatccttgattaatccygggacaacctctgctctcctgggcaatccttagaatactccagaagaccccagtatggccgtccggttcctcctgggccccagctctcaggaatgcaccatcacggcacactccatgcgtgcccgtccagatggcacctgagcctccctgtgcctgcgctgcggcgttaacatctcgcttgtgttttaacctgtgttgctttggtttaaaacttgtttgaccgtgttatttgctgagatggcccagagaagcttctgcttatgatcaggacacgtcacagtgcagccttcacttgaggacttagrtctcatccagctccacacagtcaatccagggccacggaygcagaagacagaggagaagaagctcatggcatgaagacagaggattgattgcccaggaggcttccaggggctttggctcctggggcttctgtcagcgctgggtcagagcaggtcacccttgtgtgcagacactaggttgccgcacacagcggtgaagaacgggggagaccagatggaattgggtgaggcagggatgctccttggtgtttagagttttcctctttctttgccttgtgggttttctgtagcctatctttgctttttgtaacactagttttcagtaattccgacctttctgaatacctctatatacatatacctgtctactctcctttcagatacttgtaaagcctacagaaaggtaatcctgcagattatcactctattcagcttaacagatgctcgtcgagtgctgctgtgtgtgtatgcctcaggttcaggtgcacctgcctttgtggggagagcacagcttccctgcataactgctggagggtgggtcgtcgagtgctgctgtgtgtgtgggcctcaggttcaggtgcacctgcctttgtggggagagcacagcttccctgcataactgctggagggtgggtcgtggagtgctgctctgtgtgtatgcctcgggttcaggtgcacctgcctttgtgggaagagcacagcttctctgcataactgctggagggtgggtcgtccagtgctgctgtgtgtgtatgcctcaggttcaggtgcacctgcctttgtgggaagagcacagcttccctgcataactgctggagggcgggtcatcgagtgctgctgtgtgtgtatgcctcgggttcaggtgcacctgcctttgtgggaagagcacagcttccctgcataactgctggagggcggatcattgagtgctgctctgtgtgtgtgtgtgtgtgtgtgtgtgtgtgtgtgtgygccttgggttcaggtgcacctgcctttgtgggaatagcacagcttccctgcataactgctggagggcgggtcgtggagtgctgctgtgtgtgtgtgtgtgtgtgtatgcctcgggttcaggtgcacctgcctttgtggtaagagcacagcttccctgcataactgctggagggcgggtcatcgagtgctgctgtgtgtgtgggcctcaggttcaggtgcacctgcctttgtgggaagggcacagcttccctgcataactgctggagggtgggtcgtggagtgctgctctgtgtgtatgcctcrggttcaggtgcacctgcctttgtggggagagcacagcttccctgcataactgctggagggcgggtcatggagtgctgctgctgtgtgtgtgtgtgtgtgtgtgtatgcctcgggttcaggtgcacctgccttagtggggagagcacagcttccctgcataactgctggagggcgggtcatcgagtgctgctctgtgtgtatgccatgggttcaggtgcacctgcctttgtgggaagagcacrgcttccccgcataactgctggagggtgggtcatcgagtgctgctgtgtgtgtgggccacgggttcaggtgcacctgcctttgtggggagagcacagcttccctgcataactgctggagggtgggtcatcgagtgctgtgtgtgtgggccacaggttcaggtgcacctgcctttgtggggagagcacagcttccctgcataactgctggagggcggatcattgagtgctgctctgtgtgtatgcctcaggttcaggtgcacctgcctttgtgggaagagcacagcttccctgcataactgctggagggcgggatcttcccaaggggaagttgggaggtgctcavgcggagcaaatggatttaacttctgggctgggagaatgtggtacccccgtggaagtctccctgaggaaggaaaggaaggagctggagggagggtgtgtgtgtcttaggaggggacgcacttcaggtgagagcgggcatggcactaggaggagccccatgagcccagagtggtggcacgtagaggcctaagggaccatgccagcagaccccaccgcccgtgctccaccrggagcctgacattgttctctgagatcagggggctgtctctgtgtactgcccaggactgtggcatttttgtgcataaaaaaaaaaaaaaactgtgtgtctaacacagacggggtatgaggagagccactggtctctcctgaccttaaaaatatttttttagttcatttttagtgagtatggaaattactgaaggtacaaatcactctgaagataggttcttgtgtgcgaaggtcatcagtgaatcttcattctcagagttgataaatggttgtgagcgctcaagggtatcagattcaacgatgagtctgaggatagtasagctttcctattcagtttcaaggaaaatcatataaagcccagaccgtaatttgtcaggaatgtttgaagtgtggtgtgatggatgtcttcaccgtgctttaggatgattactgagggagaacggaaggaaggggtctggtacttgcacctttcagtagaattagtgtgaatgccacagcgaccaagctatgttcaggtgtctgcaggcagtggtggccttgatgatggattttctgaaatgggaattcgtgaagtcctctaacaaaactaagtgcgaacttctcaacttagctggtgactgcatccttgaaaaattctgtgtgtaaaatgatacagaaccatttcttggttatctgttaaataagagtgcatgtccagccgcgatgactgtggacggccttggaggtctgggaggccacgaaggactcccacacacagcagggtgtgaacccaccaggcagtgctttggccccctcccaggagtcatggcagccgacacgtcacctggagtgtctagaaaaccactaccctagagcccccactgcttttcctggtgcctccaggtatagatcacaaactcagtgtcccagaaagattttccttttactttaactcctgttgttgtttgttttcaggcacgtggactccctttaatccagtgactgtcaggtcgatcatatgtaagtatcggcagacggaccaacctgggctgctttgtatccgacccgcttgggtacccgcttgtgtttcctttgtctgtgggtccgtatcactttgctcccttctggaattccacttagatgagcgtcggccctttcatccctctccctccgtctctgtaccttttcacatctctccgtgtatgtttgctctattcttgattctgtttatttttaatgtacggtgtaacctgtcctttcagtttctaattctaaagatgacatatatttaaaatttctaaattattagttactttcacatcttatctgggtgtttttgatagacattgcttatttatttttgtgattccattctttattcaaatatttcatatgatagtcttcagttttaagaacatgcttttttgaaaagcgctagatatttgtgacatggagctccttgactgtgtttgaagtccttgggagggtggtctacagccagatatttttcctgctcaagcccacacagagtgaccaacttccttgatgcttctgtaatttttgtttgttttgtgggttcatgtgtagccttaatgtgagggtctgcatcatttctttgggtccagggtctccccagctgtataggcagctgggtttttgtttgtttcttttaagagacagggtgtccctgtgctgcccaggcctggtctggaattcctgggctcacgcaatcctcctgcctcagcctcccaaaaagtggggattacaggtgtgcacccccatgcccagacggtagccggggtgtgagctgaggctccaggcgcaggcaggtgttcaggagagtcgtgctgtgtctccatcccccgtagccaggtgggagctgcagctccaggggcaggcaggcctgggaggcaggtgttcaggagagtcatgtttccatccctacccgacttgatttctggaaggttccctttgctgggaggtgcagcccccttcagacctctttaatatggaatcccaggttcagttctgcctcacagggaccatggcattgtgtctcgaggtttcccagagcggcctggggctcattccctcgcctcccatccatgcacgtgttttagtcttgtgaggattccctgagttccttgcggagcctgtgtgtggtgaggtgtctgagtcctagtgtgggtgtagctgggggcttttccagatgactgtgccctgctggtcgtgcatatgttgctacgtcacactgatggagggagagaaaacttggaagtgtagtagtggcagggctcagcctttagtgctagaaaaggtgttgatacatggggagctacctccccaccggagaggaatggcctgggagccactcctctgcggagcccttaccctggggtgcagctcacccagcatccttcccygctggtgtgtggtgcgcagtgggtcctgcacgcaacagcatcgtccacacacactgcacacatcrtggaatggtcgtatgaaaaacagcccctggtccacacaccacacacgtcgtggaacggtgcacgtcgtggaacggttgtgtgaaaaacagccactggttgcacacagggttgtggactgttgggaagaaacatcgatgctgtttctcacatgatttttcatcctgtggattttcatttaattgtaacatatttctgatcaaaccaggagtagtcttattgcagtcctgtattaacctctgttcttgaaaagagaccacgtgatttatcattttctctgcagcagtaattcacactgaatttttctatgttttttagccatattgcaactacatataaaggtagttatagattcttttgtatttggacctggagttagactgaaagcaaataggacataggcgagggtctgtttctaattaaagcaggttttcctgacagggctgttccaagactccaccagtgctgtgggccctggagagtcagagggtcagctctgggaattagattcgcgttctaggccgagacccaggagccaggggagctggggccacttaccttccccgtgcctcggaagctgagtgtgaagctctgctcttctttctgtcgtggctgcggctggatttcctcacacatcccattgcacggcctgcctcacagctgcaagtgcaccttctcctgggacttagggggtcagggctgggggacaatcccccacacccccacccagggcgaaggtgacaagactttaagggatttcaccccattcacagacaggcatgcattgcccagtccctggttagtggtcagcagtggggccccgccaggctctgagggctgaggtctggtgggaagcctcaagtgagtttgctgcaactgaycttttgctgcttgaccgttcctctctgtctcagccatgtttgaccgtgagaacaaggccggcgtgaacttcagcgagttcacgggtgtgtggaagtacatcacggactggcagaacgtcttccgcacgtacgaccgggacaactccgggatgatcgataagaacgagctgaagcaggccctctcaggtttcggtaactcactcactctggcttgtgtagcgtgtttcattttggaaccttggagccgttgaagttctttaaaccttgttggacttaactgattgtctaaccaggctacgtaaagtttttgttgacgtcatgcaggttcatatttgatattgctcatgtcggaaggcgatcctcgacatggatacgtttattcaggtttttatccaaaatgagataagggctatgcaagccgttcatcttttctgaagtggaatgatgtcgtgagcaaaactgagaatgtggcttttgaaatcatttaaaagtggatccatgaaaataccgtggggcagggcagcttatatttcatgatagatcaaagcacgttgaaaaggcaacagtcacctaagaaacagctgtcagtcaccaggtccaaaccgtgcgcctcagaaggggcgttaggcagaacgcgtgcccattctcaggtgtgctcggcgtgtgtgtgcttggcgtgtgtgtgctcggcgtgtgtgtgcacacgtgtgccgtgcgcctcagaaggggcgttaggcagaacgcgtgcccattctcaggtgcgctcagcgtgtgtgtgcttgacgcgtgtgcacacacacatgtgacggtgtgccgtgggtctaggagtgttcacagtgcctgtccagagtgcgtccatagggcytgtccacggggcttcccgtgctgctctcagggctgagaggaagcaggggttttatttacagaggaacaacgggcatgtttggggccagcctgaggctgttggtggctgcaccgagattctaatccatgcggatctcatctggcccctgttgtgaagccgcttccgtgatttgcttaaaaggctccttagaaacagtgaggaaaattcgattctacttgagtacctccgagatccctggagtctcacttatctaagcacgtcgcctctcctcgtgtttcctcccagcatgcactttgtggctgcctttctttctcttttctttctcaccttacgagcttgtccacagggccgggggtggacactgggtctcctcaagaagcagttctgagctgaccagctgcgagccaggatttgggctggatggctctgaattggtacttggaatgcagctgaccttgctgtgcccttgggtgggggaactggagggaacgctggccggctcctcttccctggggcaggtacggaagggctgggagggaaggatgccaccctccacagagagtggtcctgggggccagggaggccagtgctgccgattgcggccagggccacgtggacttcaggacyggcctgaagttatttttagataagcgacctctggcgccacggacatcttttcctaaccttgtcaggccctggagctccctttgtccatgccagtgaccatcggtcctcagaatgtgcagtggaagttgctgtggacagtgctccctggtctctgaggccctcttcgtcctggtctggccaaggacttcccagaaaactgtgcttagctgtggcgggaggcacggccggtcacgcagccttcctcccgccctggagtgggcaggcctgcttgtgttgtgcagcggcagaacccttcctgacttccaggtttttcctggggtgcggcatcccatcgcagcattttctctggttaccctcacgagtttcctcctgcgtttggttcttgatctccagggccatctcccacgtcttccttggaaaggggcattgtcatcctttttgtattttgatgattttgaaagatttcccatagtaactgttaggaagttggcctcagaagcaaaaattcttcttttgtcttggcccctgtgaacaagtgttctgctctcagatgaagcagggaggctgcactggagcttggtggccagcaggagggaatcaccagggtggtgaagcctgcgagatttctccccgggtgtctctgatggggccacatggtggatttcataatccaccgattcgtttttttaagcctttattgttaacatcaactgtgtgccatgctcagagacctgaagtgaaaaggtgaggaaggcgtgctcacattccagcactcaccacccggcaccgggmcagctgactcagcaygtgccgtttaggttgctgtamacagccggtgagattctcccctctggtgggcagtgcgtgtctgacaaaggcagtcgggcggagaacagttcctccgctgtggtcctttgccactgtaccaggcccccaagagctggggggagccccagggagcctcagcctgttgagtgggggcagctggtttgtcctccgaggtggaagaggtgatttctgaggaggtcatgctccgcttggctcgttcacagcatttcagagagtccgaaagaggagaaagaccttggcaaggggtgtgtcaggggtgggcccagggacgctggtggcctcatgtggactgactttcatgaacagaaactcagaaacagttgcttctggattttggcttctcagataaacattctttttgtagttcrtttgttcatccctcattttgctgtctgactttgcctttcttttcccttcactattactgatgaccaaggaaactggaagttaattccagaggcagtggggttgctcctgttgtctgtgcagactggagttcctctgcctctgtcagcatctcctctgtccttccccagccttggcaggagaccagtaatgacctctgtccccgtgcaccccagtgatggccgccgtccccgtgcacmccagtgatggccgccgtccccgtgcacmccagtgakggccgccgtccccgtgcacmccagtgakggccgccgtccccgtgcacmccagtgagggccgccgtccccgtgcaccccagtgakggccgccgtccccgtgcacmccagtgatggccgccgtccccgtgcaccccagtgatggccgccgtccccgtgcaccccagtgatggccgccgtccccgtgcaccccagtgatggccgccgtccccgtgcaccccagtgatggccgccgtccccgtgcacmccagtgatggccgccgtccccgtgcaccccagtgatggccgccgtccccgtgcacmccagtgatggccgccgtccccgtgcacmccagtgatggccgccgtgcccgtgcaccccagtgatggccgccgtccccgtgcacaccagtgatggcctctgtcccccatgcactcccagacaggcaatgtccctgtgggcctgtcccaggctctgttctcagcaggctgggctcagccctggtgcagggagtgaggaggtgggagtagtagggaccagaaaaagtggcagctgttgacaamtctgccatctctttctgaatgtaatgggaggtcctgtcttttcagcttgcaaggaaggagggtccgaggcaactccgctgttgcacatttagggacccctgaacttaaatgacagaatgccctgaccactctggaaggcactgtgttcatgtttgtgtgcttgactcttgatccgtaaaatggctgtttgtgcaggtcattaactgtgagattcagagagtaggtgcacacgtccctgcagagattccagcaggactgaaaaccagtagaaatatatcagcacctggatcttgcctcctgagtcagtaaggatatgccacagtcacgaaggcagtgggatttcgagggagggaagggaaggcggcaggcggggcatgccctccggggtgcccgaacacacctgctgcatccacatgtcttcagagccctctccctgtgggaggcctttttcaggacagccttggtgaactggaaacggaatcccagcccttggtggccctgcagtgacttggacctttccgaggtcaccctgccactgcgtgcccttcagtccctcctggcaggtgggggcacatcccccagccactcccatttcctgacattgtcactttgtataactggaagccktctgtgaaattttagttttcaaagcattatctggtgatgggcaacccagggcagcgaatcattcagaattttcttatctaggctaataaacataataaaatcaataaggactttgaaagtaactccactgggttcaggaaactgagtgtggccgccctgtggggtggtgtttggtgagtgcttcccggaggtgagtagttaattcacaggagtgactaatggcagcgtcccactcactcctccttccggggtcatggtctcaaggggtcactccatgcactggggatgtcagctcattacagaatgatatattcgggaagtgtctcagttytgagtgcctttgagggaatttgcacttccgttcccacacagccttgcattgygtgtgttagaggctgtgggccttgggcaggaggggtgagtgttggcacatacctcccgtctctcccagccttctctgactctgactttccctctygaaggctaccggctctctgaccagttccacgacatcctcattcgaaagtttgacaggcagggacgggggcagatygccttcgacgacttcatccagggctgcatcgtcctgcaggtgacggaatggcttcacgtgggtttgtggtggtggtgggagggrcttgcttgccagcgtgatgcacctgaccttcaatctaaggagctgggcatgtgtagaattagtttttggagcttataaaagtgagtctcatctttggagaagtagccggttagtgaagtgtggacaaacatgttttcctccccttggaaatggcacagagcagcccatctgcaagacgtggtttttcagtatccggtgggttatttacatgtatgttctggtgttgtggttttttttgttttttgttttgttttgttttgttttgagaccgagtctcgctctgtcacccagacgggagtgcagtggcacgatcccggctcactcccacctctgcgtcccgggtttaagcaattctcctgcctcagcctccccagtagctgggattacaggtgacacccagctaatttttgtatttttagtagagacgggattttgccatgttggccaggctgatctcaaactcctgacctcaagtaatccgcccaccttagcctcccaaagtgctaggattacagacatgagccaccatgcctggccaactatggtgtatttttacaaaaacttttattctgagaaaatgggcacgttttctgttgtggtcatcactgtgtcctgccgtctgtgtgtgaggtcagctgtggagcctgtggtcgctcaggccgccctcagtggggtctccgagctcttcccgtgcactccagtgtctgcaggagctggtaatgcaccctgacctgcaaggcaagctccttggtggtgtctctcctgctgggctctctttgagacccacgggagatggagagcagggctcaggggacccgcctgggagctccacacagacctctgctgctgtttgcaggtggtgatccaggtctctacccaggttcctcaaggtcctgtcttgttggccttggaattcagtgagagataggaacagcatggggtttttagaaataatgtggaaatttggaaaacgttcccaaattgtttattctgtataataattaagatgctagatctgtaaaagtgagtttcctctgatttggcatggatgcatcagtccctgttcttcagggatttgttggagaaccaggtctgtgaacatggaagcytcaaaactctacggttggggaccctttcctgcccctgcctctcggggttcctgccaggttggatgacatttttacaatgttctctgaacactttcaaaaaagtgtaggctgggcctggtgtcgcatgcctgtagtcccagctactcaggaggctgaggcaggagaatcacttgaacccgggaggtggaggtttcagtgagccgagatcacaccactgcactccagcctgggtgacagagccagaccctgtcttaaaaaagaaagaaaagaaaaagggaaaagatgcmgtgtaaaatctcgttctgtgtctgaattgccgtagggctcagatcttcatttgaggttctgtgtctgaattgccgtagggctcagatcttcatttgaggttatgttctataagttaacgttgatcttgtgtgagctttcggtagctggagtaacacaggcggcctcacagcgacctctccagcgccttccaaggcacatctgcagccagcgtagctcctcctgggagatgcctcctcaaggccctgctccagaccacgtggggagggcctgacagccaattcccaggctgtccccacccttggagagtgaccctaaacgctagacagatggggaatgggaaagaaaagaaagctgcagacctcaagttaaaattccctcaaaaacgtttttatttatctgctttttctgaaaggataaaggctttttgaaaattattttctaacaaataacatgaacacttctagaaaccctagaaaaacacaaagtattcaaaatagaaagaaaaattacccattactctttaagccagcattatccattgcggtgcttttggagttgggtgaggccgtagcctctgccaagtcaaggagcccggtggtggctgtggcattcctgcagggttgtttttttttctttgagatggagtctcactcttgtcaccccagctggaatgtggtggtgtaaacagctcactgcagccttgaccctgaggctcaagcgatccttctgccttggcctcctgagtagctgggatcccaggcgagagtcaccacaccctgtccatgttcctgcaggtcttgatrtgcgaggacgctgtgtcttccctgccacattttcttcttctttcttgagacagacccttgctccatcacccaggccagagtgtggtggtgcgaacacggctcactgcagcctcgaccctcaggctcaagcgatcctcacgcctcggacccccaaagtgctgggatcacaggcgagagtcaccatgctggcctgaatcttcagggtattttacggttgaagtgtcacttacttaaccatccctgtttcargagtgtaggtggtcaccctgtctctgccgctgacctggcctggaccctcggctgtgagagggaggggtgggctgggctggaggaacctgaagccctcgtgatgtcacaagcccatctggctgggcatcccctgmgctgcacatgccccaggtggcccccacagcagaggcgagccactggagggtggagggcttccacgggacggtcttcagggggagaaggaagggcccaggcccccaggagactcaggagaccagagcctggggtcaggggctcagccaggggctcagccagggctggatgtccggagccagccccgcagccctgtgttcttygttcttcgcactcccaccgtccgtgtgaacagctccagccccacctgcgcctccctgtgctgggctccatcagggagcccagaagacgtgtgtgcttctgaaattgggtccctacatgcctttgtcccagtgcaccttgctccttccatttactatcgagatttaaatgccygttttctccccagaggttgacggatatattcagacgttacgacacggatcaggacggctggattcaggtgtcgtacgaacagtacctgtccatggtcttcagtatcgtatgaccctggcctctcgtgaagagcagcacaacatggaaagagccaaaatgtcacagttcctatctgtgagggaatggagcacaggtgcagttagatgctgttcttcctttagattttgtcacgtggggacccagctgtacatatgtggataagctgattaatggttttgcaactgtaatagtagctgtatcgttctaatgcagacattggatttggtgactgtctcattgtgccatgaggtaaatgtaatgtttcaggcattctgcttgcaaaaaaatctatcatgtgcttttctagatgtctctggytctatagtgcaaatgcttttattagccaataggaattttaaaataacatggaacttacacaaaaggcttttcatgtgccttacttttttaaaaaggagtttattgtattcattggaatatgtgacgtaagcaataaarggaatgttagacgtgtggtctgccttcagcttttcaaatcaaataggtccaagaaccaggccccgtgccctggtcctccagacagtcagtgtcagatgttctggcttgcctgggacctcccagggtaccgggcaccttctggaacattgtccagcccagcgtgcacagctctgcttgtgaaaatccagagggactgtctcaccctctgttcaggaggttaaatttcataagactgctccttttggatgaagaaatccaatttggtatagcaggttgtgcatttccatcattaatgatttagccatgctgtgccctgcagtctctgcacgtggcctgcagcgtttgtccacccagcgcatcctgctcacctcggtccactgccagcgctgcccggtccgcctccctgcctcactgtgcagcgccggccctcctgggttgacactcccgaggcccagcctcattctccagacgcttcccttccacagtgatgcgtctggttttggggctgcagcctctggtctcagaaagcctgctccttccacccagttgtgcacgacttttctctgttcgttttggtctcttgggatctgttcaaacctctgctcggtgtgttgaggggtgaggggcagggagcatggtttcctggaaaaagcccccagtctcttaagctgggcaggtgtgctgtggggggtggggactggggctgcttctgtgctccagatgagacctcccccactgcccaactgcacttggcctggggccctctggatacgaatccctctggagcaggcactccaggctccctggggatgggagggggagggatgtgggcttgggggtctggctgctccctcatgacctcagtcatggggatcccagggcagtctctgaggatccccagcaatccacgccgggtgcctccctagaccttgacacccccatgactctgcagcagatgaccccaagttctactccatgaggtcaacttccttgtccaggccgcaagctcccaattccatgaggccttcctcacccaggcctccacggccaggcgcccagcgacttctccctcgcctcatgggcacctggactcagtgtccagtagctgcacccaccccaccctgggagctgccctcactcctccttcagccttaggcctgtgaggtctctgtgcttggggtgagggcagctgctgcggccaccctgcagccctcccagccacgtctccaggcccttgcccgtgctgtcccctgtgcagtgggcaacccccaccccacacctgcagcttctctggcctctggattcctacctgggtcagggaagcctgctactctggaggagctgtcagccctggtgagacacctgcccccaggcacatgtctccatggatgatacgggccaacagttgataccaaggccgatgtgctcatcctgtggatcagctgccggggaaggaatgttgtgtgtggcggttagctccatactcctagaaagcaggcgaaggccaggtgagacggagactttcatagagaaaaggtcagattgtggatgattttccttccttccttttcacagcaatgagaggttcctctgatggagataaagtgtgtttctcaggtctctggtatgctcaggtgtggcaggttcacaggtgtgaggtacactcaggtgtgtggtgcaggtaccctcaggtactctgcacgtggctgccatgggggctcctgtttgcaggcagctcggggaggctgccttggagaggggcctccatgaagactcacaagaacaaaagccgctgaaaattccagagcagaagttcttcagcagagggtgaggagggcggtggggccgctgcaccacacgcttggaggaccagcaggggtagagcgctggacaaacgcatgtcaggccggcctgctggcaaaggaacccctggatgcagagagcctgttgggctggtgggctgtggctgttgggagggacatttccccggggagctcccagccatcagaagtcaagggagggaggcggtgaggagcctctcgaagcagaaggtgtggaggggggactcccctgctctcctggccggagtcactgatacaaaactgggggtccctggagggcagtgagctcacgagttgtggtggattccttgtggagggggtgccaacccgcagggaagcagggctgccgtgccccctgcccagccacactgccagcacagaccccatcctcaggcgcctgcagggaggccacccacgccttcctgggtgagggaagcccctgagctaaacctcactgcactctgaggccccaagggccaggcagctgcacacagcctgggccacgtgggggcagtgcggctgcaccacggagctctcgggagctgctgactgaccgggaggacctgcccgacacagccatgggatttatagccgcagagagaagactacagagagacgggccttcgccctttcagctctcccttgtcaggcaggctgtgccctgtgacccttcagagcctgggtttgggggtggagggggtggacagctgaccaggtgcctggcgcaggcccagtgtggtgaggctgggtcgcggaggccaggccaggccagcggccacgaccacccaccagggaccctcagcgtcacgaccccggtcccaagacccaagacagcaggacatgggggcacagccatctctgggggcctctccttccccccgctctgggtcctcagtcatcagtgcagacatggaggtgcaggtgcacgccgtacaccctcacctggggcccctggcccatgcctccccaccctccctaccctgatctccccccacaaccctacacctccccggacaaccctgcacctcccccaacagccaccctgcacctcccacccttaccctggacctttccccnnnnnnnnnnnnnnnnnnnnnnnnnnnnnnnnnnnnnnnnnnnnnnnnnnnnnnnnnnnnnnnnnnnnnnnnnnnnnnnnnnnnnnnnnnnnnnnnnnnnnnnnnnnnnnnnnnnnnnnnnnnnnnnnnnnnnnnnnnnnnnnnnnnnnnnnnnnnnnnnnnnnnnnnnnnnnnnnnnnnnnnnnnnnnnnnnnnnnnnnnnnnnnnnnnnnnnnnnnnnnnnnnnnnnnnnnnnnnnnnnnnnnnnnnnnnnnnnnnnnnnnnnnnnnnnnnnnnnnnnnnnnnnnnnnnnnnnnnnnnnnnnnnnnnnnnnnnnnnnnnnnnnnnnnnnnnnnnnnnnnnnnnnnnnnnnnnnnnnnnnnnnnnnnnnnnnnnnnnnnnnnnnnnnnnnnnnnnnnnnnnnnnnnnnnnnnnnnnnnnnnnnnnnnnnnnnnnnnnnnnnnnnnnnnnnnnnnnnnnnnnnnnnnnnnnnnnnnnnnnnnnnnnnnnnnnnnnnnnnnnnnnnnnnnnnnnnnnnnnnnnnnnnnnnnnnnnnnnnnnnnnnnnnnnnnnnnnnnnnnnnnnnnnnnnnnnnnnnnnnnnnnnnnnnnnnnnnnnnnnnnnnnnnnnnnnnnnnnnnnnnnnnnnnnnnnnnnnnnnnnnnnnnnnnnnnnnnnnnnnnnnnnnnnnnnnnnnnnnnnnnnnnnnnnnnnnnnnnnnnnnnnnnnnnnnnnnnnnnnnnnnnnnnnnnnnnnnnnnnnnnnnnnnnnnnnnnnnnnnnnnnnnnnnnnnnnnnnnnnnnnnnnnnnnnnnnnnnnnnnnnnnnnnnnnnnnnnnnnnnnnnnnnnnnnnnnnnnnnnnnnnnnnnnnnnnnnnnnnnnnnnnnnnnnnnnnnnnnnnnnnnnnnnnnnnnnnnnnnnnnnnnnnnnnnnnnnnnnnnnnnnnnnnnnnnnnnnnnnnnnnnnnnnnnnnnnnnnnnnnnnnnnnnnnnnnnnnnnnnnnnnnnnnnnnnnnnnnnnnnnnnnnnnnnnnnnnnnnnnnnnnnnnnnnnnnnnnnnnnnnnnnnnnnnnnnnnnnnnnnnnnnnnnnnnnnnnnnnnnnnnnnnnnnnnnnnnnnnnnnnnnnnnnnnnnnnnnnnnnnnnnnnnnnnnnnnnnnnnnnnnnnnnnnnnnnnnnnnnnnnnnnnnnnnnnnnnnnnnnnnnnnnnnnnnnnnnnnnnnnnnnnnnnnnnnnnnnnnnnnnnnnnnnnnnnnnnnnnnnnnnnnnnnnnnnnnnnnnnnnnnnnnnnnnnnnnnnnnnnnnnnnnnnnnnnnnnnnnnnnnnnnnnnnnnnnnnnnnnnnnnnnnnnnnnnnnnnnnnnnnnnnnnnnnnnnnnnnnnnnnnnnnnnnnnnnnnnnnnnnnnnnnnnnnnnnnnnnnnnnnnnnnnnnnnnnnnnnnnnnnnnnnnnnnnnnnnnnnnnnnnnnnnnnnnnnnnnnnnnnnnnnnnnnnnnnnnnnnnnnnnnnnnnnnnnnnnnnnnnnnnnnnnnnnnnnnnnnnnnnnnnnnnnnnnnnnnnnnnnnnnnnnnnnnnnnnnnnnnnnnnnnnnnnnnnnnnnnnnnnnnnnnnnnnnnnnnnnnnnnnnnnnnnnnnnnnnnnnnnnnnnnnnnnnnnnnnnnnnnnnnnnnnnnnnnnnnnnnnnnnnnnnnnnnnnnnnnnnnnnnnnnnnnnnnnnnnnnnnnnncaatccttcacctcccccctcaccctccacctccccccctcaccctgcggcaagcagagagctgactccagcacagtgaacttggaatgatggaatgcaccctggaagcagctctgacgggcgccaccgtgactgtgcccagcagggagctcccttgtggtttttaacaaaagacaaaattccccaggtccttctctgtgctacaggagaaactggtgtgggagagggaacccaggcgtgaccagggagaaactggtgtgggagagagagggaacccaggcgtgaccagggctgcccaagcggctccctgtgaggcatcaacgctggagacacagcagtcatggggaacccggggaacccgggaaacccagccgccatcagagagccagagagccgcaggcgcctgtgcggggtcctggcctggccccgaggggtcagcacacccctgtctgcctctgaggtcagggccctgggggctcctgacctggcctgcctgtgggaggcaaaggtgtggccaggagaggacaggagggggcagtcacagtcaccactcctggaggcccatgaagagcagctttgcccccacacttctgtgaagccaacttgggcctgtttgggaggggcctggcgctgcagccggccgtgggcacctgccatgtggcggtccactggaggccaagtccagctcatatggctctggggacccaccgcaccagactccagtgtgggggtacccggagctgggggtgggtcctcggaggcttccagtcctgccccagctgccatccctgccaggtgttagcgcctctggttcagagtcccgagaggaccagtggcccaggagaaaggggtgtgtctccagctgctgggagtgtgggtgggagccagagggttcaatgacactggggacagcaagtccggactggagggaggagacctcctgaacagggtccccagcacagaggcagaaaggagactctgtgactgggggtgtcagctgcatctggaccttcgtggtggggagggaggcacgcccaatagcccgtctgaacgggaggtggctcagggatcccccattgtgctggtggggtgcccagagactccaggactccacgtggggctctgcctgctaaaccctgagactttaggggcagtggctcccacggcagggtcatcctttttctgcacagtcccactggctgccccaggtcctgcagagacctgagactttggggacaagcacaggggacaggtgggcgtggatggcctgtgccggtcaagggcagtgggaaggaaggaggagcagtttccttctgtacccaggaaatagagtaacaaagtgtctcattccagttggttctggtgggacagggtaggtggaagggaacccgtgcttgcc

SEQ ID NO: 96943 - DNA, 13606 bp, Homo sapiens
tctttctggaccaccaaaaagtgatactctcaacctttagcaccctccaaaaacctgagaaatggttgcaattgctgcattgttgaaatgcgaaatcacaaaggtagttcttttgggctgtaatgaacttccccaccccctccaaattcctacttatcttgggaattgccttgggaagatttgccacaggactgccagaaaaaatataagatgcccagtaaagtttgaattttagataaacaaagaatgatattttagttaaagaagatcctgtgcaatattttggacacagttacactaaaaaattatttatagtttatctgaaattcaaatttcattgggaaggcccacttgccattcaatatttacttgtatatcattcctttgccctttctcctggcaggaaaacccatgaggtctgtctgtctgtccctgtcgatcttattcaccactggcccctggcacctagcccagtgtcttggacagagtgcatacttaccatagtttattgagtgagtgaatgactaaatgtcagcccttcaccagcacttcctctggctaataaattccatttctgaaggctgtacctgagatgaccgtcatttgtagaccctctcacatttgttatctgcccctgctttccttcatttcccatgagacctgagacctagcaggctagaacaggaaaacaaagaaaaaaaaaaccttcacagaggaccttattcaatactctgacttcagcaaaggggaaattgaggttcagagtgttttcaactactgacaatgtactgagtggcccttgaagccactcataggacaagtttctccttatctgggtccccagcgtggtctgcttcacatgctttgagtcgtgggctcatgttttgcatgacattccactataccatgagaacccactgagaacaacctcatcttacaggtctttgcatatacaatgcctggcatagtgagtgctcaatgaatatgaatgaatcaatctgtcaatcagtgaatcaatgaataagtcaatgaatgaataagtggagcaactgtgccacttaccagcaagggagttgtctataaaatgggaaaggtggcagttctatttggcagggctgatgtgagagttaatgagataatatatgtcagttgtctggctctgagcctagtcattattactcagtaaatagtagatctcatcatgagatgcaacagagcttggcactgtgaatgtttgcaaaggggaaatgaggaatctgggaatgagaagtagtgttgcattgcactttaaaatccaaactcagccaggtgcaggctgacacctgtaaccccagcactttgggaggccgaggtgggaggatcacttgagcccaggtgttcaggactaccctgggcaacacagcaaaatcctagtgttacaaaaaatacaaaaattagtcgggcatggtggtacgcccctgttgtttcagattctctggaggctgaggtgggaggatggcttgagctcaggaggtcgaggctgcagtgagccatgatggctacactgcactccagcctggatggcagagcaagactctgtctcaaaaataaataagtgaatacataaaaatgaaatcaaaactctttcccatggcctccaaagccctgctggatctggcccctgcctgcctctttaacttccttgccctctgctttccctctccctctctatgctttagctacactgattttctttctgttcctcacgaggaccagcctcattcctacctgctggcctttgcatgctccgtgcttagaatgtgcttcatatacctggctcccttgatccttcagctcttagctcagcattacatcttcagagaaggctccctacccaccagcctgccatccctttcatcactctctacagcaccatccagtccatttccttcaaagcagtttcctcaagttggaggaagaatgcctagttgtttacttgcttttttgtctgtctcgccgtttgaatgtaaggttcaccttatattacaacagtaatgttcattgctgtagtttcagggtctggaagagtgcctagcatatggaagacactctgataatgctaactgaatggatgaatcactttggtctttccctagctcagcctctgattctaggatttaaaataaatataagttggtgcaaaagtaatcgtggttcttgccattacttttactagtttgagctaaatggcttctaagtctccttctgcctttgataatctgagattctgtgacatggttgtttagaacactttatatgctgaatatatagggatgataatgatcatgtaaatgccagtcaattggcagttgaagtactcatgaggggagttccaggactgagtacccagtgggaatgagctttctggtggatttggtagcatctgccttggatgcaggtgaggcccaaatatttgcttttcctgaaagaagtgaacattgggaaactgaaatgacttcatgaaatgaatctgagcatactccacctagacacgtgctcaggaactcatcagtagcttagaaaatgacacagataccacttcttgactaatgcctttttagagattttgcttaatcctcaaatgttaattcaagtacagcactacaagcttctcttaattcctttacccttcacctggttttaaacagcttcactgataataatgctgttgactatttatttaatcccattccaactagaagaaatctatagatgcagagcattatgctctgaattccttccttccttccttccttccttccttccttccttccttccttttttagagacagggtcttgctctgtcacccagggtaaagtgcaatggtacaatcatagctcactgcagcctccaactcctgggctcaagcaatcctcctgcctcagcttcctgagtagctggaactacaggcacatgtcaccacacctggctaattttttttgagttttagtagatacaagatattgctatgttgcccaggctggtcttggactactgaacgcaagcaatactcccaccttggccttccaaagtgctgggattatagacgtaaaccaccacgcctggcccagacttagttttagaaaagttctgtgaattggctctatgaagtacatttccactcagaacggcgtgagctgagcatgtttgggctggcccgcctcccaagcaatgctgacagtccaaaaacctcacagtgctaccaataaacagaaaggaggattcttgtaaatttaagagaacaattcaagctctgtcttttcatcctgaccgcatggtccaccacagcctataatggcttctctgggctgcattaggggaggtttatggaggtgtgtgctcctctatacactcagagcttcaagccaatcccttgtgacctacattactattattgatttttctttgagctggcctgaaccttggtcacccatatcccccgtgcttaacataaggcctgacacatagtggggtttctactaagattcgtagaatggggatatctactgaactggttgtgtggtgctagaactggattgtttaaaaagctgaaaataacaaattcttttgttcaatgacctagacccaagtctaaccttatccaggcttctctaagaggcagcagagctgaaggcaggctctggagttacacatacacacacacacacactcacacacacagtctacacaatctacacacatgacattaaccttcttgagttacagatcccccttctgtaagatgggctactgatggtacttatctcatagcttattgcgaagataaaagtaagataacgcaggtaaaatgccatgcacgctgcctgctagcaactgtcgttgtacttcctaaagtctttacccggcttcctcttagctgtaccctgggtttttattctgggcttaattgtcatcacctcaagaaagccttctctaaccctccttctccaggcaaagtcagtcccccactcccatccctggaacccacactgctttgcacacctctcctccacagccctcagtggatttcatctcagactttcttcttctactggattttggaagcttccatgacagatgtcatctctgatttccctgcccctgttgaagaggaatagatggaagcacctttattcccttgtcaacaggggctttgggccgttccactgttcttgctcttcatttgcctgtccgtgcttatctctgccttcctttaggatgagcatttctgtgactttgtggacatcctcacagagtacaagaccaagaacatcttggcttcccccataatgaatgggaaggatgtggtggccataatcatggctgtgaataaagtggatggatcccacttcaccaagagagatgaagaggtaagaatgctttagagactaaggatagccatgctagcacattctcccagcctatgaagtcccctgaactttgctgtttgacctggcctcagttttcccatctgtaagacagggaattcacctgatgttctctgagggaggcaggataaaataatagttaagacattgggctttggagtcaggaatagagggataattgttctggctccgccaatagctgtttgccttttgcaagttatttaacttctttgaactttggttttcttatttgtaaaatgttgataatttttcagtatcaacctcatagggaacttattaataaatagtagctatttttcatgaatacactcccatcaacatcaacattctacattcggtgagttttatgctcatgcaacatcttatgagtctgcattctaggatccatctgcccaaattgtctctgatgaagctttgaaaatattcagatatttgctgatggtaaaagtagccagaggatggatttcttcttctcacctgcctcccctcatgctgtttgatttttagattcttctcaagtacctcaattttgcaaatctaatcatgaaggtgtaccacctgagttacctgcacaactgtgaaactcgacgtggccaggtaaggggcttgggccaagggaatggacttgactcgtcctttccctgaagcattgatgtggtcaggactggcaggcagatgggaatgaaggtgcctaggaagccagtctctggccagcatcacgagtgttatgaggtagtggttgtctgtaaagctgtataccacagtggttatatgcacaagcttcaagacagatggctttgatctgaatccctgctcaaccactgcctagctctaagaccctaagtgagtcacttaatctctctatgcttcagtctccccatttgaaaaatagggatgattatggtgccaccctcaaaaggttgccatcaatagtaaacgagataatgcatatagggcaatagtgctcaattgaagtttcttattatttttattaaaaacctatgagataaatgaaagggaaagagctggacccaatgtaaagcagccagttacttcatctctctgagccccagtttgtttgtctacaaatggaagataattggactgggcatggtggctcacgcctgtagttccagcactttgggaggccaaggcaggaagattgcttgagcccagaagttcgagaccagcctgggaaacatagtaagaccccatctctatttttaaaataaaatttttaaaataaatggatgataatgggctgggtaaggtggctcatgcccataatcccagcactttgggaggctgaggtaggaggattgcttgaggccagaagtggaaactcatctctacaaaaaatttaaagattatctgtgtgcagtggcgtccacctgtagtcccagctgctggggaggctgagatgggagaattgcctgagcccgggagttggagactacagtgagctatgatcgtgctactgtactccagcctggatgacagagtaagactctgtccctaaaaaataaatacataaaaacaaacactttagcttttgcgcttctgccctggccctctgctggccactccgccggtgctgtgcctgggcgcctccgtgctctcggccaactgcctctgagagcgcccacttgagcgccctgggagccggagggcggcggtcctcaccgggaccctcctgtgggcggagggggacaaaagtgtctctcaatccagcacatgcacattgaagcaagttaaaggatttaatatgaagcacagaagccgacagtgccaaacagcaagcagtagttggtacacatttggtgagtggggcagcatttccttctcccactgctgctgagatggcagaaattagtcgaattcgtacgaaatggaatatactgaaggcattagtcagcgaatgagggtcccagaaaagttaaaagtagcaccgccaaacgccaacctggaacagggattccaaaaaggagttccaaatgctagcgtgataataatgcaagttccagagaggattgttgtagcaggaaataatgaggatgtttcattttcaagaccagcagatcttgaccttattcagtcaactccctttaaactcctcgcactaaaaacagcacctcgtgtacttaggctaagtgaaagaccactagattttctggatttagaaagacctcctacaamccctcaaaatgaagaaatccgtgcagttggcmgactaaaaagagagcggtctacgagtgaaactgctgttcgccaaaatggacagctggtcagaaatgattctctttatggcatttcaaatacagatacaacaattgaaggaacatcagatgacctgactgttgtagatgcagcttcactaagacgacagataatcaaactaaatagacgtctrcaacttccggacgaggagaacaaagaacgtgctaaaagagaaatggtcgtgtattcaattactgtagctttctggctgcttaatagctggctctggttttgccgctagaggtaacatcagctctcaaaaatattatctcaacagctggaaatataaaagatttgcaaacttctttgtttctgtctcttcattgtacgccattttatagtccacaacctgaaaatatatttcttccagaaactctggaggtaacacctgcttaaaattctccttttgcatgttttgtaaataggctccagttttgttttttaaaaggaattcatcttttgcctcatcggtccacacaactgattctgaatgggagagagtctgtagagaattgatttagaaaaatgtctgtgaaagaaaaacaattattttgtcgtgtttctcaaacactgtaagcagttttgttaatagacatttttscatcaacacttcaacattaacactttcaaagtcatggtctgttgccagatttgagaaactcgaaccacctaatatttcataaccttcttcattaggtacttgtacagattaatttctaacatttcagcagtttaatatgtgtgcaatamgtgcattctttcattttagttttgtacttggttttctataaagtacgtttttactcagttcatgtgtgaacaatttttaaaaactacagaataaggtacaaatgtagtgtatttaataaactgtcaaccaaagcaaaaaaaaaaattaaaaactttaaaaaaatctaaaagtaaaaataggggatagttaacctgtctatttctctggattattgtgaagggtaaatgaaataaactccagacaactttacagaattgttgttattctccagctaagtgagctactactttgcacctcaaaacctatgaatatgtttttgtgttttttcagatactgctgtggtctgggagcaaagtctttgaagaacttacggacatcgaacgacagttccacaaagccctgtacacagtccgtgctttcctcaactgtgacagatactctgtgggtctcttagacatgaccaagcagaaggtgagaaaacttcagcaacagacatttccaagaaaagattaaacagacactgactgacggctagagtcttggcacacattcaattgcacgggggaagaggctgggtgaattgggatggttgtagaaagtcttacataggtctctactgaggagtatcagcctttaaaggggaaaagtcaatctagggcacaggtgagtgaaaacaatctgtactttccttagtcatttggaaagaaaaaaagtgtacatgaaaagaaactgatgaggtgatgaaggccagtgataaagaaatttctatgtgggttgagagtccaggagaaagttgccaacttcagggattctcaaaaaatgtactgaaagttgtgtgtaaagctttgctgcaatttatctattccagagctcacccaggcaattaagtggaggcagatgccgacatcgggtccctcacatgttcaggggccagatttgtggcagatacagcagctaaggaggcagagttcgatgtcgctcccagcgatgttttttagatatgttttcccaaacaacttcctcatttctctttgtttatttgcttctgccttatgaggctaatcattttctgccttgaaacagagtttcagagttatctaagtttaatatctcctatcctgaaaacccaaggattccagccagtttcattttgtacgccttgtcatgctgagggtggtgcccagaccaatgcagactctccaaatatattggattgagtgaatacatggatcacagaatctggggttggaaaagcccttggatatagtccagaggctcccaaacttggcagttcatcagaatattctgaagagctgattaaaaaattactggactgcattttctgatagtctgccattttttacttaatgttttacaaacatctttccatgtcagcacataggaattctttttaatgagcctttatattgaaacataggcctggcacagtggctcacacctgtaatcccaggactttaggaggttgaggtgggaggatggcctgtggccaggagttcgagtccagcttgggcagcatggtgagacctgtctctacaaaaaataaaataaaaataaaaaaagaaggacaacgtagacacagaaaagggacattaattatagctgctgatataacagttcaatgagtgaacattcccatgaaaccaccaccaaaattaaggaacagaacatgacaaacagcacctcagcagcctccttcatacctttttcagtacctcccacagcctcctcctgaaaggttaccaccatctgacgtttaacaccatattagttttacctttttgaggttcatatatatgaaatcctacaatacacatgcttttgtgtttggcttcttttatttatttatttatttatttatttatttatttattttttgagacggagtctcgctctgtcacccaggctggagtgcagtggcgcaatctcggctcactgcaagttccacctcccgggttcacgccattctcctgcctcagtctcccgagtagctgggactacaggcgcccaccaccatgcctggctaatttttttgtatttttagtagagacggggtttcactgttttagccaggatggtctcaatctcccgacctcgtgatccgcctgcctcggcctcccaaagtgctgggattacaggcgtggtgtttgacttcttttgattcattcttattacttcatttagcatgagttcattcatttttattcctgtggaattttccatcatatgtacaatctacagtgtatttattcatttccactgttggtggacatttgagttttcagatctgatctattattaatactgttattatgaaacttctagtatattactagtacacagttgtgccctttctgttaggtatttacctagaagtagaatttcagagtattagctttagtagatattgcccatctgattttcaaaatgattgtaccattttataccctcaccagcaatgtatcaagggtttcttcatcaatacttggtattattattcttagtaactttagccattctggtgagcatgtggctttatctcttttgttatcaacataaattcccctaatgactgatgaggttgaatattttaaaatacgtttattggccatttggatgtattattttttgaagtgactgttcaagtttctcctccatttaaaaaaatcacattgtcttttttatctcactgatttgtaggagttctttgcaaattctgggcacaagtccactttcaaatacatgcattgcaaatacagtcacacaccatataacaacattttgatcaatgatggcccgcctataccatggtcccatagaattataatggagctgaaaaattctatcgtctagtgatgtcatagtgcaacgcattcttcacatttgtggtgatgctggtataagaaaaacctaccgcactgccagttgcataaaagtatagcacatacaggccgggcgcggtggctcacgcctgtaatcccaacactttgggaggccgaggcaggcggatcacgaggtcaggagttcgagaccagcctgaccaacatggtgaaaccccgtctctactaaaaataaaaaaattagctgggcatggtggtgggtgcctgtaatcccagctactcaggaggctgaggcaggagaattgcctgaacctgggaggtggaggttgcagtgagccgagattgtgccactcactgcactccagtttgggtgacagagtgagactccgtctcaaaaaaaaaaaaaaaaaaaaaaaaaaaaatatatatatatatatatatatatatatatagcacatacaattatgagctgtagtacataatgcttgataatagaaaactagaaaactatgttactggtttatgtatttactatactacaacttttttccattattttagagttgactccttctacttattaaaaaagaaaaaagttaactgtaaaacagcctcaggcaggtccttcaggagacattctggaagaaagcattgttatcataggagatgggagctccatgcgtgtttttgcccctgaagacgttccagggggacaaagtgtggaggtggaagatggggatattgatgatcctgaccctgtgtaggtctaggctaatgtgtgtgtttgtgtcttagtttttaacaaaaaagtttagaaagtaaaagaaaaaaaaatttaagagaaaaaaagcttgtaggataaagatataaagcaaatatttttgttctgattcaagcaccaaagacataaaaaaagaaaaaagaataacagaatttgagatttttttaaaaagaaaatatttttgtacagctgtataatgtgtttgtgtattaagctaagtgttattacaagagagtcaaagtttttaaaaataaaaaattttataaagaaaaatttaaaaatttatagagtaaaaaagttacaagccaggcttggtggctcatacctgcaatcccagctactcaagaggctgcggtagaagaatcgcttgagaccaggagtccgaatctgcagtgagctatgatgagcaagatctcatctctaacataattaattaattaattaaaaattacagtaagctaaggttaatttactattgaagaaagaaattttaaaaatacatttggtgtagcctaagtgtccagtgtttataaagtctatagtagcgtacagtaatgtcctaggccttcacattcactcaccactcactcactgactcacgcagagcaactctcagtcccgcaggctccattcatgctaagtgccctttataggtgtatgattcttaaacttttataccttatttttactgtgttttttatgtttagctatgtttaggtgtgtagtaggctatacaatctggagtaatgcaagtgcactctgcaatgttcacacaatgacaaaattgcccaaagaaacacacatttcctggagcatatccccgccattaagtgacgcatgactgtattctcccacttggtgttttcattctctctctctctctttttttttttttttttttggagacggagtttcgctcttgttgcccaggctggagtgcaatggcacgatctcagctcattgcaacctccacctcccgggttcaaacaattctccagcctcagcctcccaagtagctgggattacaggcccccaccaccacacccagctaatttttgtgtttttagtagagacagggttttactatgttggccaggctggccttgaactcctgacctcgtgatccacccacctcagtctcccaaagtgctgggattataggcgtgagccactgcacctggcccatgctttcattctcttaatggtgtgtttttatgaatataagttctgaatgataatgtagttcaatttatcaatcttttcctttatagtcattgattcttgtgctgtaatgaggaaatctttcctggatctaagattgtagagatatttacatatgtcaaattctaaaagctttattgttttaactttcacatatagctctacaatctacctggaacttttttatgtttagtgtgaagtaatgtgagtattcatttttctgtacaagcatccaattggcccagcactgtttattgaaaagaccattctttccctactcttctagtgaaaagatcatccttccctatcatacctttattatcaaccaagtgtccatatatgtatgggtctgtttctggattctctattttgttccattggtatatatatatgttttttttaattaatttttttttcaagacagatatctcactcttttgcccagcgtggagtgcagtggtgcgattttggctcactgcaacctccaactcccaggttcaagcaattctcctgccttggtctcccgagtagatgagattacagacacgtgccaccatgcccagctaatttgtgtatttttagtacagatggggtttcaccatattggccaggttggcctcgaactcctgatctcaagtaatctgcccaccttggcctctcaaagtgctaggattacaggtgtgagccaccatgcctagcctccattggtatatttacctattcttctgcaatactatcctgtcttaatttcagtatgtttataaaatatcatgatatctggtaatgaaaagacctctaagtttattattattatatgttagactttttcaccatggtttgtgtctcttatacttctttgtgtgtttttcatcatttcgttttttgtgctttagtttgaatatttcttcgatctatcttctattaattactaactctttttttttttttttttttgagacagagtctcattctgtcacccatgctggattgcagtggcatgatcttggctcactgcaacctccgcctcctgggttcaagagattctcatgcctcagcctcctgagaagctgggactatgagtgcaggccaccatgctcagctaatttttgtgtttttagcacagatggggtttcgtcatattggccaggctggtctcgaactcctgacctcaagtggtctgcctgtcttggcctcccaaagtgctggtattacaggcgtgagccactgcctggctaactctctcttcaacagtgtctaattgactgttaa

SEQ ID NO: 96944 - DNA, 14821 bp, Homo sapiens
ccaggctggtcttgatctcctgacctcgtgattcacccaccttggcctcctaaagtgctgggattacaggcatgagccactgcgcctggccctaatttttgtatttttagtagagatgaggtttcacctttttggcctggctggtctcgaactcctgacttcaggtgatccacccacctcggccttacaggcatgagccgcagtgcccggccaatgctgaatgttttatatcccatagtgtatttcattctcacaagatcccccgggtactgttccttctcccagagcaagaagcacagtggctgaggtccagagaaacggaggtgcttcatgcaaggtcaacacaggattcctaaccggacagcctgggctccagcactgcctgctggccacatccaccactgcctccaggaatcaggtctaggtcttgaaggcagctctggggccagagactgagccatctcttttttttccaggtgtacaaaagagccaaggcgctggaccagtctgacaacgatatgtccgccgtgtaccgagcctacatacactaagctgtcgacaccccgccctcacccctccaatcccccctctgaccccctcttcctcacatggggtcgggggcctgggagttcattctggaccagcccacctatctccatttccttttatacagactttgagacttgccatcagcacagcacacagcagcacccttcccctgaggccggtggggaggggacaagtgtcagcaggattggcgtgtgggaaagctcttgagctgggcactggccccccggacgaggtggctgtgtgttcacacacacacacacacacacacacacacacacacacacaggctctcgccccaggatagaagctgcccagaaactgctgcctggctttttttcttccgagcttgtcttatctcaaaccccttccagtcaaggaactagaatcagcaacgagagttggaagccttcccacagcttcccccagagcgaagaggctgtagtcatgtccccatcccccactggattccctacaaggagaggccttgggcccagatgagccagtacagactccagacagaggggcccttggggccctccaacctcaggtgatgagctgagaaagatgttcacgtctaagcgtccagtgtgcacccagcgctccatagacgcctttgtgaactgaaaagagactggcagagtcccgagaagatggggccctggctttccagggagtgcagcaagcagccggcctgcaggtgagcatggaggcccggccctcaccgcctcgaagccatgccccagatgccactgccacagcgggcgctcgctcctccctaggctgttttagtatttggatttgcattccatcccttgggagggagtcctcagggccactagtgatgagccaagaggagtgggggttgggggcgctcctttctgtttccgttaggccacagactcttcacctggctctgaagagccactcttacctcggtcccctcccagtggtcccaccttctccaccctgccctgccaagtcccctgcatgcccaccgctctccatcctccctcctctccctcttcctcccgtggagacagtatttctttctgtctgtccctttggcccagacccagcctgaccaacgatgagcatttcttaggctcagctcttgatacggaaacgagtgtcttcactccagccagcatcatggtcttcggtgcttcccgggcccggggtctgtcgggagggaagagaactgggcctgacctacctgaactgactggccctccgaggtgggtctgggacatcctagaggccctacatttgtccttggataggggaccggggggggcttggaatgttgcaaaaaaaaaagttacccaagggatgtcagttttttatccctctgcatgggttggattttccaaaatcataatttgcagaaggaaggccagcatttacgatgcaatatgtaattatatatagggtggccacactagggcggggtccttcccccctcacagctttggcccctttcagagattagaaactgggttagaggattgcagaagacgagtggggggagggcagggaagatgcctgtcgggtttttagcacagttcatttcactgggattttgaagcatttctgtctgaacacaaagcctgttctagtcctggcggaacacactgggggtgggggcgggggaagatgcggtaatgaaaccggttagtcaattttgtcttaatattgttgacaattctgtaaagttcctttttatgaatatttctgtttaagctatttcacctttcttttgaaatccttcccttttaaggagaaaatgtgacacttgtgaaaaagcttgtaagaaagcccctcccttttttctttaaacctttaaatgacaaatctaggtaattaaggttgtgaatttttatttttgctttgtttttaatgaacatttgtctttcagaataggattgtgtgataatgtttaaatggcaaaaacaaaacatgattttgtgcaattaacaaagctactgcaagaaaaataaaacacttcttggtaacacagctgtgccgcaggagtcctgcttccctcgtcctcggcgagatgggtgggaggagaaggcagcggcggggccggggtgggttttcgggacctccgcgtccggggtgagacggacttgggagtggcggcgaggtccgcggcagggttggaaccacgaccaatggagccaagcgggccaatagggaggaggagcggggacagactgtcctgccggccaatgagtgagcgcgagtggagcagagcgccctatcatatcctgggggcgccccgggagctccgcccccaagcgggcgccccaggctggtgccggccgcgtccctggccagccggagcaagcctgactcgtgcagccgccggccgcgtccctggccaggcggagcgagcctcactcccgcagccgccagtctggttccagggctcccgcaggtttcgggggccgaggcggaccgacaggcgccagccaatcgcgagcacggagccggcctgggggcggggtggtacccgctccgccaatcgggtgggggcggagccagacgccgggggcggacgggaggaccggaggaccgaggacagaaagattggtggacaggagcagcggccggtggggagggcgctcggcggcggcctgcggccatggccaccgtgatggcagcgacggcggcggagcgggcggtgctggtaaggcgcgcgggccagcgggcgggccggcggggcggcggggccgggcgcgaccgccgggtctgtcccgcaggaggaggagttccgctggctgctgcacgacgaggtgcacgctgtgttgaagcagctgcaggacatcctcaaggtaacgacccgcgccctgccccgccgggcgtggcggccctccctcctcatttccctggctccacctggggccgcgcggctgcgtcctgagcgcctacagtgtgcggctgccgcggctttcaggcagggccccgcctccgcgaactcgagccgacctcattatataagtacctgtgtgcgggcaggggcgggtcccgacgagggtgctagcaagggcctgagtcccgcccggcctcgggtcggggaaggccgccttgggagcagcggcatccaatctgggagccgaagaattctgcctctgcctggcagtgtgacttcagccaagtcactgaacctccctgggcctcccttttctcattggcaaaagggagataacagtacccgcttcgcgaggctggggtgtagataaatgagccaggcagctcacagaagtaaccggcgtagtgcttgctgtggcccaggaccgcgggttaccataactactgccttgttccctgactctgccccttgcccctttccccctcaaccaagctgggaggctgcccctgtctgttttgtattccccgaggcgggcacacaggaggtgttcagggaatgtggtataagcagagatcgggctcacggttaggtgccctgggggcttgggcagggtcttcccaccccagctgaacccaggtgaggccaggccacgttgttccttccccccgctgacttggagggaggggggcttctggaaggagcactgggccgggcctgagtgggcgctaccagctcccctccttccctctgttccacaggaggcctctctgcgcttcactctgccgggctccggcactgaggggcccgccaagcaagagaacttcatcctaggcagctgtgggtgagcctgggctaggcggaaaccggggaaatgggtaccttggggggtaggaggcatggccatagccctgtcctgcagaccagctggttgtgcgatgggacaggaggggcagcccgccgggagggagggctgggtggtgggggggtgaccacaggcaccgctctgacgccacatgttacagcacagaccaggtgaagggtgtgctgactctgcagggggatgccctcagccaggcggtgagtcccccggccctgtcccctcccatcctgccaatggggaagagcatgggagctcccactttctctctgtacaagccctgcgactctgggcgggacccttgatctctctggcctcagttttctcctttggaaaatgacagcaaccctcacaccttctcccgggatcggtgtgcagattcagtaagaggtgcaggagaggggttctttgcacacggcctggcctggcgtccggaccagtgaaacatgggcattggtggattaggctggccacacatcacagttgaatcagccaatgcctgaactccagtctgcacccgactctgtgccaggcaccaaggcgtggggggaggcccccctcctgggctccatctgttgccctttgtagacactagatgcaccccgttcgcacagagcctcacagaggctgcctttcctcttccccttcccctttcttcacctctttccatttcacttctttgtggctcttcttgggcctggtttcctgtttcctgacctccctgttcaacccccaaacggccaaggcattgggagaccctctgccctatacagcggccaaggcctgaaccaccacacaccccatttctgccctgggcttaagggctcagagtggctgtggcaggaggtgcccccccactgcccagctcaccccactcttgcctgtcaggatgtgaacctgaagatgccccggaacaaccagctgctgcacttcgccttccgggaggacaagcagtggaagctgcagcaggtgaccccgcccctcctggctagtgctcagccacaaggacaggcggcagcaggcctgccgcggggcctccctggagagggactagccctggggatctgtggccacagcaagcctgggagggtgtttcctaacagcaaagctgggggcaggcgtttcctgaagccctggaggctgcgccatgtggggaggtagagaacctggcctgagagccccgagggccacatcgggactgtggagtccccacagcagctggctggatgagatggttcagaagccctctgaaaagtcactcccttgcccagagcctccagggacttgccatggctctggggatgaggcccatgctccctggcagctcctgtaccaatgggccccagcctcctcccctgccccctccaccccgactgtctccatctcagcacccttgcccctgccttgtcgccctgtttgcttccctccgcaactcgcacagactcttgtcttgggcattactgtgtgtccatcccttagaaaggagggggcagtcagcttgggcagagaccaggcctgccccaggtgatgccagatgcccatcacctggcgtggacctggccctctggggcacagggatgacagtgtggagagtggaatgacgtggggcaggcaggcagcacccactctcccctcctggccgcatggaagctggcgtgacccctctggatgacccctgcttccagatccaggatgccagaaaccatgtgagccaagccatttacctgcttaccagccgggaccagagctaccagttcaagacrggcgctgaggtcctcaaggtgagctgcccccgggcctgactcctgggcctagtcccacgttcttgatycggaatcacacctgggttccaatcccagggcctccacgttgagctgtgcaacctgtaagcacttacctgccgactctgtgtctccatttctacctgtggggtcaggggcaagctggagtgactgttcaccataataattcaggtcacggggcccccagtaagcackcggcacacaccactgccggtagcagcagtgaaagccttcacattaaccgcgtggcacatgtgaagagctgacctgggcacctgacctcatgcttgagttctgcccctgacttgctgtgtgtcctccggtggttcacctgccctctctggacctctgtttcctcacacttagaaccagatagactaagatcccttcgagaactgtaaccaccctagggtgctacaggccctatacccccagtcagctcttacgtgtttcctgggagccacatcaccctggtactcatggccacggctgaatggcacgaaagctggggctctgaggagtctgccagggctctgctccacggcaaagggaaggaatgggctccaggtggtcccaccatccatcagccgtgaccctggcttacccccctgaaaacctcaacccagtcatccatcgcctcttccaggaagccctctctggccctttacaaccaacctttgttgcctgtacccctgtccacaaagcctgtgcccctgggactgacctcccaggaccttccattccccattgatccagcacccaggatccccgtgcagtgaatcagccccatcccgactgacattagtgcagacatcctgccctcctccatacccagctggagcccaactacctgtctttaacaggtccctgctgccgggtttcgggacctgggaacagtagccactgggctgggtgggagtgggagctaccatgtctgttgttccttaatgcatggggacacgggaggacgcagagccaacccygcctctccctgcagctgatggacgcagtgatgctgcagctgaccagagcccgaaaccggctcaccacccccgccaccctcaccctccccgagatcgccgccagcggcctcacggtcagtgcccctgccagcccctgctgcaggagaggggtcccacagtgggtcccagcttgccctcaggatggacgcsgaggggtgccactcccagattataggtggaatattctgtctaggcaggtttctgggatggggtccttggcttccgtcctgtgcccytaaaatacgttaaccctgtttcgggttagtggttcccaaacctgacagcacaggagatacttggrgcacctgggaaaagtctggaagcccccattgatgagaagagcatctctggggtrgggactgggatcccctkcagactccatgagtgactgcagagccccgctccatccagcctgggctgggggcttgcgagggcctcatcccacctgcctcccrcagcggatgttcgcccctgccctgccgtccgacctgctggtcaacgtctacatcaacctcaacaagctctgcctcacggtgtaccagctgcatgccctgcagcccaactccaccaaggtgaggagggacccctgcccggcccactgcccgccatgcacacgccctgcaaggcctgacgggtctggtgctgttctccctagaacttccgcccagctgggggcgcggtgctgcatagccctggggccatgttgtaagtaggcaggggcggggggtccaggcacgcccaccccatccctccacacctggagggccgggaccctcctcagggaccctctcactkcccacagcgagtggggctctcagcgcctggaggtgagccacgtgcacaaagtggagtgcgtgatcccctggctcaacgacgccctggtctacttcaccgtctccctgcagctctgccagcagctcaaggacaaggtgggcccgggccgagcgccttcattaggggaaggacttctaagggtccttgccacrccctcagagcgccccarycttggggtctggtgtaccccacagcactgcgaggcagcaatgccctgtcctgacatattgtccttgggtgaccttgacatctcccctgggctaccccatcccccttcagcaacctrcagcaccctctccccttgcagatctccgtgttctccagctactggagctacagacccttctgatcacagcacccaggagcttgtctccaggaaggcggccccgtcccctactcatacccaccacagagcaccagccagtgccaacgccaggctgctatttatctccctatcccaccccctaccccacctaacacatttgcactgccrggaatggacactggaagtgccaggaggaaggaaggctggtttggtggggtagtggggaggtcagggaggcggggccaagggtgtcccacattcccaacaccgccctctgatcaccatgggaatctttggactcaggacagggccaggygcagggctctccctcctctccccttcgctgtcccctccccctggagggcatggtgtcggggggtggcactgagctatgagtcccgggratggtgaggaacgccacagacagagccaccctaggagtgagtatagtgctggtgactgtgtttcatagccccagtccagggctgtytaagaaataaagatcatcagactccacctggagcccctgtctgtctgtctgagtgggaacccaggcagggggtctctggtagtcagtggccatgagcttcaggagccagccgtctcccctattcccggagcctggcttccgcgttccctgtgccatgccagggcagggcacagaacctactgtcgagaggggaccctcgggctgccaagaagcccatggggtggcgacaagagctctacctgggactttgggccaccgagtctttttttttttttttgagacggagtctcgctctatcgcccaagctggagtgcagtggcgcgatctcggctcactgcaggctccgcctcccgggttcaagtgattctcctgcctcagcctcccgagtagctgggactacaggtgcccgccaccacgcccggctaattttttgtatttttagtagagacggggattcaccacgttaaccaggatgttctcgatctcctgacctcgtgatccgcccacctcggcctcccaaagtgctgggattataggtgtgagccaccgcgcccggcctgagaccagctcccctcccagctaggtgactgaggatgacctggcacagtcgtgctgactgaaggcttggagaggccaggtggccacctgagtggggcggcgagtcccgcgtcacccacccagacggggactggaagacactgcagactcaggctctgggcagacagaaggctttgttactgccaccgggcaggagacacagggtcagggttccagggccaagttatccactcccttgggtctttcctgcacgagaagcacagcgggaccaagcaggttcgctcgttgttccctagggggatgagcacccttcccgccactcccctcaccttccgcctccacccccagtacagttccgtgcaggtcccagaggccggcagggctcaccttccaggggctcaccttcctggggctttccctgcggggcccgggggagctgcagcagcagcagtgggcgacgaccagcagcagcaggagcagcacggtgcctggggacaggacaggcgtccaggtgtggccccaacctggagcccagggcagggggctgggaggacccagaggccacagccacacttacccatgaaggtgaggaaaacaatgaaggcaacagtgtcccatgtggactggaaaaactggtggctcttcagtctccccaggacttcctgaaccgtggcctccagctcctctgtggacacagccatcttggcgtgcaccgtgccacctgccccggtcccccagaggctgcatcaggatcctgggctcagctcagcggggaccacatccaggcttcccacagcccagccactgcccgctcctggcccagcgccagcttccccaccccctcccactccacttctccctcggccccaggcccagcttctctccttgcccagccctgtggtccttaccctgacaaccttctccccagccactgtcatctcccctctctctccccctggcagcccagcccccaggcccccacctacctcctagaagcctccaattcccccaaccaggcaggtcctggggagcacaggctgcttcctgcttccggctccacaccacctgaggccttggcaaccagccccgccctccccagggccagcagaggccgcccagcccaggggagagggcccaggcccagcaggtgcgctccctggctccccactgctggaggcccagggaggaagacgccggcctgtggcttcttcactcctgagacttcttacctttcctcagtatcccagatatgcagctgggaacacctgtgtgcttggccactgctgacttcgtgaatgaaagagagagagatgggagagaaggtgggtgggagggagggggaagggggagaaaacctacctgcatcccacgacccttgagcagctaggacaggtgtgcctgcatcatagagttgtccttggaatcctcaacgattggttccagcacctccgtgggtaccaaaatccacagatgctataaactccctgatataaaatgaggcagtatttgcatataacctgtgcatatactctatactttaaatcatctctggattacttataatacttaatatatttggcctggcctggtggctcacacctgtaatcccaccactttggaaggccaagttgggcagatcacttacttagatcaggagcttgagaccgtcctggccaacatggcgaaaccccacctctactaaaaatacaaaaattgggccgggcgcagtggctcacgcctgtaatcccagcactttgggaggcagaggcgggtcagctgaggccagaagtttgagaccagcctgactgaccaacgtggagaaaccatgtctctactaaaaatacaaaattagccaggcgtggtggcacattcctgtaatcccagctactagggaggctgaggcaggagaatcacttgaacccgggaggcagaggttgtggtgagccgagatcacgccattgcactccagcctgggcaacaagagcaaaactccatctcaaaaaaaaaaaaagataaaaatacaaaaattggtcgggtgtggtggctcatgcctgtaatcccagcactttgggaggccgaggcaggcggatcacaaggtcaggagatcaagaccatcctgggtaacacggtaaaaccccatctctactaaaaatacaaaaaattagccggccatggtggcacgcgcctatagtcccaactactcaggaggctgaggcaggagaattgcttgaaccctggaggcagagattgcagtgagccgagatctcgccactgcactccagcctgggtgacagagcaagactccatctcaaaaaataataataatacaaaaattaccccgctgtggtggcgggcacctgtaatcccagctacttgggaggctgaggcaggagaatcgcttgaacccaggaggcggagcctgtagtgagccaagatcatgtcaccgcacacccgcctgggtgacagagcaagactatctcaaaaaaaataaattggctgggtgcggtggcatactcctgtaatcccagctaatcgggaggccaaggcaggagaatcgcttgaacccaggaggcagaggctgcagtgagccaagatggcaccactgcactctagcgtgggtgacagagcaagactccatctcaagaaaaaattgtatacatatatttatttaatataatgtatgctaggtaaataattgttacattgtatagggaacagtaagcaaaaaagtctgtacatgtccaatagagatgtgatttgtttccaaatattttctgtctgtggttggctgaagccacagatgtggaacctgtggatacggaaggccagctgtactaggactcttcactgtccttattttctctattttactacttgaaaatatcagctaatgtggggctctgcatcgagcactgtgctgtgtcacctggtttattcctcatagcaatcctaaagtgggtattattgctttttccattttacagatgaggaaacggaggcctagagaagtttagccattagcccgtcacacacctaatgtatccatgtcccaatgctgccgtaacactaccacaaactctgtggcttcaaacaacacaaatgtattgccctatggttctgaaggtcagagtctaaaatgggtcgaccaggctgtgttcatcctgaaggttctagggcagagtccatcttttgccttgtccagcttctagagggtggtggcattcctgggcttgtggtctcccatccctccaccctctgcttccaggctcacgtctcctcctctgactctaatcctcctccctccctttttttttttttttttttttgagacagagtttcgctctttttgctgaggctagagtgcagtggcgccatctcggctcactgcaatctccgcctcccgggttcgagcgattctcctgcctcagcctcctgagtagctgggattacaggcacctgccaccacgcccagctaacttttgtattttagtagagactgggtttcaccatgttggccaggctggtctcaaactcctgacctcaggtgattcacccaccttggcctcccaaagtgctaggattacaggtgtgagccacgatgcttggccttttttttttttttttttttgagacggagtcttgctgtcacccaggctggcaggctggagtgcaatggcacgatgtcggctcactgcaacctccgcttcctgggttcaagagattctcctgcctcggcctcccgaatcactgggatttcaagcgtgcaccaccacacccagctgatttttgtgttttcagtagagacggggtttcaccatgttggtcaggctggtcttgaactcctgagctctagcaatccgcccccctcagcctcccaaagtgctgggattacaggcatgatccaccgcgcccagcagacatacttctatttaaaaagtgcaggggaggctaggcgcggtggctcatgcctgtaatcccagcactttgggaggccgaggggggcagatcacgaggtcaggagatcgagaccatcctggctaacacggtgaaaccccgtctctactaaaaatacaaaaaattagccgggcgtggtggcgggcacctgtagtcccagctactcgggaggctgaggcaggagaatggcatgaacccgggaggcggagcttgcagtgagccgagatcacgccactgcactccagcctgggcgacagagcgagactctgtctcaaaaaaaaagaaaagtgcaggggaacaactgtggcccctgctccagctcttggcctggctgggtgggcaggaggcccactgtcccctcctctcccctctggccctcagtcttcctgtctctctgggtaccttgtttctaatgtttgttgttactattatgaaagtcgtatctatctcttaaagaagatctggaaaccaccaagttgttaaaagacaaagtcaggccaggcgcggtggctcacaccagtaatccaagcactttgggaggccgaggtgggcagatcacctgaggttagaaattcgagaccatcctggccaacatggcgaaacccgtctctactaaaaatacaaaaattagccgggcgtggtggttggtgccagtaatcccagctactcgggaagctgaggcaggagaatcacttgaacccgggaggcagaggttgcagggagccaagatctcgccactgcactccagcctgggtgacagagtgagactgtgtctcagaaaacaaaaaagacaaaagtcacagagccccgcccagtcccaggcaggacagtaacaggaggaggaggctgtggcagggagtggttccggtgagtcagacttctggacccaggttcgattgcatgccataagacccaccaatgtgtgagcttgagtaacgttccctgagcccttctgcctcagtatactcatctgtaaaatgggtatgttaatagtatccacctcctcccagtgtcgtgaggatgaaatgaactgatcatcgatgtcagagccgtcgaagcatgatggaaggctcacagaaacgtgcactgaatgccctgtgctattatcgccgtgttgacgtgtgattccatccaggcttttgtcctcttccaccatagtcacgctgcatagatcgttttttccctggcttttgccagtcaacaccaccgggagcaccttccagatgacagcatgctttctgcaaactactcctttgacggcacttacatggtgcagtccctactggcacccagtgaggctcctcccctcaccgccacgattttcagaattagaccatcgctcacatgggaggattttcctggagaaagtgttttctctgcacagaggcgcatttccttaggggacatccccagaggtacgtctactgctcaaacgcagtccacacgtcaccatcaccagagccatttgttcatccactaaccacatcctcagctgcttatgggagaggcccccg

SEQ ID NO: 96945 - DNA, 12585 bp, Homo sapiens
aggtcgtcaggggcgggacaggcctgttcgagctcaagcagcctctgagatagcagctaccccggcaccatctgcccagctccaaggacccttggtgagggcgtggcccagcctgccttctgcatgagaggaccaggagactggaatccagggcagttccaagtgacagtacagagcacagcagcgaccttgggcctgaaagcagtgggcctctgagctgggccagcttcacctggaaagtgacagagttgctcatccttgcccctccctgtctctggatttttatcaaggtttaccaagtcttctgagtccccctgagatggctggggcttcacctgtgctgcaggaggcctctgtggcataacccctaaggagaagtcctgattcacgattcactgagaagaccaaggggaagccatgctttgctgctggggaccccaggcacctccagagtagggaagcggggttcttttgctgtgagtggccagggacaacagacaagattcctgggggctcccgatgagcaggaacgtggagcctgctgcccaaggcctgctccttccggctgctccagcccctgggggcagagtccacaaagagtccccatcaagacttcttccctgagtcaagtacagcgtagcatagtcctccacccacccaacctctctgcctggccagggtcctggccctgccactgtgtggcgaggtgtccttctagaccacatcagccccaaggctgggagcagtcgctccagggccgcagcagttcactcccacacatagaacccaggtcactgctggggcgattgaacaggttgcctggcttttctctgctgtcagtttggtgtggaggcctatgttctgccccatacaccccacaggccctgcttatgggaaggaacacaggcctccagcccagaggactgtgccgccctgttcttggccgtccacgtttcctctccctctagcaccagcaatacatttccctggcatggacagaaaagacagagaggacttgtacaaaggctttgtaaaaccagaggctagcttctatctttgtctactgttatttcagctcagggcgggtaattaacatcattggaactagctattaggaaagaaaaaaaacttggttttttttacaacaattttttcccttggtttgcagtttctgcatttggatttgagaacccagggcggggattttcttggcacagtcaggtcttgggtccctcttcctgtgctttcttgtctgaggccttagggggaagagctcagcctctgcagcctcctccacctctgcccctggcctgcctctgctgtgacctccttccagagctagctgctggccctgtggccaggagaagcagaggggagaagcctttatgcagaagctgtgctagccttggtctggggtggggaggctgctgctgtgaccttaggggtagggttggggatcaagggaggctttgtcaagggagagtgaccatgttgctccctacatccatgcaataggacccagcctgcacctcctaggcctacactggggaaagcctgacagaaatcagtacctcctaacggggtctgccaggttcaccaaggcatgggcacagaggaatatgacagttttgaggcaggcaggaagggcccagcctgcagggtaagacattcattctttgagttaaaggccatattcacttgatgatttctacacacactagaattgtgagagtgtccttgaaggagatcacaaagtaacctggtgactgtggcacagggtccgtggattccatctctcccaggcactgagggcgcagaggcgaaggagcaagccctgcatattggcagggctgtgaccatcgcacttagatcagacccccgacctgtgttgggatgtgagggatgccctcctgccccacccatccacatggttcctgggcagctctgttttattcctgtgtctttcctgatggatgagtattaagacagcatgtctggtttttaaacagacatttgggagcttgcacatcctgatgagcagggactcactgtggtggccttagggaattacacgctcactttggtggttctctatgctcggaagcctctgagagtggccttggcagcttaagatggcagaggctttggagtcttcttaggactgtaagtgcccattgaggatgcatttgagttttggaaagtaggcccaagtcaaatctgatggatggattcaagaacatggactaatctgcgttgtcatttttaatcaaaatgtaatggagattgatcatctggtggggttcacaaacttttcatgagagctgtgagttctttttttgagatgcacttttgcacttgttacccaggctgagtgcaatggcgcaatctcggctccactgcaacctccatctcccgagttcaagcgattctcctgcctcagcctcccgagtagctgagattacaggcatgcgccaccacgcctggctaatttttgtatttttagtagagatggggtttcaccatgttggccaggctagtctcgaactcctaatctcaggtgatccgcctgcctcagcctcccaaagtgctgggtttacaggcgtgagctactgtgccggccagagctatgagttctttcagaatcctcagatgccattagctagccactgtttggacatccttctcaccttgccctttggggtgatatccatacctacttgcttgcttctaacagtttttttatttgttttgtagagacgggttttggtttattgctcaggctggtttcaaactcctaggctcaagcggtcctcccactgtggcctcccaaagtgctgggtggtgtgagccaccgtgcctggccagttaattttttttagtgtctcttttttgggttctcaccagaaacactatcagcattcccacagatattcctgtgagtctttgaaacattttctatcctgcattgagtaagaataaaaccgaggaaggggtgaagcaccttgtctcatccccagtctggaacttgaaccttcttttctcttcactttgccctacccccaaataatatgtacaaatgtctgtatccattgagcactaactccctattccttccacctccccagcccctggcaaccactgttctacgttctgtctctacgaatttgacttctctaggtccctcatacaagtggaaaagtacagcatgtctttttgtgaccggcttatttcacttagcataatgtcctcaaggttcatccatgctgtagcatgtgtcagaattgccttcttgcttgaggctgctgatacctcctcatgtgtatataccgtattttgtttaatcactcatctgttggtggacacttgggttgcctccacctcttggctgttgcaaataacgctgtgaacatggatatacagatatctgaggccaggccaggcgttcacacctgtaatcccaatacgttgggaggccgaggcgggcagatcatctgaggtcaggattcgagaccaccctggccaacatggcaaaaccccatctctactaaaaatacaaaaattagctgggtgtggtggtgcgcgcctataatcccagctactcgggaggctgaggcaggagaatcttgaactcaggaggtggaggttgcagtgagccgagattgcgccactgcactccagcctgggtgacagagtgagattccgtctcaaaaaaaaaaaaaacaaaaactcagaccctgctttcctttgaatatatactagaagtggaattgctggatcatatggtaattctttaatttttctgggggaactgctgtcccattttccacagcagctacaccattttatgttcccaccaacggtgtacaacaatttcaatttctccacatccttgttcttgttaatagtagccaccctaatgtgtatgaggtgccatctcgtggtttggtgtgggctgtgtttcaatcagatgttgggacccttaagtgttctgcacctggggagagttaggaaccacttaaggagtgtctgttgcttgccaatcttaaaatttttagtttgcacctgaatcaggggctgtcagagtccagactgctcttgaaatagaaaagactggtcgttaaaggctggttcgttgagtctttcatcgttgagtgataccacctctgcagatggctcagtggggcagccccgtaccacagcctgcccttgaggttgtgtagtttagataggtcacagagttgctgggcctaccgcaggtctcctgaccctggtgcagttttacttcaattacaaccaccaaaatagctacagtcaaaaattccaaagttcctacaccatcaacctccaccccacttccgtccaaagtccacttagaggctctcagttttggaccttagaaacacttagggagctttttaaaaagatcgattctgtatttttagtagagatggggtttcacccagctactcaggaggctgaggcaggagaatcacttgaaccggggagttggaggttgcagtgagccgagattatgtcactccagcctgggcaacagagtgagactccgtcttaggaaaaaaaaaaagattgattctggccgggcacagtggctcacgcttacagtcccagcactttaagagactcaggcaggaggatcacttgagcttaggagtttgagactagcctgggcaacccagtgagaccccgtatctacaaaaattagccaggtgttgtgacatgtgcctgtggtcccagctactcaagaggctgaggtgagaggagcaagtgagcccaggagttcaaggctgcaatgagctgtgatcgcaccactgcactccagctcgggtgacaagagtgagaccccgtctgaaaaaaagattgatcccaaggccttgcccagattctgattttattggcctggagtgtggcctaggcattagaaaatcttcaagagagtctaaggtgcagcggaattgagagccacggacagaaaaagccctaaattgtggaaatgcacagccaccgtcaccacctatcggtacgatgacatctcaaggagtcactggccctaggtttctgcagtaggatcttaagatctgatctctgccctcaagtgagtgcacgtgcagtaaagctgtcatcgtgccatgacagatgtctgcaaggactttacagtggggtccaaaggatgccaccatcagctccacctggggctcaacaaagcctgaaagaagaaagggatgatgcttccagcagaaacctggaggcctgcagctctgccagcccagcacagcaagcgaggccatttgtccagcaggggcagaaggagggaactcagccagccagcgtttcctacaagcagctccatgagaggtttccacttaaaatgctaaatcataattatttaatcagattcgttccttaagttctttaagcagcatcgctgtcctaccacgagtggtcatcaaggagcagggtttaactcaactctgagttacccggcagggtacctgggtaactgcctgggttgaggtacccagcaggcttcatgtgcatgtgcacactgccccctgataggacctggtttattcacaggctcaggtgtcactgcagctccccagtgactatcttcgcgcaagttggactcaatggcctgggaggtttgtcccagccgacagatacctgaccatgcccatcctcaccattccctcccccatgctgcatccatccaaccttgatctccactgtgtcccaggcaccctaagatgcacaagctatgtgggccctgccctcacagaacttgtagtcttctgccccaaacaagccagttcaccgtcttcatgatcaggccaaaggttgaggtacccagcaggcttcatatgcacatgcacactgtcccctataggaccatgccttgcccagctggctgcactctagagggtgctttgtaggaaggacagagtggagaggacagtggggaggtacttgggtgttcaacagccagaagggagggaaactgaaaaagaatcaggagtccagccatcccctccccacctcctgcccccacttccaccctggctgctggccctttgcccttgaatatrggtgatataggtgtggctattcagttccagtcacagtgctgcctctatgtcttttgcaagctggggtcttccttactcagaaggcctggaggccctgccagatgctgccttccggactggctgcccgctgcagtgttttcacgggagccaagccagccccgggcctgtrgcctcccatgtgacaragtttcagacaccacagtcctcagctggaccacagtaaacacttgccttccccaacccatgattcttgcttggaaacatgaacctgatgttccacgtgcgttcagccaatcaaacctcaagaatgtgattgagcagtgaggctgcgttttgggcaagacactgagctctgaaataagacttttcttggaatctcaagccctcaacttacagtgggaccctaagaaatgcacttcagtttccttttatgtaaaatggtggtaaaattaattgtgttcattaaattgcacacaactatacatgtttacctatacactaagtggttctcaacttggggcaatttgccccccaggggacattcagcagtgtctgcggacattttttgttgctactggagggaggtgctactggcatctagggagtggaggctagagatgctgctaaactacagtccacaggacagtctccacagcaaagaattgtccagccccaaatatcaataatgccgaggttgaggaaaccctgccacatacacatagatgcgggttaacattgtttattttacaaagtggaatcatttacattttagccattctgatagatgaagcagtggcatctttttttttttttttttttttttgagacggggtctcactctgttgcccaggctggagtgcagggttgcaatcacggctcacagcagcctcgaagtcccaggaccaagcaaccctcccaccgcagccttccaagtaactgggactacaggcacacaacaccatgcccagctaattttttaatttttttgtagagacggggtttcaccatgttgcccaggctcaaactcctgagctcacacgatctgctgccttcaccttccaaagtgctgggattacaggtgtaagccactatgcccagcctcatttgtacttcagtttgcaattctctattaataaatctaagcatcttttcacatgtttattggttattctgatttgcacttctgagaactgcctatttgtatcctttgcccatttttctattgggttattggtattgcttttgtcaattttaaagaattgtatttactatagatatagataaccttttgtcactgtgctaaacatttttctcccaagccaggtaaagaattcagcacagtccctgcattgtgtaaaaccttgagtaaagatgttagctcttggccacccaggccagtggccgcctttagactttggctagggcttctggagcagttttttttgtttgttttgtttttgttttgttttgttttgttttttgagatggaatctctctctgtcgcctaggctggagtgcagtgacacaatctcggctcactgcaaccttttctaaggtacatagattgattgaaaaagcacagctgggcatggtggctcatgcctataatctcagcactttgggaggccgaggcaggagaatcacttgaggccaggagtttgagaccagcctggccaatatggcaaaaccctgtctctactaaaaatacaaaaaattagccaggcatggtggcacacgcctgtggtcccagctacttgggaagctgaggcacgagaatcacttgaacctgggaggtggaggttgcagtgagccaaaattgtgccattgcactccagcccgggtgacagagccagactctgtctcaaaaataaaattttttaaaaaggcaaattacctattgtgatggataagaagactacacttacagcagcatgtccagttgtgctggaggggactgtggtaagagcagaaaattaccagaaatcaggagcaacatgaagcagccctgccgtcattcgtggcttctgcttggctcgcttacaaatgcaggggctcactttgacctggagctcaccaggtgcaggctggccccagtcttttatacctgttcatccatccactcctcacaaccacccagtgagggagtatggtgactctcctcgtcttacagtaactcacccaaagacatagtcatcaagtcgtggaacaggaatttgaagccaagcaggtgtctccagagtctgggtccttaatctcctctctgtgtccaccccctttgcttggacagaccctgaggattggactttgttaaaggctgccctgcatgtggtatggcaggtagatgtgagggcaccaaatgcctctccaggccccagaacacctcttctaaggtatgtctctaggaggtacagacgagactactagggggtggggtctgcagtttatctagttggggagctggcagctcacaagagatgaaattagagcaaatgaataacaagcagtcaccttaaggaactgagactcccaagtgatggcccaaatcaaagcacaagtcaatattgaagagtttgaggaaatagtggtgggttaacccaaagggatcttccagccttggggctttcctgcggagaggacctggctatggactgtaccagttacaaagaacctctttgtgatatcatctcatcaaatccccacagcccggcgacacatgtcctgttggccccatttcacagttgaagaaatggatctagtggtgaaggggaggccaggtctgctgcccctcttggagatgtgcctttgcgtggggcacctctggcatcgtcctcgggttctgactggtgtagggtgacatctcctaggtcgtgctgatcaaagtggctagttctctcctttgaaaataggaggcccctgaggaatgaaagccaggtcggtgagggagggaatggaaggctacagaagcctggagggtggatccatgggaaggtagcctgcggggctcagcatggggggcagagtattgaaaaggggaaatggaacaacttgagccaaggccattccactgcccataggatgtctgtcctgctcactgtacttctcatccaccttccatcgtggcctctgaaggcctggcctgggcgggcacagccctgtcgcaggtgctcttccacaaaccggctcctcacccagcgtcctgccgcctggggaccacccaaccccagggacagggctgcccgggctctgcctgggctctcacaggacctggcaagctgccctggcccctggcctgggacacggtgtttcccttccacctgcaggctgactcattgggattcctccgcgtccggtcacagcaggctgggtccctgggcagccggcgaccatctggccagcccagctctagactctctgttataggccaagactctgtcttttttttttctctgtagtcccaattttaatgctcaattaaatattggacaaagaaggaaggaaagggaaaaaagagaaggaggagggaatccatgtgtccacggtcctcaaaaatgaacatctttttctccttcattttctagagcagtggttctcacagtgaagtccccaggtaagcagcaacggcagcccctaagaatgtgttagaatgcaggccaggtgcgggggctcacacctataatcccagcactttgggaggccgaggcaggcagatcacttgaggtcaggagttcgagaccagaaggccaatgtggtgaaaccctgtctctactaaagatacaaaaattagctgggcgtggtggtgggtgcctgtaatcccagctacttgggaggctgaggcaggaaaattgcttgaacgcaggaggcagaggttgcagtgagctgagatcatgagatcgtgacactgcaccccagcctgggtgacagagcgagagtctgtctcaaaaaaagaagaagagaaggaggaagaggaagaggagccggaggaggaggagttgttacaatgcaaattatcaggccgcaccccagactcccgagtcagaaactgcagggtggaggctgttatctgagtttgaacactatcagggggattttcactcatgctccagtttgagaacctcggccctagaactgtcatgaggaagccatcttacctctggtctgccctctttttagctgtttcagccccagaactctcctgggtttgtggaaatagccccagaggcccccagcctctgcagacagcagctcctgtcagcgccccagtttgacccgcaagcgggctgggcgtggcaggcctacagcagcagcaggtgcagaatgagcctccagcttctctctgcatcctttgcaggcattagttcattcaaacttcacaactgtctgtgaggcaggcgggcgacaccagcacctctgttttatagatgaaggaaaggaagactcgggtgtgttatcgactgttttcccgtgagaacattccgactccttggggacaaggtctgtgcctgtgaagcagttaaacaactggcagagaagttttgtgtatcttggatgggatgcggggctcccacagatcctcctccccagagccagctgaagggagatgaactaggacatcctagggcctggcatcctcctgcagtgctcctgcgcagcattttcccagaccccaacgaagcccacaggcacctttgtcttgtatgtttaaaactcctgccaggcgcggtggctcccacctgtaatcccagcactttgggaggccgaggagggcggatcacaggtcaggagtttgagaccaggctggccaacatggtgaaaccccatctctaataaaaatacaaaaattagctggacatggtaacacgcgcctgtaatcccagctacttgggaggctgaggcaggagaatcacttgaacctgggaggtggaggtagcagtgagcagagattgtgccactgtactccagcctgggcaacagagtgagactttgtctaaaaaaacaaaacaaacagaaaaactcctctagaaccaggaatcccatttttgggtctatacacaaaaggacccaaagcagggactcaaacagatatttgttcactcatagcagcattattgacgatagccaaaatggtagaaacaacctaagtatccatggaccgatgcataaataaacaaaatactgtatatacatccaatggaaccttattcagccacaaaaaggaatgaaattctgacacacgctacaacatgggtaaaccttgaggacattactctaagataaaaagtcagacacaaaaggacaaatactatatgatttcatgtatataaggtacttagaacactccaattcttaaagacagaaattagaattgtggttgccaggagttggggtgaggagggaataggcaactaatgtttaatggaggcagtttcaattatgaaagatgaaaaagttctggagatggatggcgatgatggttgcacaataatgtgaatgtactgaatgccactgaacttaaaatgatgccacttaaaaatgatgaaaatgataacttttacattgtgtgtattttaccacaataaaaaaatattgcaaccccttaataattccccatccacccccaaaaaaccctttgggtgttggggccatttccagagaaagagcatcacacagattattctgcaaacactccacacagtcacgaggctccatgactccactgtggcaggggagggaagggccaggacactgggtttgatttcctgggccccactttctggccctgtgaccttcagcaagtggccagctgatctcagacccccagcctcctcttctataaaatggactaataatatctcagtgttctcatgaagaccagtcaggaaacgatttgaatgcttctggtacacgacaggtgctcaacattggtgttatagttatttatgatgttccctcagcctcgaatgttctggccccttctctacagagtaagctcctatttatccttcaaagacccctctgcttaaatcccatctcttctgtgaagctgtcatagtctgtagtatggttcaccagtaccggcttcccctccctgccagatgttgggcatggccatttgacttgaatgacttctaagagttgcttaattctttgccatgaatgacttctttccctctggcctggtcaccagtgctgctccagatggtagatgctctggccacctggctcccaggcgcaaagccccagccaactcacagtgcacaggctgcatgagtaaggaacaaacctcagctatttaaacctctgacatgtggggttgcttgtgaccccagtataacccagtttagggccactccaagtgtgatcttcctactgccaggatcagcagccctgggagcatgttggagatgcacaccttggaccccaccccagacctaatgaaccagcctctccattttctcataatttggtgcatgctgagcatggc

SEQ ID NO: 96946 - DNA, 40441 bp, Homo sapiens
actcgtgtctactaaaaatacaaaaaaattagccgggtgtggtggcgggcgcctgtagtcccagctactcgggaggctgaggcaggagaatggcgtgaacccaggaggcggaccttgcagtgagccgagatcacaccactgcactccagcctgagtgacaaagcgagactccgtctcaaaaaaaaaggccgggcccaatggctcatgccataatctcagcactttggaaggctgaggtgggcagatcacctgaggttgggagtttgagaccagcctgaccaacatggagaaaccccatctctactaaaaatacaaaattagccaagtgtggtggcgcatgcctgtaatcccagctactcgggaggctgaggcaggagaatcgcttgaacccaggaggcagaggttgtggtgagctgagaccgagccattgcactccagcccgggcaacaagagtgaaactccgtctcaaaaaacaaaaaaacaaggtcaggcatggtggctcacacctgtaatccgagcactttgggaggccaaggcgggcggattaccttaggtcaggggttcaagaccagcctggccaacatggtgaaacctcgtctctactaaaaatacaaaaattagccgagtgtggtggcgggtgcctataatccctgctactcaggaggctgaggcaggagaatcacttgaacatgggaggcagagggtgcagtgagccgagactgtgccattgcactccagcctgggcgacaagagtgaaacaccatctcaaaaaacaaaaacaaaacactatgctaagtgtggtggctcatgcttataaccccaggactttgggaggccaaggtgggaggattgcttgagcccaagagtttgagtctgcagtgagctatgattacagcactgcactccagcctggacaacaaagcaagtccctgtctctaaaaagaaagaagggagggagggagggaaagaaggagagaaagaaagagaatggaagaaagaaaaggaaaaggggaggggaggggaagggaggagaggggaggagaggaagaagaaagaaaaaataaataaaacaagtataggccgggtgcggtggctcacacctgtaattacagcactttgggaggccaaggtgggaggattgcttgagctcaggaattggagaccaacctgggcaacatagtgagacctcatctctgataaacatttaaaagaattagccaggcatggtggcacacgcctgtagtcccagcactcaggaggctgaggcaggaggattgcttgagcccaggaatttgaggctgcagtgagctataattgggtcactgcactccagcctgggtgacagagtgagactgtctcaaaaaagaagaagaaaaaaaacggtttggattttattcagtggaaaagttttaaggcagagagtgacatgaccagccttttttccttcaactttttttattatggaaaatttcaaacaaacacagtagagaaaatagtatcatgaaccccatgtacccttttcagtcagcttcaataattatcattgtatggataatcttttcatctctatacccatctagccccctatttctcaaattcttttgaagtacatctcaaaccttatattatttcgtatgatcatctctcacagttctgtgcagaatatattgttgggggatgggaatggaagcagagacggggggaagagaccattgcaacagtccaggaaggggaagatgacctgaaatatatggtggtaggagtgggaatgatgaggagtggtcaaattcaggtacacagtattttagatgtaaaactgacaggaactgctgatggattagatgtgggaggtgagggaaagtgagacataccatgtttttggtcttagcaactgggcatttgagtgcttttcattgagaggaggaaggttggggaggagatgttgagtggagcccagagaggaaccagggctggatatatagatttgggagtcatcagcttattgacagcatggtactgggtgagatcacctaagaagagatgaagacagagaagataaagggccccaggcctaagccctaacatactccatttcttagagatcaggagggcaatcatcattcagcctgtggggtttggaagtgacgagcagtgttctcaaacagctctgcacactcctatttacaaggatattagtccttttgagatggggagacaaatgaagtaaacagaggttctctcccctggatccttgcattgacctaaatgaatcctatctgtcatataacctgagtagccaaggccttcctctttaacaactctgcttgctaaatattaccttctctaactatgaggtataaagcaagcttgtccaacctgcggcctaggatggctttgaagcagtccaacacaaattcataaactttcttaaaacgttgagattaggccgggcacaatggctcacacctgtaatcccagcactttgggaggccgaggcgggtggatcacctgaggtcaggagttcaagaccagcctggctaacatggcaaaaccccgtctctactaaaaatacaaaattggccgggcgtggtagtgggtgcctgtaatcccagctactcgggaggctgaggcaggagaatcacttgaacccgggaggtggaggttgcagtgagccgagatcgtgccattgcactccagcctgggtgacaagagtgaaacggtctcaataaatacataaataaaataaaatattatgagattttttgcaattttttttttgagacggagtttctctcttgtcacccaagctggagtgcaatggcgcgatttcgactcactgcaacctcctcctcccgggttcaagtgattctcctgcctcagcctcccgagtagctgggattacaggtgcccgccaccacgcctggctaattttttgtgattttagtagagacggggtttcaacatgttggccaggctggtcttggactccagacctcaggtgatccacccacatcagcctcccaaagtgctgggattacaggcatgagccaccacgcccggccagtgttagtgtactttatgtgtggcccaagacaatttttcttcttccaatgtggcccaggaagccaaaagattggacatccccgatatagagcttaaactcagtgagatctgagggtcaaactatagccaatctccaccctcaacccagcttcaatttcctttcaaagcagaggccttaccaccttcttcagctaaagtggttaagagaggacatggcccgagggaacctgggcagctttatagtcccatggaaagatggcccctgaatccttgggatgagtagactgctgtaagggaagagccagacccgagcctaccttgtcctcacctcaggtgttccagggtggtcagccgatctccacccccaaggttgccttcccagagcctcagacccatgccccagcgttatggagatgtcttctggaagaaccttaatcaaaggcccacgtgagtagaggagaaaatggaaactaactggatgtggtcttaactggattaaactaccataaacccatatagcaataggccctagtctggggttaatttcccactggctggtggacattgtagctcctaatgacagaaaggaggtcgggagagattattaaagaagcaatatggatggacatgtcccctctgcacttatagccccctttttgttcttcacagccccacttggctggaggagcagcacattccacccatgctggtaagacagaccctctgccgtttaacatttctctgttaaaattgcacccactgctgtcctgtcccaagctctccttattaccgcttccctctgttattccccaaccagtgcactgaccaggccttcctttctatgaatcagtcatcatgttttcgagatcacaggggtcttcccaagaccccagactccctacctagttcaatccaagctcccttgagagagccagttcttctttctagctctttttccccattctctggcacagagagccactggttgctcccagcttggtctgtatcctcctgagcagctcccaccccctgaaatgctttggagaagaaagaagaggaggccatgtttggaaggaatgcagcagcagggccttgggggagtccccgcccgggtgagggctgtcacttaccacctggaggacctaagaaggcgtcagagcatcatcaacgagtaaggaagggagacatctgggttctgggagtcatgcaggatttgggggcagaacagtttgagctaaggaaggggttgacagctttgaggggaggtttgaggggagctttgaggggaggttgcttggaaggaagctgtgggctttggtgtgattgaaacagatttctgtaatatggaaagaaggagggaactgcagtaaggaggatgagccacatgagctggaaggagtggaaactagatcactgaagacaggaaagcaaaccatagaactggaggacagtggggaggttggggtcacctctgggttcctagacaatatgcttcagtctgaggggagcagaaaattgggagtggagggttaaaggtcaaatgacaactccctggagtcccagcaggaagtatttcagaacagaaaggtgaagaatggagagacaggaagcctggcctccaggcacttctctcctcagcctaaagtctccacagactgaagaaggcccagtggggcagctctggggctgcatctgagccagtggtgcttggcgaagagggctgtggattccccagcaccaatgaataccctgatctggaagaggagagagcaacctatccacaggaagaggaccgttttctcactcctggcagggcccaggtattgttggagtggaactgggtggagtgagggagtgatgtgggtctctggtcttgcatggagatgcagaagctgagagccaggctggagagctggatttgagagaaacaaaaataacgtaggtgagaaccagagacttcgaggtacctaagcttgggtactaggaaatctggaaagaagacctacttttccattttctttttcaatttctctcatcttgacagctgctttggtctccctggagccccctggatcaggaggaggcttgtgcctccaggcagctgcactctctggcctcgttcagcactgtcacagccagaaggaacccccttcacaatccctgggggatggagttggcagcgtctgaagagtaaggagaaaccaccgatgccgagaggctagtggtgccccagggacccaagactagttccgtcactagagtcaccctcattgctgacatgaaggcgtttccccttccttcgtctctccaactgcctttcccatcctctgaactaggcattaacagcccccgtgggctcccatctcaacccaccgctctcacaggagcaccccaagtcctgttttcctccaggccccgctcctggccttgtattctctctgctctgttattaaaaagcaagcaagtggagcccgagttgtctttcttcttgggatgcagcgatggagaggccaatggggaaggagggctcctttcgctttctcgaggacccagctacaatgaagtcgggctgggtccccagacaaggagtcttgtccgaggcgagaagggtcctgctcccagtccagcgttcctcgcccggcccctcgggttccagcactggtgggctgcccccgccccgttctctcgaactgggagtcagtcggccgagcttccgcctccaggaccctggaatcctgcccctcagtgctgctgcccttttggggacttcccagcagtctgtccctcggcctggctcagagccctagaagccgagtccctctgcccagcgccccacccagaactccacgtgtgctgaccccaggttcccttcctgaccctcatccccttaattgggaggccccgccccgtgcgcagtgacgttagacgccgctgtcagccggcgctggggggggtcggtgtggggtagaatggccgctgccgccgtcacccgcggraccccgggaggtaagagccagggcctctcgcccgcctctccgcccccgcgccagrgggcgcagctcctccaggtcccgacgcggagcgccgcgccagggaccaccgtccctcttcccggttcgccctcacctcccgcttccgtcctcctcccccgcgccagggggcgccgctcaccgcagggccccacggcggaccagcgcgtgccggggactgtcccggagacccccgcacccggcacctgcactgtccctcgcccaccgcgtgcccgcggactctgctcccggcttctccagaacatccctctatgcgggcgggaccctcccacctcggaggttctcctgggaccaccactccgccggggggccgcccagagtgccaagcgtccgatccggcgccgcccaagtgcagcccaaggacccgctcccgctccgcaccctggcaggctgcctagccaggactgcgcacctgcgccctggggcggagtccttaccccaaccccagcttcactgcacatagccgagcccgacgggcctcctcccatctccatcctggacacctggcggagcccgtgctgagagcctccgccagctcccatctgttccccgaggagggcggggggctcaggctggagccagagcggtagatggggtaggctaggcctggaggccaggggaggcagaggcgtttggggagagggagctacgtagagagggctgtcagccggagggtgggttgtcctgagggtgggaatctgggtgtctggcccagattctatcaggtcctaaccaacctggaggagagaataggttaggttcagttatcagatctgcccttccccttggaaaaatcaaacagagaaggaactcagggcgtgtcttctaaaggcctagcttctaccggaggtagaatctcctgccctgcccccaggatccaggctctcttgccaaaccatcctccaaggaccggatggcctgagtcccaacccccaggacctgacccaaccatagccccagtctgtgcaaaagctcaaggtttagggcctctgaggcccaagccctgccagtcttctccccgctccccmaccccaacccatttcttcctgctcactcttcctgtcyagtctgctcactcatattggctccgggcactgtgtgttgttctctcttctactgtcacatcacagtcagcccctccctccctttcctcatccttcccagatactatgacccagttctatacccactccctacctcatacttctcatcctggattaatgtgggggcttctgccatgaccttgttctctcccttcccagcacagactccccctccccccggcccctcaggccgggggtgaccttgccccctggagccctcaccatgaataccaaggacaccaccgaggttgctggtaagttcacaaaccaggttcccaatgtggccacagcctttcgttctccccacgctttagtggccctctaattcttggattttctgttctccttagtgaggtttcagttttccccagtgctctgtattgccttcagccctttccccttggactatcacagggatgccccagggtagcacactaaaccctcccttctaattccctttagaaaacagccaccacctgaagatctttctccccaagaagctgctggagtgtcttcctcgctgcccgctgctgcctccagagaggctacggtggaatacaaatgaggttttctagggaggctgggggttggggcccagcaagacctagtaggctggaggagggtgagtggggggtctttccgtgtctgtcaacactcctaagtgcagagcaccattctaagctctttggggatcctaggagaggtataaaaacatggatcttggccgggcatggtggctcatgcctgtaatcccagcactttgggaggctgaggcgggtggatcatctgaggtcaggagttcaagaccagcctggcaaacatggtggaaccccgtctctactaaaaatacaaaaagcagccaggcgtggtgatgtacgcctgtaatcccagctactcgagaggctgaggcgggagaattacttgagccagggaggcggaggctgcagtgagctgagatcacgccactgcactccagcctgggtgacagagtgagactccgtctcaaaaacaaaaacaaaaagacatggatcttgaaggagccctcttttctgtggcatagccacctgggtaaaaacaaaagctactgccagtaaagtattccttacatactgggcaccgtgctaaacatttggcctgccttgtctcatttaatcctctaacggttctatagagcaagccctgttattgctcctatgttattgatgaggaaactgatttacctcatagtttatctaacttactccagggcctttttttttgagacggagtctcgctcttgttgcccaggctggagtacaatggcgcgatcttggctcactgcaacccccgcctcctggattcaagtgattcccctgcctcagcctcccaagtagctgggattacaggcatgtgcctccacgcccggctaatttttgtttgttttttttttgagatggagtctcgctctgtcgcccaggctggagtgcagtggcgcgatctcggctcactgcaagctctgcctcccaggtttacgccattctcctgcctcagcctccggagtagctgggactacaggcacgccaccacacctggctaatttttgtatttttagtagagatggggtttcactatgttggccaggctggtctcgaactctagacctagtgatccgcccatctcggcctcctacagtgctaggattacaggcatgagccaccacgcccggctggaacctttgttattaaccaccactgatactggctctttctggaggaggcacagtccttgtgttacacattttctgtattctgcatacttactgccttgtatgtagttggttgttgatatttatcaatttgatgtcagaagaggactgtcagtaaaacgatgcgtgtatgtgtgtatgtgtgattgttgtaagtgctatagagcgtttaggaaggtccagtgtggtcagcagggcttcatggagcatctgaaaaggggtttggtttatagaatggctatgatttccagatatggagaggtgtgcacatggtacctgccttgtagggcactaacatgcaggaggtaactattcaaagcatgttcaggaaggaatcaatggatccatctggcaggaattgtaggagcaatatgggtaaatagtgggaacagtgaaagtttgatcccttgttgggaagaaccttggagtcaggctaaagaatctgaaactcctgccaggcacagtggctcacgcctgtaatcccagcactttgggaggctgaggcgggtggatcacgaggtcgggagatcaagaccatcctagctaacacagtgaaaccccgtctctactaaaaatacaaaaaattagccgggcgtggtcgtgggcgcctgtagtcccagctactcaggaggctgaggcaggagaatggcatgaacccaggaggaagagcttgcagtgagccgagatggcgccactgcactccagcctgggtgacagagcgagactctgtctcaaaaaaataaataaataaataaataatctgaaattcctggcagtgtcaaaccactgaaattttttgagtcaggaaggggcacagaggccaggagtggtggctcatgcctgtaatcccagcactttgagaggctgaggtaggcggatcaccagaggtcaggagttcaagaccagcatggccaacatggtgaaaccccgtttctactaaaaatacaaaaattagctgggcacggtggcaagtgcctgtaatcgcagctactctggaggctgaggtaagagaattgcttgatcctggggggcggaggttgcagtgagctgagatcatgccattgcactccagcctgggtgacagagtaagattctgcctcaaaagaaaaaaaaaaaagtctgggcacggtggctcacgcctgtaatcccagcactttgggaggccaaggcgggtggatcacctgaggtcaggagttcgagaccagccttaccaacatggtgaaaycctgtctctactaaaaaaaatacaaaattacccgggcatggtggcgcatgcctgtaatcccagctacccgggaggctgaggcaggagaattgcttgaacccgggaggcagaggttgcagtgagctgagatcgcgccattgcactccagcctgggcaacaagagtgaaactccatctcaaaagaaaaaaaaaggggcacaggaatgagatttttggagagtaaaataattcacaaaaaaatgttagacttttgtcttaggacaaaagaagggttcttaggagggcagtgggtcttgctgggtccagatacctagaagcatcctccactagctgccagaactcagcagagagtgagacactgacaggatgaccaagaggccaggctgagactctctgtgaaggagatgcccagctgagtgcctcctctcctacaggagattgcatcctacctgatcacctttgagaagcatgatgagtggctgtcttgtgccccaaagacaaggtgagaaagtttgagaacatgggggagtrgcaggggtcctgggttctgttcacagaactccagggcaacccttcccttcccaggcctcagaatggctccatcatcctctacaatcgcaagaaggtgaaatatcggaaggatggttacctctggaagaagcggaaggatgggaagaccacccgagaggaccacatgaagctgaaggtccagggcatggaggtaagagagtcagayattcagctcatcttcccgagcctgccctcctccacccttagctgggctctagccygacctgggcttggtggcattgtccacctcagtcccctcccagttactcttcccttctcactcactttgggtcggctgacattgctttggccactctccacttcccatttccctccgtgactcaactatccaggccgtaggccatgcctcccttccagaacactgatgcccaggcccctcactgctcttgtgtttccctcagggatcccagcaatgatgctctcagcacaggtttctcttccccaaatcattgcccctcatctcagatgcattcttgctctgccctctggtttctagatagtcccgtatctcaaatctggtcctcactataaggccccagccccactgctcatctatgactcagggtggctgggattcaaaaggggtggggaataggtgggggygagggtgggggaagggttgaagaggaactggtggaaagattgggattcctgcaaagggactgaacagaggaagagttggggagcagactagccctccccccaccccagcctgtctcctggcagtgtctctatggctgctacgttcactcttccatcgtccccacattccatcggcgctgctactggctgctccaggtaaggacggaagagcccagggagccaccctcttcctgactctttgagggacacgggtctgaaagaaggaagtgaaaggatggctgagttctgagtgaggaaaggagcctgggaagaagagaaaggggcttggggatggagagagtcagaaattgggggcgaggttaggagggtgcccaggaagaaagtgaggattaggaagccaagcccctggacctcaggaccccatggctctgtgtgtccccttatactctcagaaccctgacatcgtccttgtgcactacctgaacgtcccagccctggaggactgtggaaagggctgcagccccatcttttgttccatcagcagcgaccgtcgagagtggctgaagtggtcccgggaggagttgttgggacagctgaagcccatgtgtaaggcagcagggtggggatagagctccaaggggagagtagaaacagggctcccagaggggccatggttctggacccaaagcctgagggctgatcatctccctccaagctgggagggtgctaggattcccggtgtgttctcaggtattagaatacggagaaaggactaaagcaacatatctgagcagtcttgaggctgctggcctctgttcacctggccagaagtcttgaagcatgtcaggtgcttggaggagccatcaaggtactctggggcctgtttcgtggggatcccacagcacttccccctaacttctctagttcatggcatcaagtggagctgcgggaatggaacagaagagttctctgtagaacacctggtgcagcagattttggacacccacccaaccaagcctgctccccgaacccacgcctgtctctgcagtggggggcttggtaagttactccctgaccttttggctgtcttcccacctagccacactgctcttacgcaagccagggggatatccatcttgatgggatttgcatgctgatttgcaagtcttttgcatgtcccagaaagatgggccagatgaacagacgttcccatctgggtgcacactggctcggaatcagccttgcactcagctgtcatggcagcctctgcccttcctgtcttctaccttcagcaattcctgtcccctcagcaccaccagtgacacccagccttagccttcctcctagttggcacccccttggttctgttcttttgtccttttcctatgcctttaacttttgcttttagctactctcccaagccctcagttctctggagcgttcctctggtcctgcttgttttgaggggaaatggagagggggagggggaataaagggtaggggtagagaacagacatttctgatgcctcccagtggctacaatcagtattacacctctggtttatagggacgtcccaggaaatacttttaagggcctcaaggtagagaaggtgcggaatgatgtgtcttatctcctctccctcctactcctctccactccaggttctgggagccttacccacaaatgcagcagcacgaaacaccgcatcatctctcccaaagtggagccccgagctttaaccctgacctctatcccccacsctcaccccccagagcctcctccactgatagccccacttcccccagagctccccaaggcacacacctccccatcttcttcctcttcttcctcctcatcaggttttgcagagcccctagaaatcagacctagccctcccacttctcgagggggttcttcaagaggaggcactgctatcctcctcctgacaggactggagcagcgggctggaggcttgacgcccaccaggcacttggctccacaggctgatcctaggccttccatgaktttggcagtggttgtaggcactgagccttctgccccaccagctcctcccagtcctgcctttgaccctgatcgttttctcaacagcccccagaggggccagacatatggaggggggcagggagtaagcccagacttccccgaggcagaggccgctcataccccctgttctgccctagagcctgctgctgccctggagccccaggcagctgctcggggtcccccaccacagtcagtagcaggtgggagaagaggaaactgcttcttcatccaagatgatgacagtggggaggagctcaagggtcacggggctgccccacccataccttcaccccctccctcacccccaccctcacctgcccccttggagccgtcaagcagggtaggaagaggagaggccttgtttggaggacctgttggggccagtgaactggagcccttcagtctttcatcattcccagaccttatgggagaactcatcagtgacgaagctccaagcatccctgctccgaccccccagctgtctcctgctcttagcaccatcacagacttctccccagagtggtcctacccagaggtgagactcaggcttacctcctccctyctccctcctatttgtcttctgactccccaaaacaaattgtattaactcttaccccgtggtctgtgacctagtttccctcagttttcatggcttcttaggcttcttagtcctctacctaatctctctcttttttttttttttttttttttgagacagtttcgctcttgttgcccaggctggagtgcaatggcacaatcttggctcactgcaacctccgcctcccgggttcaaacgattctcctgcctcagcctcctgagtagctgggattacaggtgaccgccaccacgcccggctaatttttgtatttttagtagagatggggtttcaccatgttggccaggatggtctcaaacttctgacctcaggtgattgcctgcctcggcctcccaaagtgctgggattacaggtgtgagccaccgtgcccagccgccaatctctttttttatgtagagtgaagctgctttcctgtttccagagtcctcagcaacttaaccttttttctgttcctctcccttccatgtgttagcatggtttctggagtctcctaggacctcattcccttcctgactgttttcaggggtagggaattggggctgtgcagcctggagaagaaaagaaacatcagggatgtgattgcagactttgagtagctgaaagactgtcttcagcagtggagaagttctgttttatgctgcctttgagaggaaaaggaggaagtacagtgggggtgaattagcccaagaacagaacttccttctggtgacagctctgtggtagctttgggggaggccctgaattcccagctactggcagattcaggtagagaccaggcaaccacttggcaggaatgttggggagagatagactcactgacctcaccccactgggtcctgtctatccctggacccccagactctagcayaggacctgccatatagtagataccctgtaagggtctgaataaatgaatgagtgaggggatgaacgcccaactccagtcacatggtctctgacttctgtctgcagggtggggtcaaggtgctcatcacaggtccttggaccgaagccgccgagcattactcctgtgtctttgatcacatcgcagtgccagcctcacttgtccagcctggtgtcttacgctgctactgtcccggtatgaggattgggaaccgtagsgggagggactgacatgtgggcagttaggacagatcaggacctccaggcttccagaaagcactgggaacaaatgggttgttttgagagcacaaggacttcatccagtcctgaggttgagccccaagctctcccagcaggcagaagagcccagacttaggtgtcagaagatcgaggttctggtccaagaagtctactccttagctaaccagtgacctcagatgagtctgatccttcctgaggtccttggcctcctctcctgtaaggttaggcattgaccaaagggatttctaatgtctgtccaggctttctggcttagagccagagtctccaactccaatccarggggaatgagaaagaagaaatgtgggtttcctctaaccagtcttgggactgaaggacattggcttttagaactgtgctgtccagtatggtagccattagccacatgtgcctattaattaaagttaaagaatacttaaaattcacttccccagtctcactgaccatgtttcaagtgttcagtagccacacatggctcgtgttaccctattggatagtgacgatatagaacattcttgtcactgcagaaatgttctattggacagcactggtctagacttcattgccaaggttcatctctgcccttttgccaccagctttgcccttaccctacactcaaaaatcagccttactaggggacctcaaggaccaccaaagtgacaggttggcagctttgctgtctacgagtgtgttctcccccagtctctacagcagcatccagcatgtgtgtaaggaaaggggatgagaccagagaatctggggactgggagaaaaagtctcagcacctggtcttaggatcagggcctgctggttccatgcttayggccactggacactgttcatgarcggctagctcccctttcctccatctcagtaacagggtcataacttccagactctgatccggggatcaagaggattttccaacatcaaattgttcataactagtctcttgaccctcagtttccaaaccttcttgctgaataacaaatatcttcaactacagggtctagaatccaagggatctctggcccatagtacgtattaagttctcaaacaaatggactcccttcccagttagtgccaaggccactgaagccaggggcctcttggcccacagcagggcagtaggggaaataactatggaataattgtctgtggctgacacaggtagccagaraaggagccagggaaagagagcccttctcgctgatcctaccctctccagcccatgaggtagggctggtgtctttgcaggtggcagggcgggaggggcccctttctgcttctgtgctctttgagtatcgagcccgccgattcctgtctctgcctagtactcaacttgactggctgtcactggacggtgagtacccagccctctgaacccaagtatccrgcccacagcctttaagcatgacatgctcctagaccactcagggttcaggtggccatcactgagcccccactttaccatttttttttttcaattcctatttcattagtgatttctaaatgtggcagcaaacttcccttacctcctcttccccataaatcttggggtcatttttataccagttcttgacctgccttctccatcccaaagggtggaatctagacaaggaaggctaagaggcagggcagggacagggtctagagcaatatataggtgctatgcacaagtttatgtacttatttattatttatttttctcttcttttttgagacggagtcttgctctgtctcccaggctgaactgcagtggcgcgatctcaggtcactgcaacctccacctcctgggttcaagcaatcctcctgcctcagcctcccaagtagctgggattacaggtgcctgccaccaagcctggctaattttttgtgattttagtagagatgaggtttcgccatgttggccaggctggtctcaaactcctgacctcaagcaatccaccccgccttggtctaccaaagtgttgggattacaggcgtgagccaccacacccggctgtacttatatatttaaatttctattgtttttccttttctgatataaagacgtgttcattaacagaaatttggaaattacacaaaagcacaaaatagaaaataaaaatttctggctgggcgcggtggctcgtgcttctaatcccagcactttgggaggccaaggcgggtggatcacctgaggtcaggagtttgagaccagcctggcaaatatggtgaaaccctgtctccactaaaaatacaaaaattagccaggcgtggtggtgggtgcctgtagtcccagctactcaggaggctgagacaggagaattgcttgaacccgagaggcggaagttgcaatgagccaagattgtgccactgcactccagcctgggcgacagagcgagactccgtctcaaaaaaaaagaaaaaaatttcctatactactacttctcagtgatatccattgctaataacatggtgtactaacacaaacatagaggcacatacatacgtgtatctatgtgtgtgtgtatttatttatttaaatctgggattgtttttgttcctgttactggttctctctcttgtggccttgaacattgtttctgtctgcacctgctgctttctgctttctcaaggttagcttttctctatctcttcctcttggtgtctttgttgttgcctcttggcttctctcagttctgctgccatctgtgttatcttagtctccctctgtccttacttctctctctccggagctctggtccttagtttygcctcactcttggagctggaccccacacaaagccygagtgtgttgggttgcttgtctctgacttgagtctgcctaccttgggatctggccaggcctctcagtcctgttctgtctctgtcctgccctgtgactgttcatcaccttatttctctgtccctgtctaatctacgttttaccgtctctcctatgagtctcttccatccctcttctttccatttcttcttgaaccaatatcttaacttgcctgtcttttatcgtcctttcttactgcttgtttggcacttttcccccagccctcctttgtcctttctctcctctccttcactttatcttttttgctctctctcctccctttgttttccttgggtttctgttcatcattctctgtcctcctatcacctgtgtaccttcatccccttctatcctggcatctcagaacatctccaaccttcaccgtttgtgtctgttttcctacagctctgatcccctcctgcctccccttcttgtccttgtttgatctcaggaggggacagatatagcttggggggatatgtgtgtacgtgcgtatttgtatatggggcggggaggaggaggaggagaaatggacatggctatatggctatccatctctgtcaccttccgtcccccaccatcgtctttgtggacagctgcggggggctgggaggaaggggaggtacttttcaaatcacagtccctgagctttttggggcagtggttattaaaagggagggaccctggaatccttcaccttcaccatgggggacaaaggtagtgtctgctgcaaaaattgacagaacattttgcctaggaaaaggctggggggaagagtgtgtacgggtgggatttgggacatctggaggctggatgaccatttgggaatcctactacctctgtaccttgaaggaaacagttttggttccagatctgggttctagatcagtgggtagtattaacagccctagtttaaggactgagtcctggtgggctttatttaggtgaaggggtaaaggagctgttgttttggggaagataaaagaatatggttctgtgtcytcatccccagatcttgggacaggtctacttttggtgttcagggcatcacctagactgcccactcagcctcccatacccgttccccctcagacaaccagttccggatgtccatactagagcgactggagcagatggagaagcggatggcagagatcgcagcagctgggcaggtgccttgccagggtcctgatgctcctccagttcaggtacttctgtgaggagggaggtggtctacggtggggagcagggggaggacacagctaaagaaaacatctagtgcccatgactctcctccctctcctgtccccagcctcctcagcctgtcttccctctccctgacgtcaccctgttcccatccccaccttgtggcaagagtggctattctgggcaccctcttggcatgacgggcttcagactatttctggtctgaagaagggtggaggtgaaggagagggcgggggaggggtcaggagcactggggctcagatctctgtgggtcccaagtttctgaaagaagagggctaaggctcagagaaggctctggcttctgagggggagaagccatgtgtgaacatggcactaatctgagctgatgggaaggcacatgggcaagattgtgtgaggtctggctgctggaggaagtggctgtgggagcaagagacacaggccacagaggaacttcaactgatgggatcctagagtgggacatgtggggagggggcaaaattagaagctgggaggacagatgtgaggtggccaaggccayctcaagccaggggagtagatacctgggtctctgcctaagagtgtgtatatcgcaggatgaaggccaggggcctgggttcgaagcacgggtagtggtcttggtagaaagcatgatcccacgctccacctggaagggtcctgaacgtctggcccatggaagccccttccggggcatgagccttctgcacctggctgctgcccagggctatgcccgcctcatcgagaccctgagccagtggcggtgagcaagggcagctgggtgagggctgggcagcctctgggacagaagtgtcaggggactgaagaggaattggaggacctggggccctaccaagagggagttggggtcattgtgggaagggagggggttgggagaggacttatattttggggaactttcatatcctgacttacaacactttgacttcttgacctccttaagctagtgtccttgactgcctcttcccaccggccctgtacagcttgcctcctagtgcctttacttctgatgttcctgctttgcccactttttccctcattgggctctgctgtctctctcccaaaccctccaggagtgtggagactggaagcttggacttagagcaggaggttgacccgctcaacgtggatcatttctcttgcacccctctggtgaggatgacggattcctgagcrcatatggggcagggagcaatgggaacagcccttgaaaaggaagatcctgaggaatgcagggagtggggtgggctggggcctgaagacctgactacctggaggaagagcccctggcctcrcctccacctcygtctccgcctgtcccgcccccttcctcagatgtgggcttgtgccctgggacacctggaagctgctgtgctccttttccgttggaaccgacaggcactgagcattcccgactctctgggccgtctgccattgtctgtggctcattcccggggtcatgtgcgccttgcccgctgccttgaggaactacagagacaggagccttcggtggagcccccatttgccctatcgccaccctcctccagcccagacactggtyagggtggccctaatcttttggagagagggatgtaggtaggaggataggccaggacaaagccaaagggtgtgggaaacgagtaagagaggagacaaaccacagaggcagggatgggagataacagaagcaagaacagacggggaccgagaacaggatggggaaggcaggagacttgagcgagggatggccgtggctccggctgccctcactctcttccctccccacacaggtctgagcagcgtctcctcgccctcggagctgtcggatggcaccttttccgtcacgtcagcctattctagtgccccagatggcagtcccccccctgcacctctgccagcctctgagatgactatggaggacatggccccaggccagctttcctctggtgtcccagaagcccccctactcctcatggactatgaggctaccaacyccaaggggcccctctcctcccttcctgccctcccaccagcttcagatgatggggctgctccrgaggacgmtgacagcccacaggctgtggatgtgatcccggtactgcttatattgatggagttatgggggctagaagtggagtaggaagggtgaggccgacttccatgaagcagaatcaaagtctggcttcagtttaggaagggcctatttacttcattttgggacaggcaaggtagccttttgcttagctccttttagaccatgtgacttggaagtcatgaggcagcggaggttgaaaattctggctggtcccacaatacagatgttggaaaaaaaaaatttggccgggcttggtggcttacgcctgtaatcccagcactttgggtggccagggcgggtggatcacttcaggccaggagtttgagaccagcctgggcaacatggcgaaaccccctctctacaagaaatacaaaaattaactgggcactgtggtatgtgcctgtaatcccagctgtttgagaggctgagacacaagaatcacttgaacccaggaggcacaggctgcagtgagccgagactgcaccactgcactccagcctgggtgacagactgagactgtctcaaaaaaaaaaaaaaaaaagacaaaatagtaagatttaaaatataaaaagcattaaaaaatattctggctgggtgcggtggctcacccctgtaatcccatcactttcagagaacgaggtgggaggatcacttgagaacaggggcttgagaccagtctggccaacataacaagaccccatctctacacaaaataattttttaaaaataggcatggtggcacacacctgtagttgtagctacttgggaggctgaggtaggagaaccccttgagcccaggaatatgaggttgcagtgagctgactgtgccattgcattccagcctggacaagagaccctgtctctataacaaaaattctagggaatatcttcagttagagctggtttgtaggagttaaccgttgatctatgtagggacaaggttctaggagaaccaagatgacggagggcagctgggagttgtgtggagaggtaaggctggcaagatgagggtatttggcagtgatctgatgcaggaaggaggcttgcacatgataaagctaagaaagtcttgtggaatgaaagtgaatcttcaagtatagccttgtacttctctgatagagactggggacatacctgctttagagagactaatggagtaagtgggtggcactttaagtacaaaaaacttagggaactccacaagtaggttgtgttgagtgtgtccagcaggaagtgctggagtataggcttcagggctggagcaaaggccagactggagccattcatccgggtagtagttggcaagtgttggratggttcttggagagttgaaagggagctgggggtgggcacagcyaagcctatggggagcatgtgctggtcagctggcatggggcaggcccaggtaggacagtggatggttggcctgaaagggtgtcaagtcctccatttgttcagctttgaatccccacttggagtatctcctttttatcctatattctccatagcatctcagcacagagggacccccaagtgggagccccatcagtataaatgaatgagtctggaacagtggcccagaaagacagggttagcagcacctggcagggagagaaggaacaagataggaatggactgaggttacagctggcagctggggcccctaaggactcactcagcttctcccttcttccaggtggacatgatctcactagccaagcagatcatcgaagccacaccggagcggattaaacgagaggacttcgtggggctgcccgaggctggagcctcaatgcgggagcggacaggggctgtggggctcagtgagaccatgtcctggctggccagctacctggagaatgtggaccatttccccagctcaacccctcccaggtgactagctcaggacaaagcctccagattcttcaaaggaagatgggaggaagggagaaagctggctttcccacagccaaagctccattctggctgaggccccagggccttggagaagcgaactgaactggctgatgaactctgaagtcactctccagactcagttgctggtggttttccttcgtagccatccataggtggcagaggagggacttcagatgcttcatgacaccctctttccctaccgcctacagcgaactgccctttgagcgaggtcgcctggctgtcccttcagcaccctcctgggcagagtttctctctgcatccaccagtggcaagatggaaagtgattttgccctgctgacactatcagatcacgagcagcgggaactgtatgaggctgcccgagtcatccagacggccttccgaaagtacaaggtcaggggcaggggtctcaggatgaattacacaatctccagtcargggagactgggctcccagggcttttggaggatgagtagtcgtgcagacaggccttggatggggtaaagggtcaggggaaccccaggaaagttgaagggacaagtcagatatgccattatgtgggtcatgaggtggtgagacttctctcccttcagggccggcggctgaaggagcagcaggaggtagcagcagctgtaatccagcgctgttaccggaagtacaagcaggtgagacccttctccctcaaaagtgtaaccagcaacccaccaacccacacccacgcctaaccattccagaatgttgccagagccctaactccccttctctctccacaagctgacctggattgcacttaaggtattaggcatgagctctgagtgtgaggtctgtgatgattcagtctttccttgagtgtgtgggttacagagagtcttgcatcagcctaacttgggtgagcctcagggctttgggtctccgtccctctatttcagcccctgtccctcctccccacccctgcagtttgcactctataagaagatgacccaggcggccatcctgatccagagcaagttccgaagctactatgaacagaagcgatttcagcagagccgccgagcrgctgtgctcatccagcagcactaccgctcctaccgccgcaggcccggccctccccaccggacttcggccaccctgcctgcccgcaacaagtagggcccarccccagccctctgtgcccacccactgcatccacgccattcccccttactcatcctcttgatcatcatgcctcactgccattccctgcctagggttcctgggggggccgaaggcatgcgatgccttctgtgaggtccatcttttgtttctttcaccagaggctcctttctcaccaagaagcaggaccaggcagcccggaagatcatgagattcctgcggcgctgccgacacaggtactcatcccttctccccctgggcttttgcgttgccacccgtcgtgatccgccagtctcctctgactcctatctttctctctgcaggatgagggaactgaagcagaaccaggagctggaagggcttccccagccgggactggccacatgacctggccaccgcctttctcaccaccctgggggcgcctcgtgcagtcttaacagggagagggctttctggggcagggggagcccctgtcggcagctttcctgttcacctttgttggagccctctgtaggcctcctccctcctccccacgccttgctcccacacccctctcctcgtccctcctggtcgtgccccgtctcttttggtcctggctccagaaaacccgcgccccacatacctgcatcttccgctgtgacctccggagccctgcctgcccctgctccccagctcctcctgcctgcacccgactcggccccctcmtgacttgccttatttatttgttcgacgcgtctctgaatgtatccgcctcggttcccaccactgccttcgctgcgcacgcycctcgtgtttcagggctgaccgtgtccccacccgactccgcatgtttgcgtctgtttcctccctctctggccctgtcttaccccatcacccgactctggccactgacctcagggccgaaggggaggtggtgtacrtaggaacgcgttgcggagtccgccccgtcccccgaggggaggggtcttgtacatactgtaacatacagagtatagtgaagaatctatttaaggcgccgcggggagggctgcacggccgggcttgtggttctctagcgcggcgggggcctcctgccggctccacgggcactttctacttgtgcatgggcttggtttatacgaattgccattaaacatcgctgcmccagccagcctccggcctctgtctgcgggggcggggcggggcctaggccagctggaggccgccatgcaccgcgggcctgggatctgcgcccaggccaggcgggcccagggttttccgcctccgacgtgtttccggccttaaaggcattccgcccttccctttaagacgcaccgccccctctcagtcactcccaagatggcggacctactgggctccatcctgagctccatggagaagccacccagcctcggtgaccaggagactcggcgcaaggcccgaggtgaggatcccaaattcacaaccgccttccttcgcccggttctcgggaccatacttctccctctttggacgatgccgcctcctcaaccttgaaagacccctcacaggccccttccgagaccytcagagtccctaaaagggctgctgacacgcccgctgttcttagcggacagtgattggctacctgaaagatagcgccagcctcctgcctcttctcccgaccctggccttccgcagtccttgtttcccattagccggccgtcccgcctgtccgctgctgacctggtctgattggtagggtgcctccaacctgccgcattcctgccccgctcacctctagctctatttcgattggatttaggacacgccatctactgtgccttcatctctattggctatctcaacttaaagctctgcctcctcaggcctgttcgaccttccttcgaaaccaccccagcctgcgaattcccattggttgcagggtcctctgtgtgttcttgcccctcctgcttaatttaacccagtcccttctgcctccctccgacaacctttttcccrtccgtagccttaaattcccgagctgcccgggcggatcgtagtgttgattggagggatgagaatacccgccgggtccgattggccactgtctccgcctgcgttctcggagtagcttccctgcgggtgggctggagttcggcggccggcgtagggcgcggccctgcagggcggtgggagcctccccggggctgctcgtgttgcagcttgggatgatactggcggaacgcaggaccccaactcccaaacctgcggaccttgaccacggacgagccctgtcccagctccccacgtgccccagggggaccagagcaggcaggacgccttccaagtattcaagggccgctggttgcctacgcttcgtccccttgtttcttgaacaaccgttagggaccaggggtacccctcagggaggccacagtccggggctggggcgctcattgatgcagtgatcacacgtaagtttaataaccaacttgataagtgctctgagagaaaaataactgtgagagcggccacctgaggttctcccccaatctgcagtgagccgagatcagaacaggtaattccgtaaatgagagagagaagcaaagcgttacaggcagaagagtctatttgaaatctctgagaaaggaggaagcatgatgggaatggggaactggaattctctaatgctccgatgactgtctaagtgggggatcacccggcattgacagactgggaagcttaaatgagtcactcgcctgaggtcacatggttagtttggtaagtggcagggtttcaaacccaggtatgactgggctcgaagcctatgttcttgaccataatcttgtgccacttctctagatgcagagaagactcgaaaaccagttaaagaacagtcagtggggcccggccttgtagctcacacctttaataccaccactttgggaggccgcggcggacggatcgcttgagcccaggagttcaagaccagtctgggcaacatggagaaaccccatctctacaaaaaatacaaaaattggccgggctcacgcctgtaatcccaaaactttgggaggccaaggcgggcagatcacgagatcaagagatcgagaccatcctggccaacatggtgaaaccccgtctctactaaaaatacgaaaattagctgggcgtggtggcgcgtgcctgtagtcccagctactcaggaggctggggcaggagaatcagttgaacccaggaggaggaggttgcagtgagccgagattgcgccactgtactccagcctggcgacagagcgagactccgtctcataaataaataaataaatagataaataaataaataaataaataaacattagctgggcttggtggcgcgctcctatggtcccaattctcgggaggctgaggtgggagaatcgcttgagtctgggaggttgaagctgcagtgagaggtgattgcgccactgcactccattttgggcgatgaagttgagactgtttccaacaacaaaagatgaaatgcgctgatggtcagtgaggacagagggatgagagctcataagctgtcaggccctggggctccagaggataactgaacagtagatcaacagggtccctgccctccaggagctcatactatgctgaaggagacaaaaaaaaaagaagttatgatacgttagttctctgtctatgctgctgggtgtctcagccaaaggagcttggagcccaggggaagaagtaactgactcacggtagatctcaatgtttgcaagaggaggaaaagcattccaagcagaggaacaacgtgtgcaaaggcatggagttatttgaaaaatggggagagggctcatgcctataatcccagcactttgggaggctgaggcgggcagatcacttgaggtcaggagttcaaaaccaggctggccaacatggcgaaacatcgtctctacgaaaaatacaaaaaaatgggcgggcgtggtggctcacgcctgtaatcccaacactttgggaggctgaggcgggcggatcacctgacgtcgggagttcgagaccagcctgaccaacatggagaagaaagcccatctctactaaaaatgaaaaaattagccaggtgtagtggcacatgcctgtgatcccagctactcgggaggctgaggcaggagaatcacttgaacccgggaggcagaggttgcagtgagccaagattgcaccattgcactccagcctgggcaaagagagcgaaactccatctcaaaaaaagaaaaagaaaaaaaaaattagccgggtgtggtggttcacacctgtaatcccagctactcgggaggctgaggcatgagaatcactggaacccgggaggcagaggttgcagtgagccgagatcgcgccactgcactccagcctgggcacacagcgagactctgtctcgaaataaataaataaatgatggggagaggttcagtgcagctggagaggattcagatcctggggaagaaggaggccttaaagatgtaaaggatttggccgggtgcggtggctcacgcctataatcccagcactttgggaggccgaggcgggtggatcatgaggtcaggagatcaagaccatcctggctaaaacggtgaaaccttgtctccactaaaaatacaaaaaattctccaggcgtggtggcgggcgcctgtagtcccagctacttgggaggctgaggcaggagaatggcgtgaacccgggaggcggagcttgcagtgagcggagattgcgccactgcactccagcctgggcgacagagcgagactccgtctcaaaaaaaaaaaaaaaaaaaaaagatgtaaaggatttgaaatggcaaaagagaaaaaaatttcaggctgaggagcaggagtaggaagaagcatgcacccaaatctctagaggtagtaaaatcacatcgtggggaagacaggcaagcatggagggcccgggttagaaattcttcctcctcctccagaggcagaggggatctggcgcagaggcaggatctaaggaagaggaagaaagttaaataagacccttagccaggcgaggggactcacagctgaaatcccagcactttgggaggctggtcttgaactcccagcctcaagtgatcctcccacctcggcctctcaaattgcttgagaagcttgagtctctgcacccagacctggctaatttttttaaaaaaagttttctgtaaagatggggtctcgggcatcttcaggcaagaggcaggcagataccttgagcccaagagttcagaaaaagaagacccttcacagctaaccttggacacctacactcccaaaggagaagggtgtcagattatctatttcagcttcatcctgtctatagaagtgggaagtgggggattttacaaaatatagaaagttaaataatttcccctttccagctgggcacggtggctcaagcctgtaatcctggcactttgggaggccgaggcaggtggatcacaaggtcaggagttcgagaccagcctggccaatatggtgaaaccccatctctactaaaaatacaaaaattagctgggcgtggtggcacatgcctatagtcccagctactcaggaggctgaggcagaagaatcgcttgaacccaggaggcggaggttgcagtgagccaagatcgtgccactgcactccagcctgggcgacaaagcgagattccatctcaaaaaaaaaaaaaaaaaaaaaaaaattcccctttcctgtgtaaacgagatgacagactctttgaggccagggtcttagtctgttttcctcaccttcccagatgcattatggtttgtttttgtttttgtttttgacagggtcttgctctgtcacctagacctctcaggctcaagtgatcttcctacctcagcctcccgagtagctgggactacaggcatgcatcatcatgcctaattctttattttttatagagacagggtctcactatattgcctgcactggtctggagctcctggcctcaagcagtcctcccaccttggccttccaaagtactgggattacacacgtaagccaccacgctcagcccaaacatttatttaatgcccacaatgtacaaagaactaactatagtccaggcatggtggttcacacctataatcccagcactttggaaggtcaaggtgggaggattrcttgaggccaactggagaccaggatgggcaacaaactgagaccccatcttaacagaaaacttaaaaaaaaaaaaattagccaaggctgggtgcagaggctcaaggctttcaagcaatttgagaggcccaggtgggagggttatttgaagccgagttcgagaccagcctgggcccacacttgtaatcctagcactttgggaggctgaggcgggcggatcacgaggtcaggagttcgagaccaacctgaccaacatagtgaaaccccgtctctaataaaaatacaaaaattagctgggtgctaattgcacccagcctgggtgacagagtgagactccgtctcaaaaataaaaataaaataaaataaaaataccatcctgggcaacatagtgagacctcatctcacaaatatttttaattattttttaaacagtagctgagcatggtggcacacgcctgtggtcccagctacttgagaagctaaggtaggaggatcccttgagccagggaggtcaaggctgcagtgagctgtgattgtgccactgcacgccagcctaggcaataaagtgatatcctgtcccaaaaataaataggccgggtgcagtggctcacgcctataattccagcacttttgggaaggtgaggcggggggatcacttgagctcaggagttcaagaccagcctggccaacatggtgaaaccccatctctactaaaaatacaaaaattagccgggtgtggtggcacatgcctgtaatcccagctacttgggaggctgaggcaggagaatcgcttgaacctgggagacggagtttgcagtgagctgagctcatgccactgcactccagcctgggtgacagagtgaaactccatctcaaaaataaataaataaatagatatttgttaattggtttccccagtggagttgggaaagggggttaagcattattctgatctttgtcactcccactaaactgggagctcttgaagggccacattgtgtcttaataatctcagtacttcagggtctcgcctggtgccagatacagtagtccctacttctcccttatccaaggttttgctttccaaggttttagttacctgcagtccagaactgttatatacagtaagatattttgagagagagagagagcatagccacaaacttttatttcagtacattgttataattgttctattgtattattgttattcttaatctcttttttttttttttttttttgagatggagtcttgctgtgtcgcccaggctggagtgcagtggcgccatctctgctcactgcaagctccgcctcccaggttcacgccattctcctgcctcagcctcccgagtagtggggactacaggcgcccaccaccacacccagctaattttttgtatatttttttttttttagtagagacagggtttcaccgtgttagtcaggatggtctcgatcttctgacctcatgatccatccaccttggcctcccaaagtgctgggattacaggtgtgagccactgcacccggccatctcttttttttttttgagacggagttcactcttgttgcccaggctggagtgcaatggcgcgatctcagctcactgcaatctctgcctcccaggttcaagcgattctcctgcctcagcctccccagtagctggaattataggcgcccaccaccacacccggctaatttttgtatttttagtagagatggggtttcaccatgttgaccaggctggtctcgaactcctgaccccaggagatctgtctgcctcggcctcccaaagtgctgggatataggcgtgagccaccatgcctggtctattattcttaatctcttactgtgcctaatttataaattaaactttatcataggcatgtatgtatagaaaaagacatagtatgtataggggtcagtactatccacaatttcaggcatccactgagggtcttggaatgaacccctgtggataagggggactattagatagaataaacatcaataaatgcttgatgaataaacgctaatcctaccttcccagcctgacacctcccagtggacaccacacttcacttgaagccttagaaacctttcccacccatgcttccagccctggcttcatgttgccatttctcacccccagaacaggccgcccgcctgaagaaactacaagagcargagaaacaacagaaagtggagtttcgtaaaagggtgagaacaactggagtgatcaaaggcagactcaggaaggacttccaataagttaaaattggaaggttgaggactcagttttgctgaaaatgtcttgagagaggtgacgcatggaagccagtggcttggaggctggggagggtgctggggaggcgtagaagggcccaggctcagctagggagaggggtacttgggtggagccattgtctcatatctgcttcctttcccctctcccaagatggagaaggaggtgtcagatttcattcaagacagtgggcagatcaagaaaaagtttcagccaatgaacaagatcgagaggagcatactgtgagtgtccctgggctgggggaggaaggaaatgggtggctagcggggcatgaaagggccagcggggggctcctccagaggagggcactaggcccgctcctggctcaagatgctctttcccctctgccatcccatcccagacatgatgtggtggaagtggctggcctgacatccttctcctttggggaagatgatgactgtcgctatgtcatgatcttcaaaaaggtaaagggcctgaattcctcattctctcctctcccctttgtagccttatcccccctccccgaccaaggaatgaaatgaaacatttgtatggactctgaccccatcattctgctcttctycaggagtttgcaccctcagatgaagagctagactcttaccgtcgtggagaggaatgggacccccagaaggctgaggagaagcggaagctgaaggtgagcwatgctttgcagcccttggggtccagaagcccaccacctgggaggggtgggggtttgggctggggccctgagcaccagtgcccccactttcacccctaggagctggcccagaggcaagaggaggaggcagcccagcaggggcctgtggtggtgagccctgccagcgactacaaggacaagtacagccacctcatcggcaagggagcagccaaagacgcagcccacatgctacaggccaataagacctacggctgtggtgaggccacagtgcggctgggggtggctgggagaggagcataggatgyggcaggagggcagtggaggctgaggtacggatttctaggcccgyyctaccctcctctctgcccctagtgcccgtggccaataagagggacacacgctccattgaagaggctatgaatgagatcagagccaagaagcgtctgcggcagagtggggaagagttgccgccaacctcctaggcgccccgcccagctccctttgacccctggggcagggcagggggcagggagagacaaggctgctgctattagagcccatcctggagccccacctctgaaccacctcctaccagctgtccctcaggctgggggaaaacaggtgtttgatttgtcaccgttggagcttggatatgtgcgtggcakgtgtgtgtgtgtgtgagagtgtgaatgcacaggtgggtatttaatctgtattattccccgttcttggaattttcttccccatggggctggggtactttacattcaataaatactgtttaacccaatgtcctggtttgtttatacacagaaaggtgggtcctggaaccactggtagagaagaaggggaataattttcagttgaacagcataaaattgctgtttgtgtaggttaaagatggccagttggaactatcagaggttttttgtttgtttgtttgttttgagacagagtctttctctgttgcccagactggagtgcagtggtgtgatctcggctcactgcaacctctgcctccagggttcaagcgattctcctgccttagcctcctgagtagctgggactacaggcatgtgtcaccacacccgggtaattttttgtacatttagtagagatggggtttcaccatattggccaggctggtctctaactcctaacctcaggtgatccgcccgcctcagcctcccaaagtgctgggattgcaagagtgagccactgtgcccggcccagagggttttgtaagatgctgtattttaagagtgcaatcgggctgggcatagtggctcacacctgtaatcccagcattttaggaggccaaggctggaggatcacttgaggtcaggaggtcaagatcagcctgggcaacatagtgagactttctctctacaaaattaaaaaattggttgagcgcagtggctcacacctgcgatcccagcactttgggaggccaaggcaggagaatcgcttgactccaggagtttgagatcagtctaggccacaaaccttctctacaaaaagaaaataaaatatacaaactttaaaaattagccatacctggtggtgtgcacctgtagtcccagctactttgcaggctgaggcaagagaattgcttgagcccaggagtttgaggctacagtgaactatgatcgcatcactgcactcctgcctgggtgacagatcaagaagctggctcaaaataaatacatgagagtataatcgctggagtcaaataccttggctttggatcctagccctgccagctgccaaccgttaccttgggtaaggcatttaaccttttgtgcctcaggtttcctcacctataaaataaggataattatggcagctatctgacagagctgtttgaacaattgcacagggcaatatatgtcaaatatttagaacagtttcagatcctgtaagttctttttttttttttttttttttttgagacagagttttgctcttgttgcccaggctggagtgcaatggcacgatctcggctcactgcaacctctgcctcccgagttcaagcgattctcctgcctcagcctccgagtaactgggattacaggcatgcaccaccatgcctggctaatttttgtattttttagtagagatggggtttctccatgttggtcaggctggtcccgaactcccgacctcaggtgatccgcccgcctcggcctcccaaagtgctgggattacaggcgtgagccactgtgccctgccaagatcctgtaagttctataggagaggcagccactgtcattatcactctcatcctcacaaagccctccctaggactgcagcctcactctagcatcctctgcagaccatttacttcacagccagcttccccttcatggtggtggcaggaccccagtccccaccctgctcccctctcctggagctggtttcttattccctctgaaactctttatttagtttttttgtttgtttttgtttttttttgttgttgttgctttgagacagggtcttgctctgcagcccaggctggagtgcagtggtacgaacatagtgtactgcagcctcaacctcctgggctcaagcgatcctctcaactcagcctcccaggtatctgggactacaggcgagcgccaccatgcccggctccattggcaactctgcagcttcattttaccatatagcatctgcttcccctacctcctttggaaatgtgaacacctctgttgttctagaaccacccagcttcctctgtgagtccctcacctcctctttgtcctagcaggttacatatctatttgcctcccctccccgcccccatctcgccacctcctgttttccccagctcagcccagaaaccagcatcccctagctcccacaaagaagcacacagctgtcttggttggcaccagtgtttatttcaggaagcaggtctggaagacctgggtctgtccagtggagtcctggagcctccagcttctcacttggccttcgggttacggaacttgcgtccagcaaagattgccttgtccccaagagcctcctcgatcctagaatgcaggcaaggttagggctgctgaacttccaacctaacagcctccagcaccccaatgcccaggcccactgttcccgctgtacctcatgagttggttgtatttggccagacgctccgagcggcagggggcgccagtcttgatctgatgagggaagaagaatttggagggttaggtgaggctggaaaggaggggttggacctggccccaagggagcattaacctcaaaggcaggaggccagggaccccaagaaaacttggtgagacactcagtagagagaagctacaagtacctgtcctgtgcagagccccaccacaaggtcagcaatgaatgtgtcctcagtctccccagagcggtggctcaccatcaccccccagccattagactgagccagtttgcacctgagtggagaggacatttgatgtggccttctagaacctcctcagtgggaaagcaggggttgggtggggcctctcccttctgttttgggtagcaagcactctgcagggagggcagtgactaagttctttgggaagtaggagaggaaaagacttatcttgatttcgggctcttgagatgctgctgagaacagcggaatctgagagaggaatggtgtgggctgggggtggggggtcatgacagagccacaggggcaaagctcttggagtcaggccaaggattagtcaaacaaagtcttgagatcaaggtgtgggtaagtcaggtgccaggggaaaggtaagcttggagttggtgggtaagactgtagctggagtgggcagagctggggcagaggcaggctatggtgagcctcagggtcaggaggcactcacgcctggatcgattcggtcaccgagccgatctggttgaccttcagcagcagacagttgcaggccttcttctcaacggcctgggcaatcctcttggggttggtgactgtcaagtcatcccccacaatctggatgttcacccccgagaggaaggaggtccaagtggcccagtcatcctggtcaaaggggtcttcgatggagaccactggtggggtttggagcagagacagggcagagacagagcagagacagggcagagacagggcagagacagagcagagacagggcagagacagggcagagacagggcagagacagagcagagacagggcagagacaaggcagagacagggcagagacacggctagaggtcagaaggagcctcatggaggggtgacagggcagaagagcttaaatggggattttaatggggctaagaattggaaggatccaagtcgatggcaaagcaggtcactgaaatcagtatattaggcagctgcacgggattcgggcaggaacactgggacacccgaacgcctcaccaggatagttcttgataaagctcttatacagctctccgagcttctccccagtgatgtgccgtgcgggatcatcaggcgacttgaagtcaagatcgtacttcccattgcgatagaactcagatgctgccacatccatgccgatcaccaccttgtctgggtaaccagccgcctggatggccgtcttcagcagctccagggctgggggaggaccaagaaaggacctgagactccagtgccccttgtctgcagcctcccctgcccatgtggagatccagggggtctgccccccagggtgctcagcactgaccctcattgttctccaggatgttgggtgcgaagccaccttcatcacccacattggtggcatccttcccatacttggccttgatgacccccttgaggtggtggtagacctcggcgccaatgcgcatggcttccttgaaggagctggctcccacaggcagaatcatgaactcctgcatggccagcttgtttccagcatgggagcccccgttgatcacattgaaggcctgagatggggagagggtgtctggacctgggccggggcatgagagctcaagaagggacaggggcggggggtgttggggtggaaacctggcttccctacttactagctcagtggtctaggatgagtagttttgctcaagagcctctttcctcatttctttctttttttttttttttttttgagacggagtctcactttgtcaccaggctggagtgcaatggcgcaacctccgcctcccgggttcaagtgattctcctgccttagcctccctagtagctgggactataggtgggtgccaccatgcctggctaatttttgtatttttagtagagacggggtttcaccatgttggtcaggctggtctcgaactcctgaccttgtgatctgcccgcctcggcctcccgaagtgctgggattacaggcgtgagccactgtgcccagcctctctttcctcatttctgtaaaatggggatagcacctacttccctgtaggatcttttgctgaaaattagagaaattgaatgtaaagttcttagcatgtgcctagtatataatagctaacacttttatatagcacttactacatgccacgcactaagtactttacatgtattagcccatttcattctcaaaacacctctattcattggtatcgttattaccccccattttacagatggggaaactgagacagagcagttaaagaacttgcctaaaatcatacaactaataacaggcagagccaggattcaaacccagcaatctatctctagagaccatgctcttatgcaatcctcctagtaagtaacaagaaatggtaacattattattgagattaaattcaaagagtttccattcatcaagaaggcactggtttaagaaggactcaagaagatacaaagaaatgccaagatctttgcctcaaagaaactctcaatatgatttgggtgtagggtgtggggttggaacgaggctggagttatcgagcctaggattggaatgggaaggaactgggttatatggcagggaaggaagcacatagagccttcagggaaggtttggattgtggaagagagggaggggtgggaccacagcaggagagattcaatttcaggaaactgcttcttaggagctggtctgaaaggtggattttccaggggggccaaccctggctgggcggggttggctctgtccaggcgagatctgggaagggcgggtagctgcactcactggcactgggagtatgaggtcagggttcccagcgagatctgcgatgtggcggtacagggggacccccttctcagctgctcccgccttacacacggccaaggacacgcccaggatggcattggccccaaacttggctggaaggaggcaagcgggaagaaaggatgagagcttctgcagggtttggggtggctactccaggaagacgccagagctccaaaccactgagcatgaagaattggttaacagatctctccccaacagcctgagtagccctgggaacccccaccccgggggaatgtgtcagctgcatgtctgtgtccacagcccggcccaggcctggcagaaggcaggcataggaaatgcctgtggaatgaacacaaatccatccagctgcggtgtgacccaaaatgggggacccagaaataacccatcaggcctcaccccatggcctctcgccatctctcccacacctcatcccttccccaccgctagcccttcactcacacttattctcggtcccatctagctcaatcataaatttgtcaactttttcttgatccacaacgcttagtttctggaagggtgagtttgagaagggagagcagaggtcagatttctcag

SEQ ID NO: 96947 - DNA, 13278 bp, Homo sapiens
gacaaataggagtcgactggatgaaaattgggaagtgtggcctctcagaagcaataatactcaaaggcttggagattagaaacggtatggtggttccatggttcctgctctttgcaggtgactggcgcatatgggaaaagggtgggcaaggggagagggcatggtacagatggatacggttttgggtttggctctgccacttcctggctttgtgtccttgagcaaaatctcaacctccgcaagcctcagtttcgtcacccataacatgaggataagtaatatacttacctcagtactgttatgagggccaaatgatataacaaactgaaaatgcttaacaccatgcttgacacatcataaatgctcagtccattgaagctgcggttactaatcaccatcattattgtcactatcttccttttcctcattatttaggtaggcaaggcccagatcttaaaggacctttctcaaaccaccttatgttgtctttcgatgcagccttagctacaccatgaactagcggaaattctgatgtctttgaatgctgggtggaaggatagagagaatttcatatttcgagaagcggtgacaagttcattttgatgaaatgtattgcaacatagcagagaggtcaagagccttttctgatgtctgtgcttgtgatgggaaaatttgtattgaggaaaaggcaataatattacagtgtcacttttgcaaaaatcttcttaagcacagctgtcaaaaacctctttccagagaaggccatttgccctctgtgatcctgaagaattcatccccactagattatgagctttctgaagacaaaagccaggttgtactcatctttagatccacagtgtctgacgcctttcagttgctcagtgaaaatgggtgaaagttaatgatgctcctgaatgttctggtatttggcattttacaaagggcagatattgttaagaaaaagataagacttatgacagcatgctatttcattccttttacatgggttttatgtgctcagctctgatattgccctgcttagatgctttagtgattttgattcttttgtgtgcctgtacagagagttgttttggggatgattaaagtgttttatggtaggtgggctttgtgagagcagcacagctgtgtctgtcttaaacagttttatccctattgtctagtgtagtgcctggcccctacaaggtacgtgataaatatttgtaataatcaatttctattaaaaatgtggctcaaattactgtgaaacataatcttaatttaacaaatttaacttacttttcttggcccataagtacaagtagaagattatctgtgctcagtacaaaatttcattcaagtttgggtggagacgctcttaatgtttaaaaggttggcttctgtgttgtatggtgtataggacccttgctttctcccttgtgccattcactgttgttatagggtaaggtctttgggctgaatggctacagtgttttagatgtggactttaggtcccaactctgcactgcatctgtctgctcttgctaacatgactgcaatgttggaggaatgtcatagcatctccaggaaagcgatcctgtaatgcttggtcctccttctctctcaaatgcagctatttatgttgccattggcccaagatcatatggacagcatctacctcttcttcccaggtgtgttagagaaggggccttacaacccagccagcttatctttcatcttttaggtcactgcttaacatgttagctctcaacaaagtgctttcaaaccttcttcacagactaattgcaaagtatatattgatggagcttttttgccctgttgctcttctaattggatgtaacagtcgttttttttttttgagacggagtcttgctctgtctcccaggctggagtgcagtggcgtgatctctgcttgttgcaacctctccttcctgggttcaagggttcaagtgattctcctgcctcagcctcctgagcaactgggattacaggcacatgccactatgcctggctaacttttgtatttttagcagagacggggtttcaccgtgttggccaggctggtctcgaactcctgacctcagctgatctgcccacctcagcctcccaacgtgctgggattacaggcatgagccaccgcacccagctggatgtaatagtctttgatgcaccttctttaattctagtctggctgatctctcataaggtgttccctgcctcctcctccttccttcactttaattcctgtctttccttctccttttctttctctagtcatatgtgaactacccatgaattagtgactttaggattgtgctttgaaaaataggcatattttacttgaatttgttttagtataggaattgggttaaaagaagtggatgcaatgcagttcatttctgcacttacctgtgaaaatataaaagcatacagatttttttccagtatttattattttgtggtagaatgaaaaaaaaaatagatgctttggggatctgatcaaagcgcataaattaatgtgaatagctgaaggttgatgcatctgggtgacagggggtcaacttttccagatttacggagatgtaccagagttaaagcatgggatatgccatgtaaacatctgagaactttggcatgttttgatttatttttttcactgcagtattgagattggcctatgttcactactagggggaatgggagagggttcagggaggttgtttttgtttttcaaacagaaggggaacaatgcttagcaaatgcccctgggtgtgtgcctccagcaaacacatacattgggtcaagaccctgatttctagcctcccattgcctctcatctcagtttttttccgttttgttctgggccctgggtagtctagcaactttgttcctattgtcccaaccctaagtactccgaagaatctatttctctaatgtggtaagtagttttatacaacactgtcagcaggcggtgagctgtaagttatatttccattgggagagacttactttgctgtatcccactagaatctaaggaaaaatcacaataaaggctcatactttaagacattctggaagatgggagaccatgtagcctaatggagacagtatgagctccatcactagctagtgtatctcaggtaagttacttagactctgtaaagtttgatttactgttctgtagactgaggataatgcctctacagagttgatgacatgggtatgagagataacatatgtacagtttagtatggaggaagtgctccatagatggtaactatgatttttggttaaattagggtatggttttgggacatgaacatttattgatgataacttattaacacccctccctctacccctgcctgcagagtaattctgatcattttaagtgccagcacctgtggatatctgtgaacaaggactcaccaatgaaatataaaagactaggccgggtgcggtggctcacgcctgtaatcccagtactttgagaggccaaggcgggcggatcacgaggtcaggagatcgagaccatcctggctaacatggtgaaaccccgtctctactaaaaaatacaaaaaattagctgggtgtggcggcgggcgcctgtagtcccagctactcgggaggctgaggtaggagaatggcgtgaacccgggaggcggagcttgcagtgagctgagatcgcgccactgcactctggcctgggcgacagagcgagactccgtctcaaaaaaaaaaaaagaaatataaaagactagatgtcttcagccctgtggtggttcctcttcatgcatttaggcgcagtacagaaactctccatgtctgtggttacattcgcctctgtattactcagtggttggaggtgaggagttggaagtctaggtcagttgtactttgaatttacctgtaggtccacttctgccagctcagagtccattagctcttccatattcatctgttctcagcaattacaggaaggagaatttcataccacttgtctaatgaggacttgatcccggtggttatcacagatttcccaaaattgaatgaaatgctcctcttgttcccctttctgaaagaattccaaagcttccttcaatgcagtcaaggggatccttccttccgctagaagcattcctctgttttgagtctagaatgcttcacggtgctttttgtcttgtggcagcttcctgggagagatacgaggctcacttataagtgctcagaataaaaatacaaaacacagtaagtgctcaataatgttagctaggatggtggtggtggtgggtgataaatgatttaatctcatttatgctccatcttctcctccactgtccttccaggataattagcagcactaataatctggttagactcagctcaatgctttctattcgatatgaataagtgattattgtttactgctaagacaagtgtggtgttgagatggcattttctttgttgaacacatttttgtttttccttgagaaaatgcctaaccttttcattctcttggttttccttgaacatctaagtcttcccacacacctccaactgctttgtgaaacaaacgcctcttgtataactttccacattgtccaaccttttcagataatctcagcacctcgcacttttgcttcccctgaagacatccctcttggagacctttaatgaccttctgttcccatctgcatggagaggaataaagacattcaaacaagtctcctattttcaagtccttccctacccataacctacccatttccctcgcaaaacaaaacacctggtaccttgtgtctctaaagttaagtgtacagacagcaagtttagctttctctgccaggtttttaccttctgtatttatatgttgtgttgggggggtttctgaaacccccttgtttcatcaaacatggaactctttgcatctgtatcttgttttctcaatgatttgaagcgatttttcagttggggaaaaaatgggaacacctgcattttaccactttaactcagccatctcctaacttctaattccaaattcatgtttatttattattttttaaagagatagggtctcactctgtcacctaggcttagtgcagtaatgcaatcataggatcatggctcattgcagccttgatctcccagatacaagctattctcttgccccagcttcccgaggagctaggaccacaggtgtgtgctgccatgcctggctaattttttaattttttatagagactaggtgatactgtgttgatcaggctggtcttgaactcctgggctcaagagatcctcatgccttggcttcctgaagtgctgggattacaggcatgagccaccacatccaacaccaaattcctaatgattgactggattaaaataaccatgccaggcaaggaactaaatacacctatattttctagacccattctacgatttctttttccttttgtcctattctttattattggatacaaatgatagcatgcttatcttttggagatgaaagggtctttctctagtgagaactcttttctttcaaatgcagattttatgggaaaatccaactggcctgctctgtgttttctgttaaataagcccatctctatgagttaggtggtaaaggtaatttgtttcattttagtgctataacttaagaagacaaggagaatttagagttaagggagaaccactgagataattaaaaggtgaagaaataatacctaaaaagaaaaagtaagaaaggtaggattatttatatcggagtatatgagggagtgagtgtcataatgagagttaaatatataaaggtgcagtgtagagaagatggcacccagttgcccttttaaaatgaaagacttcaagaggaaatagattaaattagcagtagagtctgtaaatagcataacagagtataaaaatagcagtagagtaagtatattttacaaagaagaaacttcaagacagtgaaagttgttaactggaggcgggtggggaagggtcgcaggcaagattactaggcgaggcttgtgcgcccgctcccgccctggccaccagtgcccacccggtcggcctggcacagccatgatcaaggcgatcctaatcttcaacaaccacrggaagcygcggctctccaagttctaccrcccctacagtgaagatacacaacagcaaatcatcagggagactttccatttggtatctaagagagatgaaaatgtttgtaatttcctagaagggggattattaattggaggatctgacaacaaactgatttatagacattacacaacgttatattttgtcttctgtgtagattcttcagaaagtgaacttggyattttagatstcattcaagtatttgtggaaacattagacaaatgttttgaaaatgtctgtgaactggatttgattttccatgtagacaaggttcacagtattcttgcagaaatagtgatggggggaatggtattggagacaaacatgaatgagattgttacacaaattgatgcacaaagtaagctggaaaaatctgagggtggcttagtgggagctccagcctgtgctgtatcagctgtaaagaatatgaatcttcctgagatcccaagaaatattaacattggtgacatcagtataaaagtgccaaacctgtcctcttttaaataaaaatgtaaaaaggccactcccaggtaaaatccagggggaagagtcatctaagtttaccatgcagttgtttaccaaaaatggagraggagagtcttaacttttgctcttggatttaagtcaaggtactatatagaagttgtgtaaaatcagtatgaaagttcaacgttgcttttcttgctcagtgattttaaagaaattgagtagtttctatgtgattttttttttttcttttctaaactgcattcgggtgcccatctacagcatgcctctatgtattggctactacagtgttttaaaaagtgtttcagatatttctttaattatgtgcaacctaaaatgttggtgttttgtatggatcacaagtgcagcattccttaattccttctgctatttgtcacacaattgttatttaaagaaccaagtatgtattgcatgaaaacattatgacttttttctcttagtttaaataaactccaaggtaactggacttctaaagcacctttctgtttgcctgatatctactttagcaataattttttttacaaccctctgactcaacaaagtaaataaaagtatattttatcactaaaaaaaaaaaaagttgttactggaatgagctatcaagggatggtcaccttgaataatttttatttgatagtgtttagcatcacctacaggttctaatttagctaataaatgactaagcaccattactttttttgtgtgtccaaatcagttcattttgtcttgagtgtcttgagagtatccatgcacaggtaatagcaagaagtcttcattcttgcctttttttttttttttggagacagactctcgctctgtcacccaggctggagtgcagtggcgtgatctgggctcgctgcaagctctgcctcctgggttcacgccattctcctgcctcagcctcccaagtagctgggactacaggtgcccgccaccatgcccagctaattttttttgtatttttagtagagatggggtttcactgtgttagccaggatgatcttgatctcctgacctcatgatccacctgcctcggcctcccaaagtgttggaattacaggcgtgagccaccgcgcctagctcattcttgcctattttaatgtctgtattggaatccttgtttaccaatcttacttcagagcagcagtactcttgagaaaactaatgacttcataaggctccagtgtctgtgtaaatgagacagttttcaaaaatcatatgtaatagataactagaatattttaatttctattcttttttttttttttttttttgagcgggagtttcgcgcttgtttcccaggctggagtgcaatggtgccatcttggctcacagcaaccttggcctcccaggttcgagcaattctcctgcctcagcctcccaagtagctgggactacaggcgcatgccaccacgcccagctaaattttttttgtatttttagtagagatggggtttcaccatgttggccatggtggtctcgaactcctgacctcagatgatctgcccaccttggcctcccaaagtgctggggattataggcgtgagccactgcgcccggcagtttttattcttgtgctgcatttgtttgaccctgcagttgcttctgtttcaaatgttgcatttatgtgaaataaagtgagattggatataatctttacacaaaaaaatcttacttgaagttcttattttctctttgagccattatgtacccttgtcatctccttttctccttttttacttgacacgttttgtagattatcctgagccctagaacagtgtgtggatggttgcaaattttcatctgcttcttgtttctttctcgcccttgcctctgtgtgggctcttctcttcccagccgcccagcatatctgctgctctattcatatccttacctatcacttcatacgacttggtaggcagagagggtgccttttcttgttctttggggaatattgagatcaatattatgtgctgtgggaataatggtttttgagaaaatgatatataaatataagggagtacagtcatttgatgtttgggccaagtaatgtttctgtagttaacacttggtggggggcaacagtattacatttttcaaaagctatccttagatctgcttccgaggttgaggtgctgtgacatggcactgtagctattgagagataggattgttgatatttttgatggttgatcatacccagggccatgcctaagattcacagttcacctatttgttacagactggattttgggaggctttctgcttcttagacttcctgtcacatgaagacattgagactttgaggtatcccttttgggatcaatattctcctttactaaagcttttctgccatcttgaggaatcatgcttaaggtaacccagtaagagaaaaaagctatagcaagaacttggttcttttgactccaagcgtgggtcttttctttttatggaagtggttaagaaaacatattgtttcagtcatcttataagtgaagaaatggaaatcatagtcatttgtgatagcctctgcatttaacagttatttgggaagcaatttaggagtatgcaataagagacttctaaaaatatgtagtttttgactcaataacagtcttgaagaatctattccaatgaaagaatcagaagtatagggaactctttttgaaaaatagcaaaaaattagaaccaacctaagttgtcaacaatagcaaatggttaaataaatggtgatccatacactggaatattatgcaacagtttaaaattgtttttgaaaaaattttaatagcatgagaaaataatacatagtaatcataaataatgaaagatatcaaataagatggtacaatctcagttacacaataaattaaacataattaaaatgatgaaataaaatatgcaaacattttaatattggtcctctgtgggtggtgacgtgggtgatttttttcttttagttttctgtcatttccaatattcttataatgaattataatcagaaaatattaaaggttattaaaatatttaggtaaaatagaaaacgactgagctttctaaccctaataattcaaaagaataaatttcaggacataagctgttttaataagtctttttttgtttgttttttttggataataaagacagggtcgggtacggtggctgacgcctgtaatctcagcaatttgggaggctgaggtggtagatgaactgaggtcaggagtttgagaccagcctggccaacatggtgaaaccctatctccactaaaaatacaaaaattagccgggcttggtggtgggcgcctgtaatcccagctacttgggagactgaggcaggagaatcgtttgaacctgggaggcagaggttgcagtgagccaagatcacgccattgcactccagcctgggcgacagagcgagactccatctcaaaaaaaaaaaaaaaaagacagggttttgctctgttgccccagttggagggcagtgatgcaatagctcactgcagccttgaactcctaggctcaagcaatcctcctgcctcagcctcctgagtagctgagactacatgcatgcaccaccacattcagttaatttttaaattttttgtagagatgtgggtcttgctttgttgaccaggctggtcacaaactcctggactctagtgatcattccacctcgatctcccaaagtgccaagattacaggcatgagccactgtgccagaccaaaaaattctgattttaaaaaggaatgcttgatccttttttttttttaagcaaaatgtactattttgtacattttgtatttagtcaatgtatgattgtatatggtgctgaaagccatgtgataatgggagagtgctctaaatagtatttattaataaataattgactattgttacttattttattatgtaaatgtacatcttatggtataacctaatggtgaaagattgagctttggagccagcctttgccacctgctagctctggaactttggccaggttatgtagcctcagtttccttatctgtaaattggacgtgtgaagataaatgagaaaatacacgtaaaagtctttagcacacttcctggcacatagtaatcatttaaaggctattatagctgaaacgatcaatgaatcatgagtgttctactgaaggaacccttcttccaaattttcttacatatagtatttaggagggacatatgttaggtgattaaggtttttttgttttttgttttttttccaaatacaatggtgataatccaaagattgtgtaagagaaagtagatgtttcttctctgttcctcctcttatatctctgagtatggaaatactccctggttttctccaagctcatataaacctaaacatacacaaggtaactggtttatttgctttggttttgccttatatattactctgcaacttttcctacttagtaacacatcatgagcattgttcagagctaatatagattgaactcatttttaataactgcagaatagcctaaataatgtagatatgccaaaatgtacttgaactatgtattatggatactcaggttgttacaaattgccaccctctactacaaatgacgttgaatgcagcatccttatacagaatttttaagattcattgcttttatttccaatgaaagtttccctagagtgacactgctgagttcagagtcagtgctaattatagtgcaaagggatttggggtgcaaataatatataaaactttgttggtttctgcccttttataatctaattgaagaagaagtacgcatgtatttttctgtggatttctttgcttatgtacaacaattttagtaaatggtgtttattcctagggaggtttgaaatccttagcattctgaaacataaatcagaagagcaaaaggagtctcttgaattaggtttactctgtacagtatttgctgtatttattagatacaaatttgttagaaattgtacatagttaagtcttgcagtttttaagagctaagagtcccacttgaaaactgaagcacctgacttttgccctcttgttccttagtgtgcttacaccctacagggttgcagacaggggaagagccatccccacatgcagtatctcgtctctagaggcccaggcttgctcagcacggatgcaagcagctgaacaaatcttgttttgaggtcaccgatggtaacaggaatgatagtatgctaacaaattatttttacaacagtaaagttactgtgttagcattagacaggttctttttctttgtaatatcactgagagctacttagtacaacataagttgttccaagtgtccacttaagtagtgtggggtatgtgtgtgttgtgtgtctttacaaggcaggggacagagagaagaaagaacaattgtaatgggtttgtggtgcatgtacgtgcatgtgtggccgcagtatacctttaatgagcagcacgaccatgtctgtttagaagctttgtttttccctgttagtaattaacatttggttacatcagttgggattatacaactctttaacagctgatactagttcatacctgttttcattctttctcccctctgattcagcttcttggctctggagaagtgattgcgttatacactagaatccacttggttgtactgattcactggagtggtcacatatctgaaacccactgggcaccctgttgcggtttccagtcagtgggacctgtagttgcatgttttggtttcatattttttctcttagtgatgaacagccttaactttaaaaattctctgctctgtaacaattggcttgttgggaaaacatttttacagctgtggtatttagcagtcattgtgtttccttgggtttcctgcagtattccgtgaagtagcaaggataataatggcggtgatagcaaacacataaccaatgcttaccatgtgccaggaatttatagattattaactcataaccctcccaacaactctaggtggtggggactgttttcatccccatgttagaaatgcagggagcgagccagcttcggacccatggttatgcagtgtgtaagtggcttaggcatggaaatgactgcttctgggtgaggcttgctggtggggctggagaaactggtgaatgaggcgacattcccagggaagctcagtgctggatgctcagacccagatggagagagctggcagagtggcttagctgctgctcactgtttggataggaagtgacaccctggacatgggagagaagttgagggaactcactcaggcatgggaggaaggaaacgggggaaaggaaggtgtggaaagctttgctgagggaggtcacaagcaacaactgtctctccaggagagcccttctttcttggctacttctgtccctgcagggcgcacctctccggaaaagagcgaagcaagctcaaggtatgtttatcctcagtgagtttcttttgatttgatgagtgagtcatctgccctggctggaaaacctttccatttgcttttgtgattgtgtttttcaaattggtttttgaagaggttctatgcgacatgctcaggttc

SEQ ID NO: 96948 - DNA, 25376 bp, Homo sapiens
  misc_feature (1)...(25376): n = A,T,C or G
caaggtctgtgtctgggtccagagttatttcctgtcttcactctgcctccaaacgctgagtaagatttggttcttactcagttttcaaattatatggcttgaaaaattaaaggaaacttgtggtttggtagtttttaaattacagaatgatttgttgcaactctgtggaggaatttatatgataatatacctatttattcaatagcatgaatcgtttgaaaatcagattaaatattgctacatgaagtttgtcatattgaatcatccaggaaaacaacgaatgctaagcttagacattaaactctctgcccatgaaaagataattttgagaatcttccagtctgtccatgggaatgaatgtttgtgctgctaaaaattggaaaaggggcaatcccaactgtagcccaatgttagaaaaacataaaacaaagcttgagcgaaatgttcatcatggaatcagttgagactacataacagaaatgtcattgccctctgagtttttaccattttgccccacataggatttttttattgtttgcctctctattcccatcactactagaggtctctagaaatctctagaacaatgagtaacctgccactgagtctcaatccatccattgctaggaagacaaaataagatgaggtagaatcagtgtgtgcatggcttgagggcctcatcatcaccttccccacctaatcgtcctttccttcccttcatatcacttttgtcaccaaattccccccttgttttcttttctttttttcttttttttgagacagggttttgctatgttgcccaggctggcctcaaactcctaggctcaagtagtccttccacctcggtctcctgagttgatgggattacaggcgtaagcctggccactccacttccttccccattccctgtgctccgctccctacttccccttttcaactcaagaagccattctgtcttgtctgacacgaaagactattctgttctgagctctttggagacccatcaaaggctgagcctcagtgaggcaatgacatgggggctcactgaacaccagatgttactggtctggcagagcacagacaagcatatcaaatccggaacagtttggagtaagggattcggccagtgtggcctcctgtggacttggtgaaggctcagggtggttaaatgctctatggtgtgtccaaacatagcggatttcctcagtgcccaactgcatgccagaacattctttgctgggacgtggtcaacccaaaaagaacttctgttcccattgatattcaaagatagcaagatgactcatatttttcacttctcttcccctagcacaaatatagccagtcttatctgtcctatttcccatggttgctattggtagatggttagcggggagaaatgctctccttttgttctggtactgttcaggcctggctagtaagatccaagcccctatttcaggagaagagtagaccatgtttagtttattttgtgtttcaagcaaagattttaacaaatatatattaaattgtgggacccatttttctcctgtccaaactcccctgccttctttccacagcttctggatttagcatactttatattttagtctgtaattcatgcagttttaattctgtcaatgaaatggcctttctttttcctggacttgtccctctcagtctcattctaaacacagaaaagttgagcagaaacaatgaaacacagacacttacaatgaggttggtagctgtgcagtggggagtggggacagctgtcccaggctgctctgggaagcctccctgtggcccagtgcttttggtcactgagtgttagctgagactttttaaggtgcatagagtttttcagaaagcactcgttttatggtctgcaggacactcagtcccttggatgtagctgtctgttccagctacagctaattacaaaaggtcaggatctcagtagccaaagggcagatgtcttgatcttgctgcttttctgagtaagttatacctccttcataaagtgaggaggagaaaatgtcttctagacaagattgagcaattgtcaactgctttgtgcttccttggcttgggggcagttaagagcagagcctgtgggagtgaatgaatctttaagccagctgggaccctttcattgaagaccaggagaactttctttgtcatatccccagacttgaacatatcagacaatatactgtcatttaggctcagtcctacaggtaattgagatggggatgatggtagaggaggaggaggaggatgtggtggtggaggaggtggtgatggtgacaacattgaaaataatatcgtaacagctaacttgtgtctagtgtttaccatgtatacgcactattctaagagcctgatagtattaacacaagtagcctttgcagtgacactgtgagctaagtcctgttagtatctgtgttagtccattctcacactgctataaagaactacctgagactgggtaatttatgaaggaaagaggtttagttgactcataattctgcaggctgtacaggaagcatggctgggaggcctcaggaaacttacaatcatggtggaaggataaaggggaattaagcacgtcttcacatggcagcaggagagagagagagcaaagggggaagtgcaacatacttttaaacaaccggatctcatgagaattcactgtcacaagaacagcaagagggaaatctgcccccatgttccaatcacctcccaccaggtccctcccccaacactggggatttccagtcaacatgagatttgggtggagacacagagccaagaccatatcagtatcctcacataacagaagagaaactgagtcataagtaaatgaagtaatgtgcccacttcccacagtcaagaagtggtagagctgagattcagcagatgaagccttactcagagcctgtgctctgaacaccagtgtgatcctgcctcctggctaaaacctttggtgggtaggggagggaacagccttattctctctattcttttatcttcagtgcccaaccgcagagtaatcctcatcaaacatgaaattaagttcattattaggtggctctaggtcacatcttatactggtcactttgcaatataatttaggcagagacctacttgttactgtcagaagcttataacctaggctctgtattttgattcatagttcgaagattcacatgccttttttttcttttcttattaggcagggacttgactttgtccctttgcaccactgtgattgcaccactgcactctagcccaggcaacgtcgcaagtttgtgatatgcattccttagttggtgttgaacaagagtgactgatggcacgtgtcatgtcatacctatacacggcttggaaatagcttaaattattttttaaggttcaaaggttacaaagtcaggcatacagctgagtttttattattttcttttaaacacttgcttagcccttgaaaacttcctgggtgccatcatttgccctgggttaagagctcccagagcagagtgaatgtgctgaggccaccatggcctccacagctcaggggtgctccagccgtatgtgtcctggctagtccaggaggatggacatggtgaaggtgaggggagaggacactgtgacagcctctgatctgctcaagtacccatgacactgaattaatttcctttcattaatgatagtatatatcatcgtatatattctcaaagaattcacacataggcaatctcatttaatactcaaaatgttctcatttaagactcaaggctaggcacagtggctcatgcccataatgctaagacttttagaggccaaggctggaggattacttgagctcaggagtttgagaccagcctgggcaacagagtaagacctcgtctctacacaaaattttaaaagttagccgggtgtggtggtgtgcatctgtagttccagctactcaggaggctgaagtgggaggattgcttgagcctaggaggttgatgttgcaatgagttatgatcgcaccactgcactctagcctgggctacagagcaagactctgtctcaaaataggtgttctcggccaggcgcagtggctcacgcttataatcccagcacttttgggaggccgaggcgggcggatcacgaggtcaggagttcgagaccagcctgaccaccatgctgaaaccccgtctctactaaaaatacaaaaaaaaaaaaaaattagccaggcatggtggtgcgtgcctgtaatcccagctactcaggaggctgaggcaggagaattgctagaacctgggaggcggaggttatagtgagcagagattgagccactgcactccagcctgggagacagagtgagactccgtctcaaaaaaaaaaaaaagaaaaaaagtgttctcagttgaaggcttttactccaagtaggactggtgttcagagatggcgctttgacattttaaaggtctacacttaaattatctcacttgatcatgaccacagtcctgtgagattataattgcattaataacatttattaatgttaataaaggaataatgaggtcaggcggggtggctcacgcctgtaatcccagcactttgggaggcctaagtgggcggatcaccagaggtcaggagttcaagaccaccctggccaacaggacgaaaccctgtctctactaaaaatacaaaaaattagccgggcgtggtggtgcgcacctgtaatcccagctactccggaggctgaggcaggagtatttcttgaacctgggaggcagaggttgcagtgagccgagatcacaccactacactccagcctgggcaacaagagtgaaactctgtctcaaaaaaaaaaaaaaggaataatgagtaatatttattaagcactcactgtgcactaaatgcttgatatgtgtttcatcatttgatcccatgaggcaaatgttatttcataccccatgttattgctgaggaaatgtaactaactagggcaaggccacactgctgttagaggaaagcattattatcctgattttacagatgaggaaactaagaccctgagaggtcttaaatcctgtcattgggttgcaggggagttgagagtaccattcaggtctaactccagcctttatgttttaaccagcagactagtctgtattcaaaataatacaccaggacaggtgtggtggcccacgcctgtaaccccagcactttgggagactcaggtaggaggactgcttgagcccaggagttgaaggctgcagtgaactatgactgtgccactgtactccagcctgggtgacacagcaagaccctctcagaaaatttgaaattaaataaaaataaaatatcccaccagtgacacatgatgaccaggttctccagttgctgatataaactgtttgatgcataaaacccagccagggcagagtcccttgccttctcttgtacctggacatgggcagtgggtgagtgcttcctgaatgagggaatgaggaatgctcaaagggaagcctcctgtctcaggaccttgtgctttctctcttttcttgcagaaggtggaagtgcccatgatgctgaggctcctcagggagcagaggatgttcatgatccagactatcgctcagtacaagtttgtctaccaagtcctcatccagttcctccaaaactccagactcatttaatcaccccaatccagctcctggaggagggacccagctccatcgcgctggaggagagtcacctccagacaacatctgctccccccacaggggtgcaggtggctggcagcaaacaggctctctgaagacagtagccaagattattcacacataccatgtattattttatatgagataatttatttttttcccctttggaataacttttgtgaattattataatgcagtttccctagtaatatagtacttttcatttgaaccacatcttgactgatctgtattgtaatatatgtcagcaggtaaggttgcctgctggatcattttgaggacagaggcatgagggagcacatctcttgtgaagttgcagccagatttgtaaccaaccctgaaattcatcagcttaattcatttatcagcttgattcattcatcattcattgcttatatccaaagcaaagacggtaagaaaatgaattcatcctgaaatataaagaaaagggtctgaaggaacaaacacgattctcttatattttggggctcatgagccttgatagacagtttcctctcgtcttcatttccacccctcatcctcagtagtctcctctcccccacgccccaccccaacttcccccccaagcttgagttaaagacagaatagctaaagacagtgctgcctttacaatgcagtaattgccatctttggggccgaaagacaagctctgtgttgtgcttttcttgaccaccccttatcctgggctctggagcttgtgtttccctgctggcgactgtaccttgggtatttgttgctacctctcctgtttgctcagtaggaccctgtctggtggcattgaggctctggaccagaccatctgtgcagttaaggctctaccctgattgagagaggatagcagacctagaaagagaaaggagttgggcagggcctttgaggattgtgtttttcaggcagggccttgatgatcattgttttttatttaaataagatgtgtgtgctggacagagacctaaaagttgaggtcactaagtcattggaaaggccatcaaggaaacagatggggaagctgatttatgggagctgtaaggcatttagctacataacaggggtcctggccaggaaacacatcaaatgtgacccccgctgtgctgatatcatcttcaggctttggtctgcaagatcagaattaatcccactcgggaccccatagtccaaacttggggccacttgatgaacgatggtagaattgtcattggcagarccctgtgcttctttccttttcttcataaaatccactcgctggtcagttatcttcactttgaagcccagttcttagtttcttcctatggcttcattggtcagtgtccttctgaatttccaaggatggtacacaataaatcatgttttgtacttttttcctcttactgcattttgggggatttatcattctatgtctaccttttcttgagyacagctttgatatgcacctgttgttacgtggtgatgggaagtcacaggcgtgctctttctagttaatttgatgccacatcttccttgtcttttcagcttgggaaaaaggcggcagtggaggaaggcrtggaatgcccacagtggtcagttcaaagaacaaacgtgcaattaaaaaactgtagtcagccaggcacggtggttcacacctgtaatcccagcactttgaaaggccaaggcgggcagattgcttgagctaaggagttcgagaccagcctgagcaacatgatgaaaccccgtctctacaaaaagtacaaaaattagccaggcgtggtggtatgccctggtagtcccagctgctcgggaggctgaggcaggaggatcacctgattctaagaattcgagactgcagtgagccgtgatcttgccactgtagtccaggctgggctacggagagaccctgcctccaaaaaaaaaaaaaaaaaggaaaaaaggttgtcaagaaaaactagatgttaggagaaaggaaaatttaattgcagttttttttcttagaattgactgctgtgagagttccatatgcctttcttcattgctgcttttgtcccccgtgagctaaaaagatggagtgacatcaaatcaaccagaaaaagtatgcctttgtgacatcccatcaccacatgccaacaggtatatattccccattaagttcttcggaataggaatcctctgtttcaacctggccaggtgttgtggtggctgtactctagttagactcggaatatctggggatggagggcttcccctgtgtcttctacttcaaggtctgaaggctcagtgaaggagtataatctgctgatctttgtagattctggagttttgttgtatgtcctggaaagaaacccattagtattacatgtattttcagtgaacagagcttataacccttattataagaagctcatcaataagcaaaaagatacttgtttcctttccttggaggtttttccatccttgggatattctgctgttagggatgttttagcaagtggtctcagttactggtttattgcgtgatgaacaacatcagtatttatcttttatctctaagccccaaggtgggcactgttagaatatgtctcatgtggacagcatatagatctggtgcgtctttgaggtcgtcagagctcatgggcttccctgaaattcatccactgtccctgccgtatgctacgggaatatacattagtgtacaaaatgcagggaggaagtaggtttaatattcaactttctagccaaagtttatattgaaacccaaaagaaaacatttaagagttgttccacatatttcacttttaaaaacaaatgcctttggttctttagcacattttgcattccttttcacatctccagtaaatgccaacatatctcctgttaaattagcagcagccatttaaagtcctttcggtggcatctgcataataattgcccagagatgctttatatctgggaagcaagccaaggaataaaccttgaagcaaagtgtattaaattagttatctagttagagcttttggaatgatttcctgatgatgtatcaagtctgaagctggagctgtcagtgtctattgctgcagtttggatttgaagggagaaaatgtaaaatggaggaaaaaaaagttaccatctcacaacaaagccatcaaacattttccagccgctgttttcgaggttttccagttgaactgtttggtttctttcatccacactcatttggatacattgacccgaggtattcatccttgtttactgtggtccctgaatcatgggggctgaatttgatgtcttcatccttgagatgagcctgctggcttagctgaggaatgtcctgctgaggtttcttaggtttccttgggttctaaggatatactggatataccatcttttagcaagagtatctggtagcatttacagatagcatagacattggtatgcacttctttccccagataggaagtaaaggaggatttagttgcatgaaaaaaggatgttaaacattgattacataggagtaaagatgaatgagctgcaatattcagtcrgagctaaacaataagatcagggaaggtaaaaatacctatgtggaatattttgaatcgtaagcttttgaggagcttaaattgagagaattttacttttaattttgtagattgagaagaggaaccgctttttaaaattatagctaaactgtcattgttttcctaagagtcacttggccatctctggccccctctttcatcagcctgaagagagggtctttgtagactgctgagggtgggccttgtaggacttgaccatggcttacacctacttaacctttatcctgctttctttcagcttgtgcttttcagttataaactccagtgggtacagcaggctggccttttcatccagctgattatttttccagcttaatatagattgacccatatgaaatttccaataatggaccatattttctgcaaatagacagtaytcgcatggatcacctatatcttccccctgatacactgtgggtcccaacaccagatgtcatttctccagagcagtgctaatgaacacaaaaggtataccctgggtggcccagctcttttcacgaacgtgctgccctgctcatagtgatccttgcatcacttggtgaatgggccatctcctgggacatggaagttgcagaggtagatagtgcactgcagcttctcttaagccggattggccatcaggcatatcactctggagtttttagctgctgtcctttccygatgarcagtctgtattagctgacctcagcctacttgttacgtgacgtatgggtcccaaaagtgtcctttgtcaaaaagcagaatgtgccttctagtctccctttccccatctaatggtgtattcgatggtgaagatgagtacagttgaccacccctatctgtgggttccacatccctatattcaaccaagtacagattgaaaaatatttggggaagaggggaaacccacaaagttccaaaaagcaaaagttgaatttgccacatgctgaatactacattgaattcacacaaatgaagtgatgtgtaggcattgagttaggtattgtaaataatctagagatgatttaaagtatgcaagagatgtgcataggttatatgcaaatactgtgctattttatataaaagacttgaacatccatggattctggtattctcagagggtccttgattgccccctttggtaaaggacaactatttcgttactgattttcgtttggggaagatctgtcaatcccttgaggtgcgggggttggggggatggagggtacagggcattctaggatgtgtgccagggagcacagattcaagggatgggattgagtcagwcctgtgttcttactcagtgtcagaaataactctgtggagctcctagagtaagacatttccggaagcaccacataattactgttgggctcttagggtagcccttttagggaattgagcattcccatgttttaccaacaattattctgctgctgtgttttattatattgccaatggttttgagacactcatcatgctcttatttagtgatttcttttcatgagcagagcaacagctcatccagcatggtttccaaatggagaaatttgggtcttctgtagaaaccacacaaattctccaatggcctacagccttatggttggcacactagttggccctatagggtggaaataaagctgtaagatgttaaactgcatttgatacttctcttgaacgctgagcaaggaagcaaaatagttcttgtctttacttaagcttctaagacattttggggcaaaggaccttacagatggcgtctgttgaaagtaacagcaacgtgccagggagaaatgtgggggaaatctcatcaaattctgccacctcaaatgtgttgtccagaagtcagtgttattcagggggccctgtgaaacttgaccaccagcttgcgccatcaacactcagcctttatccagcctgctctcagcttttgtgtttctgttagaaactcagataggtaagtatttttattcagtagactacctttcttatcttttcagcttaatatagctgcatcttctttctcaaagccaaactaagatattcyctattaaaatgtccatgagcctagcattgagtgtctggcatccatcaatttcatagactggaaaatgattgttgtttggtacagtaaagaagaggatgtgcatcagttcctaccgtttgcagctttgtttttagccttcccattttaaaaataaattcaaggacattgagttacaaggcaggagggctggagctactgggcagcctgaatatgacaagcatttgtgtggaaagtcattgctccttctgccacactttgggccatcaggatcattctttcccagaagkgccataaacttgctcaaaagtttctataaatgggaagagggagaggaaggatttttgcatcagtcctgaagttgctatccaaaagttctctgtttcacaaataattttctgaactctggaatgcctctcctactccctgcctccctttctgtaatgtcagagtgatggaaaccaccaagtggcatgctagggaaagcctgcagcagtgttggagtctatttcaccctagctcatagttttaaactgtcttcactgttgaggtagagcttgatgaatgtcatggattatgatgtgtggtttatcatatttgcctggatttgctgatcaaaagcaccatcttccctcgcctgctgctggcagcctttccttgccttgcttgttagcagagcattctgcttacccatgtggctcccagagttagcagccccggctcttggatttcttgattcttctcccctgtgatctcagaggtgctgcagaggacattcccctttagagcaagtcatgtttctattcaggccacaaaactgggatgtacatgcagtgactttggtgttccttgtcttgttcaggggaacgggtgggactgttgtgtgctgtcaccctcttcattccatgagcaccttgttcacttagggtctgctgcctttttttttttctttttctttttttttttttttttagtttttgagaccgtgtctcgctcctgttgcgcaggctggagtgcagcctccaaagtagctgggattataggcgtgcaccaccacacccggctaatttttatatttttagtagagacggggtttcgccatgttggccagactggtctcaaacctctgacctcgtgatgacccccctcggcctcccaaagtgctgggattacacccagcctctgctgccttttcatatttmcccatctgctttatggatcaactctcaacagtacactttttcttttctttacctaccctatgagtgcaacccagatgtaagagttaatcctcgtcagagaatcattgccttaaacctctcagaaatatgtaattaggaaatcttattttaattttttaaaaattgcttgtatagtttcaaagaataagatctggcaaatggccagatgtggtggctcacacctgtaatcaaaccagcactttgggaggctgaggcaggcagatcacctgaggtcaggcgttcaagcnnnnnnnnnnnnnnnnnnnnccgggctgtggcaatcctgtattcccgttcgcaggggctgagcccggtaatgcttgaccccggtggcgggtttccatgagccgagatcgtcctctgcactccagcctggccacagagtggactttgtcccaaaaaaaacaccaaaaaaaaaaaagatctggcggatgaaaataaccagaatgaaaatagctagaaaactcagcaagcaggaagctccctttctcacccttttgttcccttgccgatagaatcagtcactattagaaaaaatgaaagacgctctgtttaaaacaatgatgacagcagtacttaatatgtatttcgaggtgaacttatatagattgagagaggctgcatttggcagactgatgtataggaagacccatttgtttctagcttctccctgcagggaaaatgctttcgtcattatagcctctttacacagactggccattctagtgaaacaggtggtaaacctttgggctgcccagaaacattttatctgttttcacttacctaggaaggggwaagattagcgggtcatccaaaatctgtatgtaagctatcttcattttcttccccaaccttctcctcctgggaaacacaaatgctatctcatctgacaaaaggttttagaggataaagctgaaaagattggattgggatctttttgtggcttggggcggagccttttgctaaaatctcaagaatgctgctttgagtttagctagggtggctctcagaactggggtgcctggcattctcagcatttctcaggggcctcccacctctgacaactgcagtgttagctaatacataccttgagcatagaactgaatgctgtaattcagagccattttttttttcaacttgaacattgtacaattttactgcaatttcctttgaactttcttgccactgtttggaatcttaaaaattcattagccttctcctttctgacataaagctactcttcatcagagatgagttcctatgtatgtcctttgttccttcaatagctaattaatgtrcttgaggatacttcagtggaaaaaaaggtttaaatatgcaaattactaataaatgtgtaaccttatgtaacttgtgttacatcaagtaacaagctaatctagtttgtttcactggactaggcttgtgctccctacttcagtattttgatgctttccttgatctttgtttcacaaaatgttgtgaattttggtatcattcaaaacaaatgacatttattaggtttcattttgaaacgatgtacagacaagtccccaacttagaaaccggtttgttcttaaggttcttgcgtcagcccatagaagcccactgacctccaccacagcccaaatggagggctgtgatagccagatctggttggcttttgtgggctgacccagacatttaatcaccatctcttatgttgttgccgtaagaaatgcattccaggttgggacttgggatcctgagagcacattcgccccctgtggtggccgcttgccaccttgcaagatggaagcccagtctccttactaccaaactgtagttgtaagcagagggaggggtgagatgtttataggacattccctaagctggggagtgatttttatcactattcatgtcaactgtactttggtatagactccctatcaatttaataatatgaaaagcctaaaataaaactatgcatgctattctatgtgctattttatatcagtaaataagcttatgcttgccagttgtatacacagttatgaggtgtatagaactgactttgacagtattttttgcactgtttcctatctgtttttataaagtcttatttagatattggaccttgttgatgttctcactgcccttgtgcttgctataaaatgtttcatatgtgcctttacaaatgtgagatctttattctaacctttttttgtaaaagatayctattgatttccatatgcaataaacctttttttcagagaaaagttacatcttctcttttctgtactgtatatgtttgcattagttgaaagtgcctgggaaaacctgcatgctttgttttctaaagcccatttattgctacccagtttttagtcctgcataaccttatcatactgaagatttagtttgaaattcccaaggttgtcactgttagaagaaacctgaaaggggtgatcactaggcaagtggagtgaagaatacatagaaatgggtctttctcacaaatgcagcaataagcctcgttaagctccaagcccctactcactcctccttcactgtcatttactcaggtaccaaactgttgatgtggaaaaggcaggcaccaaccaggctgctgtagaaaatttaaattcttgcttttgcctttcagctttataacagctcaacttgtgtccaggtttaaaggtggctgtcctgtcccagactttcagccagtaaccaccatagcacattcacggtgaacccctcatatgtgggtagatgctttatgtatccttggtaagtaacagaaaagtataacaacttctcccagtaatgcattgacaaccccatgactatacaagcagttgttgaactaccagagatcccaactagtttcacatcaaaaaaatgagaatactgtaagccactctggggtgagaggatatggcaagcaaatctcattaaacatacacttaattctctatggcgactgtggcaacaaagcaattataattattgaaagaaaggctacataatgttaaaaaagatgatagtagacaaaataggccaatgaaaatggagataaatcgggtagaatggcaggagaacagatacactaattcattttctcttttgtgagctgagcaaatagaaccagtttcttttctttggttgataaacagaaaaagtagaggtttgttacataattgagagagaaaacagtaacctggtagacgtatttgtctccaaatatactgttagcagagctggggaagaaaatttttaaaaagagagaaacagaataattccccacaaaactaaagataagtataagaaacagcaacgcacacacacaaatatgcaataagatgacaataccagaaccaaatatggctattttatgtgattttacctcttattttatttaatgaaaataaatgggaaaaactcaccagatttactagttaagaaacataatgggtgcaaaaaaaaactcagctaaagaaaagaaacatctaacaaaaagaataaatgagacttgtataaacacagcaaaactccttctgaggcaaaacttagacaaattgataaacttaccacattcttgaataggaagactcctgaagaggccagttctctgtatatcactgactctagtgcaagtccaataaaaaaatcacaacaccaccagaaaaattcaagggaacccagaaggattagccctagtatatactaaaagttttgcagtgcaacaatagagtattttactggcacaagaatagatcaatagaatgaaatactgcagaaataaaccaaagtcttagagaaatgataatggtacccttccaaatcagcatgggaaaataataaataattcaacaagtaattcaataaatgaaaactaaaatttattaaggaataccatgggatattttattatttttatttatttgagactgggtctcgctctgtcgcccagcctggagtgcagtggcacgatcttggcttactgaaccctgtgcctcctgggcgcgggtgatcccacctcggcctcccgagtagctgggactacaggcatgcaccaccacgcccggctaatttttgtatttattatagmgatggggttttgccatgttgcacaggctcatcctgaactcctgggctcaagtgatcagcccaccttggactcccaaagtgctgggattacacacatgagccaccatgcttggcctgtatatcttattaaacaattctgcccggcgtggtggctcacgcctataatcccagcacttcgggaggccgaggcgggtggatcacgaggtcaggagtttgggaccagccagaccaacgtggtgaaaccctgtctctactaaaaatgcaaaaattagccaggcgtggtggcgcatgcctgtaatcccagctacttaggaggctgagacaggagaatcgcttgaacccgggaggcggaggttgtagtgagccgagattgcgctattgtactccagcctgggtgacagagcgagactcagtctcaaaaaaaaaaaaaaaaattctagctagatgaaagatttaaataaaaattaatattactttttacaataaaccagtaatagttttattcacttwaagatgaaaacaatctgcttttgtacagcaagggtcatgaaaaataaagttaatggacaactagagtaaaaatatttttaayatatgacaaggagctaataccccaatatatacagagctcagaagttattatgaaagacattaacatatagcaaaacaagcaatggccatgtggtatcacagaaaattctggaatttcatatcaagggtgataggaggctcttttgttttagtgagacaattttttttttttttttgagacacagtctcgctctgtcacccaggctggagtgaagtggtgcgatctcggctcactgcaagctccgcctcccaggttcacgccattctcctgcctcagcctcccgagtagctgggactacaggtgcccgccaccaagcctggctaattttttgtatttttagtagagacggggtttcaccatgttagccaggatggtctcaatctcctgaccttgtgatctacccgcctcggcctcccaaagtgctggcattacaggcgtgagccaccgcgcccggctgtagtgagacaattcttagtggtaccctagatagcttcaggatgggggcaggtcttcagaaagactaagacttgattaggagcttagaactttcagccccatccccaacctctggaaagaaagagatcctagagattgagtcaatttcaatggtgaattaatcaattgtgcttatgtaatggaattgccataaaaccccctgaccaatagcattcagagagcttctgagttggtgaatacatccacatgccaggagtgtggcataccacaactccatgggaacagaagcttctctcaggatccttccggactttaccctatgttcaccctcttcattggcctattcatttgtcttttttataataaaccagtaatagaaagtaaagtgtgttttagagttttgtgagctattctagcaaattaatgaacataaaataagggaggaggtgttgtgggaagcccttgactttgtagccaagtcagacagaagtatggttaacctgggaacctgaataacttgkgactggcatctgaagtgagggcagtcttgtgggactgagcccttaaaccagtgtagtctgacactaactctgggtaattagtgtcagagttgaattgaattgtaggacacacagttggtgattgaagagttagagaatggttgtgaggcataaaaacaaaaacaccacacatttggtttcagaactgttgtgagtcaaaacagctcatattggtgtcagaagtgggattagaaagaccctgattatttagtgtcagaaaatttaggattcactagaatggtcctagctaatggaaaagtggtttgggaagagaaaggatgaaagggtgggagatacagaacytttgattcctgggtggtcatgtagtcacccatgatatggaccagcatgacagctgtgctgttatcagtgactaaatttagttacaaatggaatttggaggtggatctaactgctgaggaattggttcattggatgcgtaaggaaatgtaaatgaataggaaaagtgcagaacatataactycttggtttttgttatatctgtaatagctaaagtgaaattaaaagagtgctggatggactttgatgctaaaccaaactcagattttggtcagtctgaactttggccactagccttgaagctgccctcaaagggtagaattatgtggagacaacaaagggtacctctaagacctctggtcaccaagaagttggtgtgtgtagggggaaggtacaaccaataaactattgaaaccaggggggatagtgtggaagagttgtcgcatttgtagatcaatatcatcagcttcctgaaaaacccttacttaagtggattctgagagtaactgatttagagacagtatctttggttttgaatgctgcagaatgaaagagcatgtctgggttgacagaggactcactgctcactgtggaacaatcacagatggctatatctgacacagacacacagcaggttattcctgaagaaacaaccagcctggtggactggataaaaggcactatgaggtatgtttactctgagaagtgaggctgtccaactccccctataaatgttaaaagcaacactctgatgaagtacctgataaactgtgtatgcaagtcatgtgggactggctttttggtaattgggacactcacccattgaatatgcccattgccaagatcatggtcaatgttatgattaagaggcatgggcaccttttgcgtgggtgtcgcatataactttactgctgcaaaactgagcaacagtcttagaagccctatcaaatttgctctctctgcttcctctcatggttcttactgatgctaattaaaacactagactaattcacaggaaaatatgaattaggcataggtatgaaaggtagagggatgagtccagggattcatcctaagagggtagaaatttttaaatggttaagaaatggagtgaataaagaaaacattgatagtggcaaaacaaaaagcaaaaagaaagggaaagagtcaacagacttgtcccagcagggtgaaaaccttgaatggttattaaaaaatgggatgaggccaggtgtggtggctcacgcctgtaatctcagcactttgggaggacaaggtgggtggatcacctgaggttaggagtttgagaccagcctggccgacatggtgaaaccccatatctactaaaaataaaaaaattagccgggcatgatggtgcacacctgtaatcccacctacttgggaggctgaggcagaagaatcgcttgaacctgggaggaggaggttgcagcgagctgagatcatgccattgcactccagcctgggtgacagagtgagacttcatctcaaaaaaacaaacaaaaaaaaaggtatgactaagacagacattgatagggttaaaacaaaggtcttaatacagcactattaaagtttgggtggaccaaagtgtctcctaatggtattagtccattttcacactgctgataaagacatacccagtctcgggtatgtctttatcagactgggtataaagaaaaagaagtttaacagactcacacttccatgtggctggggtggcctcacaatcatggtggaaggcaaaaggcacgtcttacgtggcagcagataagagagaatgagagccaaagggaaagaggtttccccttataaaaccatcagatctcgtgagacttattcactaccacgagaacagtatgggggaaaccacccccatgattcaattatgtcccaccaggtccctcccgcaacacatgggaattatgggagctacaattcaaaatgagatttgggtggggacacagcaaaaacatatcagtcacccaacattaaagggtcccaaacaagttcactctatttactccagtttggagaaattttaaaagccagaaggccaagattacaatgagaaacctgacctggaatcacaggacaatagtaagattaaccaagaccaagactgacaaaaaggtcagagttctttgcctcaaccccctgctggtgacccaaagctttatgtaaatgaatgggttatgtacatgaatgggttatgtacatgaatgggttatgtactccacccatttagggggtggagaaatttctggaactcctttacatgggggcttcatggactgtggtatccaaacccactggtgaagctctaacataagctagaattaggttgagggaatacagaagagttgacaggattatgaaagttagaatgtttaaacagactttttgtaaaattgtgtctcctttacttgaatgttttgtgggaatggatattatgtcatcttggggaacactttctttacctaatattgtaaaactaaaacttgttgatgatgtccgatggtggctacagttaggactgtaggggttgatgagattaaggtgaaaatttgtacaaaaagttgcatctgaatgtattatggggatggacattaggtttaactgaggaactgtgtctgcaaagaagaaggtgtataaatcatcttcaagcaatattaattggacatgctaaatgggaaccagtaagattgcccaagcccacacagtgtagaataaaagctggagtgctgatatacacaaaatctctgtgggatagttctttgtggagcactggctgggacttacggcaaaagcctgtgagcacctcccagcgatgactactgggactgtggactagaaaatttccatttgagaagcaattcatctcatcagacattaattgaaaatactcctatgactgaagggcataaaataatcttgaaacctgaaatacccataatgccttagatgatgttggagaagcactctaacgtggatggcagtgcccagaagagttccatcataaaatgaaatggtttctacaggatcttgttacctgaggaatgcaaggacatattcacaaacagggaagctgttttgtcctaggactgactggtactgcatgagaagctgtcggatctattgccacttggacagtgcccagaaacagcctttcactaaccaacaaagaactgcttggtttatggactacagttccaaagtgaatggacatctagtttggaaggtcactactctgatcagagaagggtaaaagtcagcttggtggactgaactgcttgctgtttgtcaccacgttttggtttttaccagctcactggtgctggtgaatatggccaggcagaaggggaatggaaacctgggccattaaagggacgggccacacagatgggaaccaccataggaatttgaagagtgcattaaagtaggacctatcaatgcccatcaaaagaaaacccttctgacatcagaaggtaaatggaatcaacagcagataccctcatgtgctcacctaggtggccacctaggtccatgaaatgagtggacatggcagggacaggctgcaataatgcagagatgggctcaatctagacatactcctgttgcaccctctgagaaacaaaatgccagtaagggctgttttgggtggggtggggggccctgaacatagctcacaagtcaggttaatgccagtaggcccaggaggctacaactgggtcctgagagaaatcaacactgactctggactgggatttgcttacccagtggtagatgcaactatgcttagagtgctacaaaagaaccagaagatactgcacccattccagaccaagggacacactttgcagcccaccgtgtcctccagtgggaagagatagctcagcaaatgggcactttgtgttgcatattatcctcagagaaatggcttaatagagaattggaacaggcagttgaaatatttactgtctaaaatggggggagataaaggcaggaagggctggcttccatgccttcacaagtgtgtgctcacataaaataagggggggcctaagggagtgtccccactggagagagtcctgttttcctggtgaaactggggcagaggggttgggaaagagtgctggtatgaccaccattcttcccaaggaaaagatgctggtataaccatacttttttttttttttcctttcctacatcatctcaactttctttttcctatctgatgcagtggtcccaggaccagggctgcaactaccagtgctagaaacagggatgatttctaagcaagaaactgaactacgtttctaaacctttatgtcagaattcttaagggtctgatggggcaggtcaggccttcatcctatctatctggcaaaatcagggttaccagtgaatgcagctctattgcctagtgtcagaaatagcccattagttctgtacctacagaatcctaccgtacctgaagggagtggactgaaggggaggcatttttgttagactagtattgctgtctgcaacctagacaagcacagaggtggaacctaatgtctcttccaaaggtgaatgaacaaaggggataaatggagaggagaaatagcagctgagggcaaaggaatgattaaatgagttatgtaataggggaaatccagtatcgtgctgacatcttgaaaaaggctcagaacaagagatgatattgtctcttagctcaattataccagaggcctgaaagggtaaagacatattgccaagatcactctcgcctgtggaacctgacaagatcaaatagaagcctgtacgcctgagtggcctcagctagggagacattttcatgcagtaggatgatagactggattaccagtgactacacgggaagctagaaatatgccagtaaatatcatccttttttatgagtaatctgtggtcagagaccaaaagggtgtcctttagtgtcatagaaagattatttggtcattgtcctcagttcctgggacacagctcctcttaaaagacccttggaatttcctaagtgataggagtctcttttgttctaatacagcaactcttggtgtgcctctaggtagcttcaggatgaggggtgacctccagaaagaccaagccttaattagaagcttggaatgttcagcctcaactccccaacctgtggggaagatagaagggctgcagactgagttaatcatcaattgctaatgattttattaaatgactaatgatcatttaagtcaaatgatcaatgatttaaaccctgtacaatggggtttggagggcttccgagttggtgtacacgtccatgtgccaggaagatgtcacacccccagctccatgaggatggaagttcctgtacccgggacccttccagaccttgccctatgtacccttcatttgcctgttcatttgtatcctttataataagctagtaataggaagtaaaatgttttccggactctgataagccattctagcaaattatcgaacatgaaggcgaggggattgtggcaaccccctgactttgtggccaagtcagatgatagaaactgggtaacctgggagccaggcaaggtggttcgtgcctataattccagtactttgggaagccgaggtgggaggatccctttaggccaggagtttgagaccagcctgggcaagacagcaagacccacctctaaaaacaacaaaaaaaataacgccactgcactccagcctgggtgaccgagtgagatccttccaactggcatctgaagtgagggaagtcttatgggatggagtctttaaacctatggagtctgacgctaactccagggtagtatcagaatagaactgaattgtaggacacacagttggtgtccaaagagttagagaatagctggtgtgagataaaacctcaaacattcggtgtcagaaagtgttgtgctaaaaacagctcagccatgaatgtcaattcaccgaagaaataaaataaatcctgaatatatgaaaaacagtccaatctcactaataaatgcatataaaacaaaatatttcacacattacattgccaaaaacattttaatgataatacaacgttatgagggagaggaaagcaaatactattatatctatcttatttgtatctgatgcagttttttttttttttttacaaaaggaaatgtggctatatttattcaaattttaaaaatattcccactattggatcttgaaattgcacttccaggaatctattccccaaaatgctaccacacaacgcaaagttttatgtttcagatcattcattgtggcattgtttgtaatagcagcaaactgggaaaaaaaacctcctgtccataaatagaagtaccgagtccatgatgacatgcatccaatgcaatattctgcctctaaatagaatgaggcaaatctgtaagtgctgaaatgcaaagagatccattttgttcgtttggagaagcacgttacaaaatcctatgtcagtaccatcctgtctttgttcttctaaatctatttatatagctacatcatcatccaggaatggaaaaacctgggaccatataaagcaaactgtttatggcagttagctccacgcagtgggactggtgaagaacaaagaagtttacttttttcatatacatttccattacttgaatttactgagaaaggattacttttgcaaattttataaaacctatagagatggtaggctaagtttattttaggcttcgtcacagaatgtatagtaaatgaacat

SEQ ID NO: 96949 - DNA, 21517 bp, Homo sapiens
tctctcgtggggattagaatcccaggccatgtggtgggggtgctcaccttcctgacctcatctgctttgactgccttcatcctcgccttcgtttctcagagattccttcacggcatagaattcgcctgcatttctacatgtccaactttgtttccaggtggttctgacaaccatttgatccttgtggatctccgttccaaaggcacagatggtggaagggctgagaaggtgctagaagcctgttctattgcctgcaacaagaacacctgtccaggtgagaatcatccttgccttctccttcactcctctcccatctgcatttcttctggccaaagttgtagctgatgaatatattggctccggggacagacctcacataaaaactgtagtgggggctgggcacggtggctcacgcctgtaatcccggcactttgggaggccgaggcaggcggatcacttgaggtcaggaattcgagaccagcctggccaaaatggtgaaatcctgtctctactaaaaatagaagaattagctgggcatggtggtgcatgcccgtaatcccagctacttggaaggctgaggcagaagagtcgcttgaacccgggaggcagaggttgcagtgagtggagattgtaccactgcactccagccttagcaacagaatgagactctgtctaaaaaaaaaaaaactgggccaggtgcagtggttcacacctgtaatcccagcactttgggaggccgaggtgggtggatcacgaggtcaggagattgagaaggctaacgcggtgaaaccctgtctctactaaaaatgctgtggtggcacacaccacggtcccagctactcaggaggctgaggcagaagaattgcttgaacccaggaggcagaggctgcattgagccgagactgcgccactgcactccagcttaggcgacagtgagactccgtctcaaaaaaacaaaaacaaaaacaaaaaatggagcgggggcagggaccataccttggctgtctcttggctgtgcctttgtacttggccctgaccctgccagggagcaaaaagactgatgtagagctgttggaggtggtacattcatcagatgagggaggtcagggcctccggaatccagaggctgcatttctctgtgggttgttaacaaaatattgatgacgcatctcagacccagacagatgttaccctcatttttaggagcaaggggcacatcagaccactttgtgtactagtaattaagtcagagtggccaaacgtggttgtgcctccttgtgccttgggttctactttagtttctgaatcagttgtactccttgctagggacagccagtatcctcaggccagttctcttttgcccacatgtccctttttaaatgcaccaccatcacagtggtgacaatgtgacttagggacagagccccgtttatcttgtaggtgacagaagcgctctgcggcccagtggactgcggctggggaccccagcactgacgtcccgtggacttttggaaaaagacttccaaaaagtagcccactttattcacagaggtaaggataaaagtttggaagttgccacatcttattgtgtgtatttagtttctgattgtgatgagtagctgagaccctgccactgaaagacaattctgcaccaaggctgagtgttggggtgggagacagcaaaaaacacatgtaaatcaccttgtctgagagggttataaatttgggctgcccaggacatctgtccaagggtgggtgcatctcagagtaattgaggtaagcatggagaccttgtgccctgccacactccccagctgggggacattctgacatttgtgcctcggcccccagccattgtaccccctttggtgtgtagtgtggggtgactcatttgtgtcttgtggcacagggatagagctgaccctgcagatccagagcgacactggtgtcagagccaccctgaaagagttcaaggagagactggcaggggataagtaccaggcggccgtgcaggctctccgggaggaggttgagagcttcgcctctttcttccctctgcctggcctgcctgacttctaaaggagcgggcccactctggacccacctggcgccacagaggaagctggctgccggaggacccccacttgagagatggatgagctgctccaaaggggaactgttgacactcgggccctttgagggggtttcttttggacttttttcatgttttcttcacaaatcaaaatttgtttaagtctcattgttagtaattctgggacaggttattaaaggatttaaatttgaacctggctttctcacagctggacataattctaggaaaataagatactatgtcgccacttggtcataatcatttagatggtggtgtagggcaaagctgttagaaagattgtagcgttttactctccctgggctttcctccgccttgctgcaacagagaggaaatgcccatgtccacagcttgtacacactgccccctcactatcttgttatccagtggcatgccaaaggagaactgaattagcttctgaggcttctgctgtaaatcagaagtgtatgttagtcaagagtaaacaagatgcacccagtatggtgggagggttttgctgtcagtagctcaaagtatggtgtagaaatggcctcctccctccatcctgggaagtcccagtcccatcctggtgtgagaatcaaccaggctttcctgctccacctgagataaccaactccctcccgtaatcaggaagccaaatgtcaccttcccaaagaaattttattttcacgtagctgaagtgcaaaacatagatgaccatttttaataagcacaatcaaatttttaaccacagaatgtctacaagaattatagctttaaaaaatacaaccaatttttatatttcaaaaatatttgaactcaaataaattaatttcttaaaaagtacacttctcatactatgtgtttggcattgactctggttaactcttgtgcagcaacacctacgagatgctatcacacacgcgccagctgcactcctgcaccagccgctgcaacgactgcacctcacgtggtggcggggactcacattcacaagacgggacgggaacatgcagtaataaaatagctttttaaaaaataacacatataaattcatcacataggattatgcttttcactgcaaccttgaaggtggcatttatctcaatctgtgactccagctatttagtggcagacaatcccggtgaggcagcctgtggtcccaccttgtaggtggcagcccctgcaatctggggtctagcctgtcggcgtttgctttattgtgggtggagcagctgctgcagaatctgtgagttgactcaccagtccctacagttctgctaccaaagtggtcttcaatttaggggcctgacccctccccagctggagacaagctgccatctccagggctcgctgtaaacagcctccactcttgggctgaataagcactcccaagaagctgggcccctaccaacagattaatcggctgcagagtgctcatcccctccccacacccccatccacccctgcctcctcctcctttccactgctttaaccaaaccttaatgaggtaaggccaggctaggtcagggctcaaaggaaaatgggctcaggaaaacttagtttgcccagccttgtcagctgagattggttttgctttccagccagaagtagaaacttgatgctttttcctttttgcagtgttaaaaaccgtatctccagttttattatgttccatcacagttttggggcaaagccagaaagctgacttgtttgcttcaaaacacaaaccaaggcactgtcttctgtgcttttcagggaggtgggaaggtaaaggagactgcccactataggggctcagttcccccaaaggccttgcacaccttctgataaaccccctggctgaggcaatcctactggctgtgcagacaaagatgtgacagcagcactagatgctgacccaacaagcagtgctgggcctgggcggtggggcatgttcagcactgcgggcagcagtcagcacatgcaagacattcagtgagcagagggctgccctcggcctccaactgcagccgccctggcgcgtgaaatgaaattggtgggccttcctaggattgtaaaatgggacttgtcatttgtgtgaggttgaaatctactatactttgaatatggcaactgttttcaaccactgaagcaaagaaggtaaaggccagatggggaatgaaaggtaaggtactgtggtctatttccaaatttgggagcaatgtgtgtaacttcaactgttggagtaaatgagttatggaaaagccacaatttctaaaatcccaaggttctaccaaaggagtgaggttcctggggaaacaggcatgaggcagcagctcaggctgatgtgtcctgtgcgatataaaaagctgtggcctgatctctaaagtggggcttttgaaaatcaccagtccacaactacctgcctggctagtttaacctagactgcttcagaagcaagggagggggataatggactggagaaaaagctgacacaaaactcaagacaaccagtttcagtacctgggccctcaaagcaatagtgaggactgagaaagtagcaaggggcactgatgtcatctattttctgggaagtgttatttttaatggtttcattaaaaacttactaaccttctactggaagaatacctcaaatgaaaaattttttttttttgagacagttttcgctcttgttgcccagggtggagtgcagtggcgcgatctcggctcactgtaacctctgcctcctgggttcaagtgattctcctgcctcagcctcccgagtaagtgggattacaggcacgcaccaccagacctggctaactttctttgtatttttagtagagatggggtttcaccatgttggccaggctggtctccaactcctgacctcaggtgatccgcccacctcggcctcccaaagtgttgggattacaggcgtgagccactgcgcccggcctcaactgaaaattcttgatgagattagtcccactgcataggtctcagcactgaggtttagagatgtgagactcagagtaggtttcagttccccggagtgaagggggcatagggaggggcagggcttcccagtgttaactgcctctgcccaaatcatgactcagtcctggtaccacgtcaagatccctttgaaaggaaacatactttgcatcaagtaatcctttgaaactgccacattgaaaagttagtttttaacccaaatataaatctgggagctaaacactagtcacgaagccatctttacttaatgaagaaccaccttgagggagaccagccctgcttgccacttacatggctgcccctgagacggtctgttctgttcatgccccagcagccttttgccttaggtttcaggaccttctgaaccacccttgagggtgtgtgccagcaaatacctcaagtggacttctacttaggaccacttgagtgcacaacttcagcttctagaaggccaagtgtggctgcaattcaggatctgccccaaactcatcagcccttcccaagtttcccaggtgagaacagtatgagctgtgaatttctgtgttggtgtgacaggaatgccacagtggtggtgccagtgatcactttctgaccttccttccttctcagataaaatgttgcacagttatggccttggaggcctaagtagacagcaattaaccagccagtgagaaaacgaatcagcatctagaacaggaggggagggaaccgtaacagataagggagcccacgattagaagcaggctccctgcacagcctctgcctccagcgcaagtaacagacgtttcacatttaaaggctgccaaggtattgctggcgactctcctgtctgtgaacatgcgcaacgggcacaggtacagagaaccaatgagatgtaggcagcaccatctgccacaaaaggttctccatcgcagccccaggagcaaaatcaaacacctctgatgggagcaaggaccctgaacagaagccaacggctggagccaacgggccatgcccttaaaacgaggacttggacaaggagggaaccactggagtgacgtgatgcaagccctcttcggtcactcttggcttccaccaggggtctctgcctccttgatgagaagagaagctggctggctccatgatgacctcgatggcgtactacaggccgatgggcaggccgggcctcagcagcaggcgccaacagaagcacacccagggctgattcaggtccatttcagcataatttttgtggaacaaattaaagaagcagtaataccagagctgtccccacttagggaataaaattttcaaggctgcaagaaactctctgtctacaaaccagtggccattgcctaaggaggctcggggaggccaggggatcactatcagtgggataggtgctggcggaaccagggggtgtctccttcccagtttcaaacttgtcctcagaagggggactcaactggggacggccgtgagctgtggtgactgaggtgcacacagcctcccagaggcagaacctgaagagcgccacgtggtagctcatccaggaaatccgtgctatttgagttctcatcggctgggccaaccacctgcaccagctgactaaacagaaccgttgctgtcccaagcccacgagacccagtgagaggtagtgaagtggttgcaaaggtttatgtgggtgggagctggagtgtggcctctgccatgttcacacgggtctgcagaccttccccacgaggaaggtcagtgctcatgcgctctggccggcaggagccrgtgggccacccaggagagctgctggctgctcctcccttgcatggtggtgatggcctcatggcgcctcagccctgctctgcctgctgtgctctccagcccccaaggtggtcctcaccattggctttggtcacttgtgcccgcttcacactaggactagtgaacactctgctcgttcctggtgaaagagtatrgggagtgagtcccaaggcccgctcacaggcacttctctcccaggtaaaggtggcgaggacagcggacagggtgctgctcacgctctgtggccctgaggccaaggtcgcatgtttcccacgacccagagggtggcagcctttctcacccccactggctggtccagggcctcccctaggacagtgggctccaggaagcaaataaagggctgcatctgggtctgaaggaggcgatgggtgttctgccctcctgttttccaccaaaccacaacagttacctggctgtcaccctcgttcattttgccactcaagtgtccggcaatgctgaatacagccagtgtgctcctcccatcaggctttggccttcctgccctcaccctgccccaccaagggactggtggcttcccttctgccctggctgccagtcctcagaaaaccaaggccccctccatatccaggggccactcttcaccagggagccaaatgtagctgtcaccatccctccagacgcctttagagggagccaggctccacttctgcccatgtccaacttaaaaactactaggagccacgtgggaaccatgctgccagacaccagaaacttaaacagtccagctcaggcaactgtttggtcatgccaacccctcccctccccataccctgagtcacaggtcttggtcacagtgtctgggaccgacctcagattttatacaaaaagctggggacatagtcaaacctgagcatggggtggctggtccctggagattcctgcatgtagtgcagcttcagcagctcagccaggtactggaccaccctaacatcctcattcaccagacccagggtcagctttaggaagctcatctggcggctggctaccagctcctctgtctccttgtcgtgggtaggmaggtgcaggtggtggcagaaggtgtagaggaaggccttggagcagagctgggtgagcatgctctggacatgcaggtagtaggtgctgccccgcttgatctgtgtgcggtggtctgccaggcggggcaccagggtgcctctgtaaagggggcagcgcagggttttgttgtcaaggtccaggatgctcgtgtagcggctgtagcggctcagggcatggagggtaccggcaccggcaggggaggccactctgaaacagacaggccaaggtcaggaggaagggcaagggccgggaaagtggaggcagaagcttgggaggtgaggcctcctgtccccaggccagcatccacctagccagcatgcactggctcttcctggaagacaaatctgatcattgtaatcttcaaagggctcctcaccactcttatgaccaaggtcaaaaacacgctgggtggcccacaaagccctttgtggtccgattcctgctgaatggactcttttttggagccatggcaagctttcagtggggccttagaattacaaacctctttgttcaggccaggtgcaatggctcacacctgtaatcccagcactttgggaggccgaggcaggygcawcgtgaggtcaggagatcgagaccatcctggctaacacggtgaaaccctgtctctactaaaaatacaaaaaattagccgggtgtggtggcaggtgcctgyagtcccagctacttgggcggctgaggcaggagaatgctgtgaacccaggaggcagagcttgcagtgagccaaaatcgtgccactgcactctagcctgggcaacagagcgagactctgtcttaaaaaacaaaacaaacaaaaaaacctcttctttctgcctgaaataacctctctctcttgtacttagcttaatttaaagcatattcagccttccctgatcctctcctgctttcctgctgtgaccttggccaaattcattaacctctctgagcctcacctataagatggagataacattcctactgtttttatttatttagagacagggtcttgctctgttgcgcaggctggagtgcagtagcacgatcatgactcactgcagccttcatctcctgggctcaaggaatcctcccaccttggcctcccaagtatttggtactataggcgtatgccaccacacccagataattttttgtagagatggaagcttgctatgtttcccaggctggtcttgaactgctgagctcaagtgatcctcctgccttggcctcccaaagatttgggattacaggcatgagccactgtacaggccagttactactattacatccctcatggkgtcgctgtggagacaaaatgagttgtgcttaggacaatgctggccctcggtaggcgctgctgtcatcrccatcactacttttagcctagcactgaccagtggggtgactgctgtttgttcattggcttctccccactggacaagcagctccaagattctagggtcccagaactgcacctgatctggtctcatgcccccaatgcctggcacatcagagccaggaaaagccagtgttcactcagtgaggggagcggttccttaaacaccctcctgaagcagcttccccagagcagcagggactgccctgtagggcccagacatttagggtttacgtcagacaggtatggtgtaagaaggactgacrgtgacttgggaccaaggtactctcacagtactttttccttcctgggttttatcttcttgtatatttaacaatcatttacagagcatctataacatcccaacattgacctgggagctaacactgtaatgaagaatgacctagaactcttgtcctgcatgagctcagtctgattgagaaaaaaagaaatgtgcacaagtacagtgaagtgaagggagacaaggtctcattctccctgggagaggctgtagttgggaagacctgggggattcgtggagttgcctcagagytggccctcagaagcagcgtgggctctagggactgaggagggtgtggcagaccacggcaaaagcaaggtcacagagatgggacagctgagacaggccatgcatactgcatgcatcctgaccatagggacagcactgggctatggaccacatgcatcccacaggcatggaggaactggggcctgcaggtggctgacagctaagaaagctcatgagggcagtgagacgctctcctcaacccatgctgcatggcccctgtgttccgggacyttctcagctctctaacgccttcaccctcacctccctaaagtggggctggccagagtcaaacacctcccaagctccgcacatccagctccacaggtgctgccgccacagggcacccaggcctcacctcccacctttttgcccctccgtctctgctgggatacctgttcccaggcccagcatcccctgatgcagctgacacctgccccaatggtggcacttcttttggaagaagctggctattctaactgttcctccacttctgtttccataaagctcctcctcaggaggccagatgacacgggaagggacaagcctcagctctccagcccccaagcgcacggcaccccaactgcagcctcacattgcacttaccatgcccgccgcaggaggacacctctccaccaatgaggacacagaggactgggtaaagcggcagcttgtgcaaggtcacctagctagcaagtggtcaagccaggactyaacccagggcctctgacacacgctaggctagcactttctccaggcagaactgtgctctgcttttcggtctgggcttgtgactgctgcttagtaagcaataggatgacccctggtgttcacttaaaatgacagcagggccgggctcacgcctataatcccagtacttcggaaggctgaggtgggccgatcatttgagaccagcctggccaacatggtgaaaccctgtctctactaaagatacaaaaattagcctggcatgatggcgcacgcctataatcccagctactggagaggctgaggcacgagaataacctgagcctaggaagcagaggctgcagtgggctgagatcacatcactgcactccagcctgggcaacagagcaagactctgtctccaacaacaacaacaacaaaaaacacacaaaacaaaaaaacccgcaaatgacaggataccagcttggttgtttagccatctcttatccccacagatggctgacccaactacaagcatttccaggcagagtgaaaaaaatcaagggccagcaagactggtgttcggaggtgagagtcctgaaagagagtccatcatgtgagcagtgggcctgagtgaggaggcacacttctgggccgtggtgctcagagtgcagagcctctgcagcgcaacacctccgaggataggaaggtcacaaccaccgaagacatctctcctgctcgtgatttttaaagctgggcctcaggtaggccccagtctgcctgcctgtgtcggtgccggttccaccctctgagtgcttctcagggccmagcactgcactgtgctgtgtttttttggacatgcactaaacgtggacccttccgatggctctcaggtgggccccgggagcccttcagaggtgttcaacaygattgggtgactgaatgagatggttggtccgaatccagacagcgagtggtggcacaccaggacttgacccagaccacccactgctcccgctaactgccacagcccacaacagtttcatcttatcataccctcaggtggcgtctactgctcacctcccccaggaattctttgggtgagctgtagcccatcccattcccgtttggccycgcaggggaccctccagggtgcagggctccccacacctgcccgctgcacctcatgcctgtgtaggatgctggaggcagatgctcccagcacccaacatctgcacgtgctctgaaggttgaaagagcacttacagggacagcagcctaaccctttcccccggagtcatctgtcccttctgatgggccttttgcttttatagagagatgctccctgcagtcgggctggcaatggcgacagataaattccatgtcttacctcacaccaaccgaatcagaacctcgagggcttgtgactcaggaatccatgattttaaaaactttccggccaggcacggtggctcacacctgtaatcccagcactttgggaggctgaggtgggcagaccacctaaggtcaggagttccagaccagcctggccaacatggtgaaaccctgtctctactaaaaatagaaaagttagccgggtgtggtggcaggcgcctgtaatcccagctactcaggacagtgaggcaagagaattgcttgaacccgggaggcggagattgcagtgagccaagatcgcgccattgcactccagcctggggtacaagagcgagacttcgttgcaaaaaaataaaaataaaaataaaaactttccctaataatgctgacacagctcggggacagatggggattggcaaccacctaggaactgcaaccccctcacatgacagacaaggaaatagaaaccagagagggggatgacttgccaaaagtaacacagtggtaggaactgggccctgtctagaagccaggcttcctgattctggctccaccacaccaatatacctcatccctatctggccaaggcccttccccaccacctggaaccagttacctctgcaagccaataagcttccacttctgaaaatccataatgtgcaaaggggaggaggcccaatgtttcacgggcttagcgtagcagccatagctggggacaaagatagccagtgcagtcacgagtttcctgactatggcctcatcttcccccaggaccacaagtgtcctcccactgagcagggagtagatggctgggtgggcaaaggggtactggcggatgaattttaaggcgttctggccagccctctttttatgcctatcggaagacaggccagcaggataagcagaggggatcctgtctgagctggtggacgctacactgctcacrtagctggtggtgtctgagtagttgtccaggctggtcttactgatgtcccggctagccagcaggtggctcgggtccagctcataagcgggaaacccttcacaactgttgtctcgggaagaagggytggcattttccactgaaaagtctacacggaacccctggtccttctgcctgtggcgctgtggggggctgctcaccaccccatcctcgtcagagtgtgtgtgggctggagtggagggcagcaccaactgaccatcgctctccttcccaatacagcaggaggagtctatttgtgatggggtgttttctatgctgccttcctctgtctcacccagttctggaggactgatgcttgcctggaagyggatggctccttcattgccatctggatatgattcttcttcattaatggcacttgggtagctggccttaaagtcatcagggatgagggcctcagagrggcaggtactgaggacttcaatactgtcctcgctgatggtcctgtggctgactgctttgctccggaccacctgggggctcaatggtactgtgaggcttgcctggctgtcagatttagaaagcacggaggtggatttctccgtgcccaaaacttcaatactttcaccactgctgatactccctttcatatccatatccaggtagtccaagttttcctgggggtcgaaactgctcaactcagtcacttccacttccttgtactcctcatctcccagttcctgctccatcttgatcaacacagactccacactggacttgtaagaaccaacactaattaacactttaggaattgggcattcttctagagaactggaaggcggcctgtcttgactgggcttagagggtatgctttcttgtttctccaccatcctgtcatcgacctccacaaagtcttcaaagagaaagtttgttatatgctgttgttttagaagtgctctatcaatctgactggtcaggaggtaacacaggtctcctctgaacatgtgttcaatgtggctgagctgagccagggtctgggtgaaatattcagtgtcacagagctcctccaaggtcttcaacttcttgtcaaaacacttggtggactttgctttgataagttttggggtgtaggctggtctgcaggtgtaaaggtctgtgtcggcagactcatcagggttagaggtagtggatgcctggctggcctgatcctggatgtgctccatctcaccaggacacaaatcatgccccttcaacttccgatgagggtatgagcggatctgcttcagcaggtcttgatgttcratgatggacttctccacactggccagttcattggctttctcaattgcctgagatgagtaaaagcctttgtcgttggctttcttctggatctcygtttctgtgtgtagcactgtcctggtgtaatccaagtctttcagctttttttcaagttccccagcaaatgccttcctgttgccagtcttcaagcactcagaagctctggaaaattcggctgaaagctcctggaactgctgcatgattttatgctggtctgcagagatataagccatgcaaaacggcctcacgaagccacgggcctccaggtcgtatagggtaaggtggtgcacgtatgcaaaggcgccctccttagaatctcccagcaccaccttggagtcctccacgaagttcagcttggggtaggcagatccaggaggatggcccacgaaggaagcctggtaatccacagacatgatacgcagggagaagtaattgagatcaaaagtgccaaaaactttggtgtcattggggatggtcagtaagggttggggtcccacctgctcagagaactcggaaataagaatgaagtccctcgaaaacttggccccggacagttttgaccaggggttagcaccctgactggcgaaggggaagagcggcaccgagtactcctcaggcagggccggctcattgtaaggctcttcttcatactcttcctctttggtgaaggccactacgtcaggggcgctgatcatatttccagatatatgaagaaaacattgagaggaagtgggaaagaatgcggtgttaatcgacgcgcagaaggcaggcctccggagaaggaagtgaagcccttacggccttctttgcgactccccgaacccggggtcctaggctgcttctcacacacccgaggagaagaactctagcagccccctcacagttgtagctcctccggwgctctctgaggcctcatgaacgccaaggccgcaggcccaactgcccttctcttcttcgtccggcgagcgcggccagcacaagaaacctgctgcgaratcacctgcactctccggaacccactgcgacagcaaaagcccccgctctgaacaaggcttaacgcgaggctacgggacgccgcaggggtcagccaagcgctgctgcccctcactgcccgagggcagaaaccgtcgcggctcctaggacgccacaacccggatcctgctaccgcggcgccgccatcttgacatcacatgactcctggtgtccgcgccgcgtgacccggaagcgtcctcgtagacttccgagcaggagattaaaaagtcatgagaaagaggccttggatgggagtgtctggcggctccccgcaagaaggagtccgattaaccaaccactgccgggaaggaggggaaagaggggcggagtgagacgggggcggcgggaaggtggcagaggggaacgtgcttggacgaggggcgcgggacagtctgggagttgtagttccaggtcgctgtggggcgcgcgcctggcggaagtagctggagaaggcgggcggaagttccacgccaagatactggattcggtgctgaggcggcggctgcggcacgggaaaggctcagtgactgaagctccaaaggccagcaggctggtggggacgtgaccgaagcgaggctctggttccctttcggtgggcgccagttgagcctcatctctggcttccccaggatgcgccggcagccggggagcggctccgggcgcgaggtctgaggatgatctttcctgtcgcccgctacgcgctccggtggctgcgacggcccgaagaccgtgccttttcccgcgccgccatggagatggccctccgaggcgtgcggaaagtcctctgtgtggccgaaaaaaacgacgcggccaaggggatcgccgacctgctgtcaaacggtcgcatgaggcgggtaagaaagcgcgttccgatcagctgcgtgccttaagggaggcccaccgagcgggacagcgtggtgggcgccaagaatcgagatgaaggcgattatctcccatttctcaggcctcactgcccctcgtctggattattgcagtggcctcctgtctgctctcggactggagtgcattttaaaacgtagttgatacatctcactcatttgcgtggaaaccttttgttttgcttgcgcttagcaggttcccaaacttgtctgattctcggaatcgcctcgggcgctggctgcccttcgggtcttgtgtgaggctggggaagtgtgtattttactgtttttccctagagattcagaaattcatttgggaactactgaccagattcccttaacttggcattcaagccctgcccgatcgttccccagccaacctagccctccccatcctgtgccacagccactgcattctacagcccttgtgactttccagcctcacagtgcacacttacagcaacacggtaaggtttggggattagatttgaagtcagccctgttcctacccgaatgaactgattctgagagaggtaagtggtaagaatgtgttctacacacacgggaggcacaaacgcaagggaggataagaaaaagtttcataaaggaggtgccacgggagacataaagagctgtccaggaaaatatctcagataacaaaagtagatcctgaaatggttttctggagaacttttctaagagcatgggtggaagttccctgctcatttttctttagttcccagggtcctaagacctgtttccagatcaaggatagtgggagtggagccagggttgtgtgaatgctggctgacagctttacctgtttccagtgctagaagtcctggtgaccagccccaaggtttgtctacttctagacaatgaagtagacattgaaaaatggttctcctacgcctaacttcttatccttcaaggctctgctgaattcattctctctctctcccttttttttttttttttttaagcaatccagaggtcttgtatttatctatttttaccctatcataccatgaatccatagggaataggttccagcggctcaggctcttttccattggttctcacaaagtgtacttccctcaatggaacaggctggcacttcagttgaaccctttctctttgacttgcttcttttttgatcattttccttcacacatttcaggaaagatcttggttcttagagtgcttaatatgctcaatagaaacattaattctttgggcaagaatctagcccttgttcgcagcagtgccaacagcatgctgggtaacatagacttttccagttctgccatgtaacatttgtgggtcattcccttttgaacagtatgcattctcacgaagtcctcaatatcaccttcattgtagattctggtgtctgtggccagagaaactccatatttttgttttgttttgtttgtttgttttgagatggagctttgctcttgttgcccagcctggagtgcaatggtgtgatctcagctcactgcaacctccgcctcccgggttcaagcgattctcctgcctcagcctccctagtagctgggattacaggtgcctgtcaccatgcccagctaattttttgtatttttagtagtttcactgtgttggccaggatggtcttgaactcctgacttcaggtgagccacccgccttagcctcccaaagtgttagggttacaggcgtgagccaccgtgcccagctcgaactccatgttttctataaggccaggagaacatacatcagatgcctcgtcctcttttcctttgtgttcgtcattttggcaaattactccaagatggcagttccagccaaaaggaaagacttttcttggaaagagaatttttatttttatgtacagaaaacacaacagtgtgtacttaacccagtttagtggcaaattctttagcctttgccttttctaggttggtaatgcaagctacagattttggacccagggcattgcctccccagtgacagcagatctcatatgtcgttgtaatttgtcccaccagcttagccagagctcctttgtctaccagaaagttaacctttgtgaaggtgacagtggtgcaggtcttcctgtggaatttgacaccacagtcttgacggtgcagtagagaatccccatcttaggacacagcacaggcaggaagacaaccagctcaatgggatccaccaccagctgacccttcatgctctctaccaagttggtgacggtgtcaacccctgctcgaagtgtaggtggtctcttagtagcgacatcgcctttgctggaagctttcttctcagcctgggccaacggtttcgatctcatcccttgctctgtctcttgtctgtactgtgggccagcttaagcaattgagtagcttaagtttggtagtctgaggcctgggtgaactggtcaatcccaggtggcacatcagccacttatagagtacagcggctctgccgcagcagccatttatagcgggactatttgacaaagtgggtgaggcccttaggctagatatccaatgccaaaattattagggcttttctcaaatgggatttaccacctttttggcctactgctgctccatgacaacaggggccagggccacttcttccccttggccatctttccttttggcatctggggcggctagaggagagaggctgctgaaatgtctcatcttcaaggaatccttccctcaccacctgttcccccacactaggtcagagacccttactgacatgctgtcatagcactctattctacttgaaaggcatatactagttacagttaaataatgggatgtgcgatcatttatttgatttttgtcactgcctctccttggactctaaactccaaaggacagtgattatattttgttaattgctatgtcctaacgcctaatatggtgtctggaatgcaggaaactttcaataaatattaatacttgggctgagcgcagcggctcatgcctgtaatcccagcagttggggaggctcaagcgggcagaccacctgaggtcgtgagttcaagaccagcctggccaacatggcaaaaccccatctctactaaaaatacaaaaattagccaggtgtggtggcggggtcctgtaatcccagctactcacgaggctgaggcaggagaatcgcttcaacccgggaagtggagcttgcagtgagcctagattgcgccattgcattacagcctgggcgacagagtgagactccatctcaaaaaaaaattaggccaggcatggtggctcatacctgtaatcccagcactctgggaggccgaggtgggcggatcatgaggtcaagagattgagaccatcctggctaacacggtgaaaccctgtctctactaaaaatacaaaaaattagccgggcatgctggcagacgcctgtagtcccagctactcgggaggctgaggcagcagaatggcatgaacccgggaggtggagcttgcagtgagccgagattgtgccactgcactccagcctgggcaacagagtgagactctgtctcaaaaaaaaaaaaaaaaattcatagttgttgaatgcatgtttgagctgagcctgaaagttttaccaggcagtagaaactgtaaagaacaacctagtggcttgaaactgcttggcatattcagaaacagtgagaagttaggggtgtggtgtggtgggaagagacaccgatgagttaagcaagagcagcagttgagtgcagatcataagaatcttagagagccatgtaggttgagtggtaaaatgcacagaaaattgaccattttaatcattttgaagtatatagttcagtggaattttgtccactaaatgtgccaccatcatcattatctagttccagaaggttttttttcaccccaagaggaagcctcatatccattaagcagtcactccccttaccctctcctcagcccctcacaaccacgaatctgccttctttccccatggatttgcctgttctgggcatttcctataagtggacccatatcttacatgctcttttgtgtcaggtttctttcacttaacataatcttgaagtccatccatgttgtaccatgtattaatatcagttcttcattccttttttttggtttttgagaaggagtctctctcactgtcgctcaggctggagtgcagtgatgagatctcggctcattgtaaccaccgcctcccaggttcaagcgattctcctgcctcagcctcccaagtagctgggattacaggcacccaccaccacgcccagctaattttttgtatttttagtagagacagggtttcactatgttggccaggctggtctcaaactcctgacctcgtgatccgcccacctcagcctcccaaagtgctggaattacaggcatgagccattgcacctggcctcttcattcctttttatggctgaataatattctatcatatggatagatcatatttcattttaccatacatcagttgatggacatttgggttgttttcatcttttgactattgtgaatagaacttctatagacattcgctgggcgtggtggctcacacctgtaatcccagcactttgggaggccgaggcaggtggatcacgaggtcaggagattgagaacattctggctaacacggtgaaaccccatctctactaaaaatacaaaaaaattagccgggcgtggtggcaggtgcctgtagtcccagctactcgggaggctgaggcaggagaatggtgtgaacccgggaggtggagcttgcagtgagccgagatcacgccactggactccagcctgggcgacagagccagactccatctcaaaaaaaaaaaaaaaaaagaacttctatagactttcatgtacaagtttttgtttgaatgtgtttttttgtttgttttttgttttttgagacagtctcgctctgtcacccaggctagagtgcagtggcgccatctccactcactgcaacgtccacctcctgggctcaagtgattctcctgcctcagcctccccaagtaactgggattacaggcacacaccaccacacctggccaattgttgtatttttagtagagatggggtttcaccatgttggccaggctggtctcggactcctgacctaaagtgatccaactgtctcagcctcccaaagtgtatttgaatgcgtttttaattcttttgggtaaatttgtaggagtggaattgctgtgacatgtgataactctgtaactttttga

SEQ ID NO: 96950 - DNA, 14972 bp, Homo sapiens
aatgagggtagtagcctttgccctggggagagcctctcccttttcctgcagtgaacagtggaggaactagcagctgtatggtcccagctgctctttctggcccgtggagctttggattgacctttagggaaatcgttaattttaaggtctaaaatctttaggtcattaagtatggtccttcagagctcaggttgaggccaaaattgagctgcagagcagcagctgatgaaagtacaaaccaatcaagaatccagcctgtttcctcttgtcaaatttcccctggctgtggtccagatgagggagggtgtcctcatggttctaattcagggggtggaggctgcactgatgctgtgagcccctgcgtctgcctaagcatgcctgctgctttgggtcccaaggcctttgcagaagagctccatgaaagagttcgccgagaactgtgggcctactgtggcagtgagcagctggacgtcgcagacctgcgcaggctgcggtacaagggcatccgcccggctcctggctaccccagccagcccgaccacaccgagaagctcaccatgtggagactcgcagacatcgagcagtctacaggtaggagccaggaggctgcgggttcctgtcttccttcttcagtagatactcttatcagcatactggcacttagggttaaacatgtttttaaaatggaagggcttctaatcacattgtcccttatgctgtcctttttcactcgtagctattctgcattttacttcagtattactgattagtattcttacatcattatttttagatgtatcaatttaaattatttcctcttggcctacgccagatgggagtttagcttatgtataccatcctgtgcctctcctgccccagtttcctgtcacaggcatggtgatgtctttaatccctcccttagagaccgacctttgtccctcagtaatgtcactttgcttcatgctcttgtctcattgcttgtggatggtgtccctgggtgctggtcttgcagagcgcccagccttcccttcagccctcttttctctttacttttacactgttagtaacatttatattcttctgtaatcataattctctgttatgttttgcctgtggattgattctaaaagctgaaaatgacaagctggcatgtgcctttctgagacaaaggcccagacacccggcctcagcgtcctgtgcccagagctgacttggctcgtggttctgtggctgcacattgtcatgtcaatgtcctggttctgtcattactgcagagttcatgtagttgagatggcccaggctaagctcacagttttcagcggaattaataaaaagcatgccatcaaagctgataaaggcatccagatttaagtgagaaaccatgagctgtgctgaatctgcttcagcaggaacaacactaactctaggagtcatgagatctgggtttgagtcctgtttctgccataagctagctgggcgacctctggcaaagcactcacccttcatgttgctctgtttccttgttcatagaatgagtggcttcgaatagatatccttgagggtctgtttgagctctcagatcccaaggaaaactgtctcttctttctcacaatgttgtgggttccttcttcactggagctctcagtcgtccctagtatcagtggccgcacagagccggtggaggctgttcagttgttgttctcatctccaggggtagagctcctgcctgagaaggtctaggcttaggagcaaattagggcacctgtaactgatctgggatggctggaggtgggagtgtagagtctttcccaggcctgtccccctgggttagaggagatctgcatgtcccgaatttgtttcttcacctggcaggaatttgctagacttctctgatcacagctttcatgctgtgtcatgtgtctacctagaaggcatgagctcgctttggttcacttgttcaacaagagttcattgagtgcctgctagctgcaggccctgtgctagacactgagtccataagcattttccctgtgttgctccctctaggcattaggttaacagaatcattagcaatggcacctgcttcagcagtctcaggcctctacttctccaatttgaagtccaaatattttgctgtggggaagatttccaaggatcaggtaagctagctgttgcattatatgtggcttgcctagttcaaatgaaattctagaacctctctcattttaaatgtgaatgagaataaagtgaggggaaaggatgaagaaatttactccagttaatgtcttaatttgatttcaatagaatacctctattctagccctcacttctacatgcaagccacacacacgcacacacacacacacacacacacacacacacacatacagcttctaagcatcagatgtttactacatgtttttctgcccagagaaaaaggcaacttggtagataaatatctatctccatttaactctgtagattgctattaagacaagaaatgcaaggtacttaatgtttcttggcaaatcttgtggaaacttctattccaaaagtcttatcatgttggtttaataaaatgcttctcatcttttgcaggttgaggattatgcattgaggaagaacatatctgtggctgaggttgagaaatggcttggacccattttgggatatgatacagactaactttttttttttttttgccttttttattcttgatgatcctcaaggaaatacaacctagggtgccttaaaaataacaacaacaaaaaacctgtgtgcatctggctgacacttacctgcttctggttttcgaagactatttagtggaaccttgtagaggagcagggtcttcctgcagtgcctggaaaacaggcgctgtttttttgggaccttgcgtgaagagcagtgagcagggttcctgtggtttccctggtccctctgagatggggacagactgaagacagaggtcgtttgatttcaaagcaagtcaacctgcttttttctgtttttacagtggaatctaggaggccacttagtcgtctttttttcctcttagaagaaaagcctgaaactgagttgaatagagaagtgtgaccctgtgacaaaatgatactgtgagaaatggggcattttaatctaagtggttataacagtggattctgacggggaaggtgtagctctgttctcttcggaagacctcgttttctaaaggctggactaaatggctgcagaactccctttggcaaaaggcatgcgctcactgcttgcttgtcagaaacactgaagccatttgccccagtgtggtcaagcagccatgctttctgggcattttcgtcctcccataatttcatatttccgtacccctgaggaaacaaaaaggaaatgaggagagaaagttactgttaagggtggttaacattttttttgttttgttttgttttggtttttttttttttgagacagagtctggctctgtcgcccaggctggagtgcaggggcgcaatctcggctcatagcaagctccgcctcctgggttcatgccattctcctgcctcagcctccagagtagctgggactacaggtgcccgccaccacacccggctaattttttgtgtttttacaaaatacaaaaaagtagagacaggatttcactgtgttagccaggatggtcttgatctcccgacctcgtgatctgcccacctcagcctcccaaaatgctgggattacaggcgtgagccaccgagcctggccggttaacatcttttaattgtttccaggattgagcaggttctcagctgggctctgatatcccgtgcggagttggacaagtgggcagcataaagtcactcatttcttaccattttattcccctcaattctcaatatattcagtaatgaagaatggtgccaccactcaagcaacaagcctcaaactcaaccatgtcatctttttcttggatgattgcagttatttcaaaaatttgcatgcaaaatatacactcatcctacttcaagatggtggtggcaatagtcaggagaaggtaacattggagtcctggtttgattcgaaggatgaagacgaagaagcaagggaggaacaaatgaagaaccatctttgttcatgaataggaatattcaagattataaaggtatcaggtctcctaaaattgatctatggatttaataccattttcaatggaaattccaacagattttattgaatgaaacaagcaggtgtttatatggagtagcaaaggacttaaaattaccaaatgcttctaaatatgaaggagaggttggggacacgcaccctatgtgataccaagttttattgtcaagacagtgtcatggtgcagaggtaggcattctgagcaggggaacaaaataagggcctagaaactcacccgtgcatatgttgacctttgcaaaatgacctggtgacatggcaagtcagtggggacaggaaggaccactccctaagtaatcccagaacaatggctattcatgtgggaaaaaaagaaattttactttctctcaccttacctggtgataagttccaaatatgttaagggctttaatacaaaaagcaaaaattgtcagtgtttggatgaaaaaagccttagggcaggaaagaatctcttgagacataaagtagtaatcataaaggacaagatggttaagtcaattctgttaaaactcaaggcttatattaagcaaacacttgaagtgagaagatgatccacaacttgagaagacatttataatacaaataactgatgaaggattcataatcacaaatatagagaattcctatttaaaaaaatagaaaaatagtgaagactacacaagaggaaatagggcttttaaataaatagatgttctgtagcattggtcagggaaatatgaattaggaccacaatgagattccattttatatccataagatttgcaaaggttgggtctgacagtaccagttgttagatctgtagggacttgtacaacattgtggatgtgtaaacaggcaccactgctttaaaaaacaattatcccttacagacttgaacatttgcagacgttatgatcttgcttccaactcccacctgtatgtccagcaaactcttgcatgtggccactaggaggaatgtgtaagaatgttcatagttacatatttataatagttaataactggaaaaagtgaaatgtatgtctgtctacaggaaaataggtgaataattagatatatatattcattctacgggatattattcagtagtggaaatgagtgaactacagctatacctcacaataagaatgaatctcagaaaatattaaggaaaaaagcaagtttgaagagaccacatggggcgtactatttttattgagcccaaaaacaagcaaaaccaaagaatatgtagtctaagcatacgtatacaataaaactatgctattaaaaaaaaaaggtaactgataaaccaaaattgagcatagtaattacccacagaaggaggaagtggaagggacaggagcacataggtagatgccaagttatgcagctgttctggttcctcctggtaggcttacaagtgtttactatatgctattaatacattatactttataactaatagataacagttttttacatattaaatatgttctacttaaatatattataaaaaataaaggcaaagtggaatgataacctaaaatctggtatggtgattttgtaggtaatgtttgtatatgtcaaatacagtttttaaggaaaggaagaacatcttagggtaaacagcagctagaaaggtgaggggcaggagagtggtgcatccttgctgctgccagcagtgcccagataccaggctttggggaatgagtggatggctggaccatttgctaagacagaggccaggggatgggagaaatgatgagttttggaaagattcgatgtgactagactgaatataggcagttggatactagactttggaatttaaaaagaatgtctggagttagaattgagagacttgaacgtggagatggaggtcaggctgcagtgcgatgggatcatctatggagcatatgaggagaagagaatctggaggaggaggagggggagccagcaggggagcagctgtgggttggaggaagccaggagggagagtgcaatgccgagaaagcaatgaagagcgtttcgaagcatgccagcagaacccaatgctgcaaagaggcctgggaatgggattgctgagggcccttctcacagtgagcccctcaagagcagcgtcaggggattgtggggactgttggcacacagctggctttgctaggttgaagacaatgggaggtgtggaagacttgttgackcatttaaagaagattggagggaaaggtaggattgagagtgtttcagacagaaaaaggattatatgctgagggtaaagcacaagtacagagggttgcagatagtgcagaagtctttaaaaacaattattttaacccaacttccagggagactgaatttcttctgccagtcagtaacaccatcaacctgggagttgcccctgacccctccagtcttagctcctgctcctgtaacaaaataccacaaactggttagcttatagagaacagatgtttatttcttacagttcaggagtctggaagtccaagatcatggtgccatcatggccgagttctggtgagggccctcttctgggatgcagcggccagcttctcatgttctcacagtgggtggagggtaagcttgctctctggcctyctcttaaaaaggcactaatcccattcatgagggctccaccttcatgacctaattacctcccaaagatgccatctccaaacaccatcattctggggattccattwcaacatgatttgggggatacatcagaccataacacttttctttttctcaaccttcacatccagttggttctcaagccctggcgattttacgcgctagataggtcttaagttcatctctacgcctgccctggttaaggttctcatcatttctcctctggattcatctgcaacacaggctgcygggttggttcccacctcctagagctggaagagtgggctctctgattctttacacccccgcctcaatcctcctgctgcctgaataaccatctccccgtgacctaggatatatcccagccccttagaggcatgcaaagccttccatgtctgaccctgcctcatgtcttggaagccctagactgctgctgtaccctgaaggaggtacctgctcacattggcccctctgtctggaataaccccaccccggttccacccaaktcaggaaagcttcccaacccctccctcccaccaccccaaagctaagtgaagtgacccctcttcttgcctctgtaacaccgccatgcacatttcatacagcccttgctgaaacttcatctagttctctgttagacttaacattccctaagggcaggtttggaaccttactcatctttatatggcgtctaaaatagtgcttgctttatgataggtgctcagtaaaggttgtcttgaattgagcagatcctctagggacaggagttggatggagagcagactgtaaagcctcatgagggcaggggccctgcctcttcctgagctcaggatacccagagcctagctcagtgcctgccatgaaattgttcactccatcaagccttgttaaatgagttcggggcggggggagcatgatggttttctctctctcagaaagaaagcgctgtatcaaagccctagcaccctctctacacccaccttcagtatttcatattagatgcggcccaagtgatactttctttaccgtcccgtgaagacagcatattggcagccctgcaaaaacaaaacaaaacaaaaccctcagttcatggcatacttgctataaatcagctatgtgtattgtcaaattgtagaactgaaagtatattctgattcggtgtgtgtataaggaaatatacaccagtatatgcattaaaacgtcaagaagagctgggcacagtgtcacatgcctgtaaacccagctattcaggaggctgaggtgggaggatcggttgaggccaggagtttgaggctgcagtgagctatgattgcacagctgcactccagcctgtgctgagacctcatctcttaaaaaataaaaaataaaaagtctaagaggatacacagaaatttttaagtggttacctccacggaatgggattaggggatcagaggtgagggaactcatggtttggctatttctcgttctttctgcactgtttcaaatttttacaagtgtatgttattgtacttttraaaagattagcttggcaacaagtctagcctgaaatgggtgctattttgactagtctgagtgaaaagtgaggatttaaatgaagtaacccctaaactcagccagtcccatgtttttttaacacttggaatatctaattccatttacactgcattcttcaaatgtaattttcaaagatgccttttgcctcatcccttgcttttaagtattattatagacttttggagactcacraaacaagcaatccctaaattctcgccyaggaaagtatcttggattaaatggtttttgagaaccttgagagtgtatattctatgaaatggaagaaacaagaactagacagagtcacaaatgctgttgatcacagacaatctctgccatccataaggtaaatgtaatacatctggcgacctgctgagtgtgaacttgcagcaggtgrggaaggaactctgaactctcacaatcttgtttcttcatttcccagagagaaactcggcaaagagaaaaaggacatttccctccaggttatctgaaagaatttcaatgcttacctttaatcatgtgacattgtttatcttggattaaaagaaaagaaaatgtatttattttgtgcatattttcaataaaatatataaaatcgagttggtatatagtgccaaataccattaattaaaaatattttaacctgatatgatagattgttgaatttttaaaaattgtattgagatgagcttatcaagaaaatttgaaggattccaggggaaaacattttagtgttaaagtacttgattatttttaagataatgcagctcttttcagaaaaggtagcagttagctccaagagatatttcaatggctcatataaagccttccagtcaccatcagatatttccttacattgctatgggcaagtactaacatccagtttaaaaccattgggaatgctgaagtacagcaaattgaggtgacagcttggtccccagcagagccaggactgcttcctggtctgcaggagcccatttctctccactgggccttcaaattaaatcttgaggctgggtgccgtggctcatgcctgtaatcccagcactttgggaggccaaggtgggcggatcacctgaggtcgggagtttgagaccagcctgaccaacatggagaaaccccgtctctactaaaaatacaaaattagcagggcgtggcagtgcatgcctgtaatcccagctactcaggctgaggcaggagaatcgcttgaacccgggaggtggaggttgtggtgagccgaaatcgtgccattgcactcgaacctgggcaatgagcgaaactctgtctcaaataaataaataaataagtcttgaataaagttagggatcaaatatcaatcagtggacgtattaccgccccccccccaaccaaaataaattggtgagttacaaggaagtggacacatccatgaatgttttttagtcctgtttggcatagaaatgagtttgttctcttttgcagttagaaacattgtcaatcagctgaaaataattcagaaacctagttatgctttacactccaattgtgcattattacccaacagatcagataaaaatcaagagaaagaccctgtgaaatttctccatttgttaaaattaaccatcaactgggaaaaatagaaaaaaacaaaccttttcctaaaagagacagggaggcatggtacccattctatttgctaaggcactcaaggaggaaagatcatcatatgcagtagataatgtcagaaccaaaaatctagcaattctgccaggcacatagtaggaacttaaatatttgttgaacagacgccaagatgccagctagtgccctccagagattttccaggcaagttcagagatgtgctgccactgtccaatgcaagggaacagacaactgcacagaagcaaatctggtccatccatcagcggcctttcaaaacctacaatccagtgatcgctgatactcataatgatgactcataagtgttgcaatattcctgcagtaccttctgaatcatcaaagactcatcaaaattcagtgtcacttcagtactaagtacactttaccatgtgaatcactgtatttgaaggttgaccacccaagtttgataaatgtgacccctgtcctttaactggaatatagattaagcaacatttttccttctcccaactatgccagatagcagagcatctgctgctgctataaccctgtgtcgaaagagccaagcctgactttatttaagctatagagaggggtgctgaagtgaagaagatggtttatcatggtgaatggaaaagatgctacagaacaagagagtgtgtcctgacaaggaggtcagctcaaaccctggaagctgaaggggctggtgtgaggcagagttgagtcatttaataccattggcattgaaggggaaggaaggcgctaattttggatggtttgtatcagattagcaggagcatctgacttaagaaaacagagtaattattgggttttgtcaagtgaaaagtgcggtttggctttggatgccacctttgaaattttacttgaaaagtgaggagggttgaagagaacgggaaagttgagaactctggaaggtgggaagagagaattttctaaaggttttgtaatataagtagcaaacatttgtggatatatatttggagatgagagagaggaaacagtaatgaggacatgactgcccccaaaatggggagagatggaaaggactttacccaaccattttcctaccaacattaaagggataaaacatgccttctgtagggaaatggatgtcccattccatccagagggatgggtgtgcttttttttctttctttttttctttttttttttttttttttgagatggagtcttgctctgtcgcccaggctagggtgcagtggtgcaatcttggctcactgcaaccttggcctcctgggttcaagcaattctcctgcctcagcctcctgagtagctgaggttacaggcacccaccaccacgctggctaatttttgtgtttttagtagagacagggtttcaccatgttgatcaggctggtctcaaactcctgacctcaagtgatccatccacctcggcctccaaaattgtgggattacaggtgtgagccactgtgcccggccaaagtctgttattttgtagagttgattggtatttggttatcaaggctgtgctaagatttgcagcgatagaggaataaacatttatgtctgccttttaagcttctcttccaatgagctcaaatagtggttatgatattagagagaggaaatgctggctggacaaatttcctctacttttgctttagctaagatccccaagaggtgaaatatttgctgtaatatggcatttgtgcattcattcatattatctgttcattcatcaaatatgtattgggctagatcctgtgccagggctggacatacaatgctaagaaagtaaaattccccgccctcatggagaataacattcttcacagagtttgtggggaacagactccctccagtaccttgtgtttctcaagtcttaaactcatcctctgctctggatttaaaagcaaaagtggcatctccgggtctctcatgtaatatttggaggaacattacacttcccatgtatatttcatgcctctttcccaagattttactgctgcttctaaggcagctaacagtaggtaggaaactttgacctctctttcactttgcccctttaggacctccagttttagacttcatcaagcaagcctggtttcatttcttcttgcttagcctgatgaaccagtgtgctgtacaccactgttggaaacactggtacaaagttctggtacagaactctttctgaatattaatctcctgtattgctatgccagaatcaggtaagaaggggtgtgtgtgtgtgtgcgcgtgcgtgcacgcacgtttgtgtactcacaaatgtgggcacaccattctgtatgttagaaggaaagtctgtgattagctgtgagcataaacacagctaacctgattccgggttgcttcatgaatacagatcccagagcagctgtcaagctttccccctccttatctcatcccgaccttttgggaacaaaagtgcccagacatctccccctgcagattaacaagctgcacttcagaggagcatttactgataaacatctgccttccaaagagaaaccatttatttaacaagctgctctttagaaatttatagttgcagcttgccttcttgccattgctctaaatcaagattcccttctttgtcctcctctatttttctttactaaaaatttgcttgttgagcattggtataatttccaaggagtcagtgttcatgctaacataaatttttttaaaagccccaactcggtttaaaattacttttttgttcactcataaaggatatttatgagtaaaatctatagaacccagtttgtcatattaaactgccaggctgtgccctcaaatgcccagaaaagagaaatgcatttaaccaccaaatctccaacagacttcatccttatcactctttggttttgtgtatgttgacctgctcttggtcactcttgtgttgtgtgtttgagggtatagatcattttgtaactttacttacattatagggtatatgtattatctcccagattaaactgtaggatatttaaaagggcaagaactctctcttccgctttcgttgtatgttttagaagatctaaagagtttgaagagagcagatgtgatgtgtgttaactaatagtctgatgtgaagtgcacagttgtgtgaggggactctgaggtcagacctgtctttgatcttttcagaagacatgtatgtgattagctgtagtgcataaatagggttccatgttgtgtcataaatgcctcccctctcatgccttcaaaaatcagtcgctgggggaccttgggcaggttgtatgccctctctacgaggcagcttcctcatctgtaaatgaccatagtgctaccactcacctcacaggacagtgcaagaaatcaatgccttaatccacagaaagctctcagcacagggcttggcttttaaaagaaatcttcattaactgaagaacaataatgaagacccttgggagaggtttaattttttcaattcttcaaagccatgctttacagaaaaagtgaatgcaacacctcatcaaaatacctcatttgatagacaatgtgtataaatctccctgtgaatgccagtagcacaagagaagtgtagggagggaaacttgactgtggtgagactggatattttccagagggagctgtaaacattgcagctatagacagccttcctgttacagatttgacaccttacaaatggattactctgctcattaggataattataccagacatgctggatggtttagtggaacccatctcacacctggaaaagcaccccaaatacactaaattatacttgcattaatgtcttagtccatttgtgttgctataaaggaatacctgaggtggggtcgtttatagagaaaagaggtttatttggctcatggttctgcaggctgtacaagaagcatggtgccggcatctgcttctggtgaggcctcaggaagcttccagtcatggaggaaggcaaggggagctggcttgtcacatattaagagagggagcaagatagagggggagggaggcaccaggctctttaataaccagatttccatgaagtcactcattacagcagggagataccaagccattcatgagagatccacccccatgacccaaacacctcccaccaggccccacctccaacattgggagtcacatttcaacatgagatttggaagagacaaatatccaaattatatcaattaagaaagccaattttaaaacgttgcattttttattataaaacttttttatcacaaaaagcttgtaaactatatacaagtatacagagaatattttcttccattgtttttcattttccttctctcttttctcccgtccattcatgagtgagtaggctgaataatggcttccaaagatatcgatgtcctggaggacatcatgttaagtgaaataagccaggaatgaaaagacaaataccaatgatcttgctcagatgtggaattgaaaaaagttgatctcgtagaagtagagagtagaatagaagttacaagagaatggaacagttagggagatgttggtaaaggataaaaaatttcaggtaggaggaagatggctttgaagatggaggaaagggccatgagccaaggaatgcaggcagcttctaaaggcagaaagccaggaaacaaaattttcccctagatcctccagagagagagtgtggccctgctgacaccttaatttctgacttgtttctccagaactgtaagagaataaatatgtgttgttaataagccaccaagtttgtggaaatttgttacacagcagtaatagaaaatgaatacaccataaagctatcaatttttatatctatcaacctacctacccatgtatcatcttttttatatgactgatatgttatagtatatatgtatatatccatgtattttcatgtatatattttattgtggtaaaatacacacacatcttgt

SEQ ID NO: 96951 - DNA, 32356 bp, Homo sapiens
  misc_feature (1)...(32356): n = A,T,C or G
nnnnnnnnnnnnnnnnnnnnnnnnnnnnnnnnnnnnnnnnnnnnnnnnnnnnnnnnnnnnnnnnnnnnnnnnnnnnnnnnnnnnnnnnnnnnnnnnnnnnnnnnnnnnnnnnnnnnnnnnnnnnnnnnnnnnnnnnnnnnnnnnnnnnnnnnnnnnnnnnnnnnnnnnnnnnnnnnnnnnnnnnnnnnnnnnnnnnnnnnnnnnnnnnnnnnnnnnnnnnnnnnnnnnnnnnnnnnnnnnnnnnnnnnnnnnnnnnnnnnnnnnnnnnnnnnnnnnnnnnnnnnnnnnnnnnnnnnnnnnnnnnnnnnnnnnnnnnnnnnnnnnnnnnnnnnnnnnnnnnnnnnnnnnnnnnnnnnnnnnnnnnnnnnnnnnnnnnnnnnnnnnnnnnnnnnnnnnnnnnnnnnnnnnnnnnnnnnnnnnnnnnnnnnnnnnnnnnnnnnnnnnnnnnnnnnnnnnnnnnnnnnnnnnnnnnnnnnnnnnnnnnnnnnnnnnnnnnnnnnnnnnnnnnnnnnnnnnnnnnnnnnnnnnnnnnnnnnnnnnnnnnnnnnnnnnnnnnnnnnnnnnnnnnnnnnnnnnnnnnnnnnnnnnnnnnnnnnnnnnnnnnnnnnnnnnnnnnnnnnnnnnnnnnnnnnnnnnnnnnnnnnnnnnnnnnnnnnnnnnnnnnnnnnnnnnnnnnnnnnnnnnnnnnnnnnnnnnnnnnnnnnnnnnnnnnnnnnnnnnnnnnnnnnnnnnnnnnnnnnnnnnnnnnnnnnnnnnnnnnnnnnnnnnnnnnnnnnnnnnnnnnnnnnnnnnnnnnnnnnnnnnnnnnnnnnnnnnnnnnnnnnnnnnnnnnnnnnnnnnnnnnnnnnnnnnnnnnnnnnnnnnnnnnnnnnnnnnnnnnnnnnnnnnnnnnnnnnnnnnnnnnnnnnnnnnnnnnnnnnnnnnnnnnnnnnnnnnnnnnnnnnnnnnnnnnnnnnnnnnnnnnnnnnnnnnnnnnnnnnnnnnnnnnnnnnnnnnnnnnnnnnnnnnnnnnnnnnnnnnnnnnnnnnnnnnnnnnnnnnnnnnnnnnnnnnnnnnnnnnnnnnnnnnnnnnnnnnnnnnnnnnnnnnnnnnnnnnnnnnnnnnnnnnnnnnnnnnnnnnnnnnnnnnnnnnnnnnnnnnnnnnnnnnnnnnnnnnnnnnnnnnnnnnnnnnnnnnnnnnnnnnnnnnnnnnnnnnnnnnnnnnnnnnnnnnnnnnnnnnnnnnnnnnnnnnnnnnnnnnnnnnnnnnnnnnnnnnnnnnnnnnnnnnnnnnnnnnnnnnnnnnnnnnnnnnnnnnnnnnnnnnnnnnnnnnnnnnnnnnnnnnnnnnnnnnnnnnnnnnnnnnnnnnnnnnnnnnnnnnnnnnnnnnnnnnnnnnnnnnnnnnnnnnnnnnnnnnnnnnnnnnnnnnnnnnnnnnnnnnnnnnnnnnnnnnnnnnnnnnnnnnnnnnnnnnnnnnnnnnnnnnnnnnnnnnnnnnnnnnnnnnnnnnnnnnnnnnnnnnnnnnnnnnnnnnnnnnnnnnnnnnnnnnnnnnnnnnnnnnnnnnnnnnnnnnnnnnnnnnnnnnnnnnnnnnnnnnnnnnnnnnnnnnnnnnnnnnnnnnnnnnnnnnnnnnnnnnnnnnnnnnnnnnnnnnnnnnnnnnnnnnnnnnnnnnnnnnnnnnnnnnnnnnnnnnnnnnnnnnnnnnnnnnnnnnnnnnnnnnnnnnnnnnnnnnnnnnnnnnnnnnnnnnnnnnnnnnnnnnnnnnnnnnnnnnnnnnnnnnnnnnnnnnnnnnnnnnnnnnnnnnnnnnnnnnnnnnnnnnnnnnnnnnnnnnnnnnnnnnnnnnnnnnnnnnnnnnnnnnnnnnnnnnnnnnnnnnnnnnnnnnnnnnnnnnnnnnnnnnnnnnnnnnnnnnnnnnnnnnnnnnnnnnnnnnnnnnnnnnnnnnnnnnnnnnnnnnnnnnnnnnnnnnnnnnnnnnnnnnnnnnnnnnnnnnnnnnnnnnnnnnnnnnnnnnnnnnnnnnnnnnnnnnnnnnnnnnnnnnnnnnnnnnnnnnnnnnnnnnnnnnnnnnnnnnnnnnnnnnnnnnnnnnnnnnnnnnnnnnnnnnnnnnnnnnnnnnnnnnnnnnnnnnnnnnnnnnnnnnnnnnnnnnnnnnnnnnnnnnnnnnnnnnnnnnnnnnnnnnnnnnnnnnnnnnnnnnnnnnnnnnnnnnnnnnnnnnnnnnnnnnnnnnnnnnnnnnnnnnnnnnnnnnnnnnnnnnnnnnnnnnnnnnnnnnnnnnnnnnnnnnnnnnnnnnnnnnnnnnnnnnnnnnnnnnnnnnnnnnnnnnnnnnnnnnnnnnnnnnnnnnnnnnnnnnnnnnnnnnnnnnnnnnnnnnnnnnnnnnnnnnnnnnnnnnnnnnnnnnnnnnnnnnnnnnnnnnnnnnnnnnnnnnnnnnnnnnnnnnnnnnnnnnnnnnnnnnnnnnnnnnnnnnnnnnnnnnnnnnnnnnnnnnnnnnnnnnnnnnnnnnnnnnnnnnnnnnnnnnnnnnnnnnnnnnnnnnnnnnnnnnnnnnnnnnnnnnnnnnnnnnnnnnnnnnnnnnnnnnnnnnnnnnnnnnnnnnnnnnnnnnnnnnnnnnnnnnnnnnnnnnnnnnnnnnnnnnnnnnnnnnnnnnnnnnnnnnnnnnnnnnnnnnnnnnnnnnnnnnnnnnnnnnnnnnnnnnnnnnnnnnnnnnnnnnnnnnnnnnnnnnnnnnnnnnnnnnnnnnnnnnnnnnnnnnnnnnnnnnnnnnnnnnnnnnnnnnnnnnnnnnnnnnnnnnnnnnnnnnnnnnnnnnnnnnnnnnnnnnnnnnnnnnnnnnnnnnnnnnnnnnnnnnnnnnnnnnnnnnnnnnnnnnnnnnnnnnnnnnnnnnnnnnnnnnnnnnnnnnnnnnnnnnnnnnnnnnnnnnnnnnnnnnnnnnnnnnnnnnnnnnnnnnnnnnnnnnnnnnnnnnnnnnnnnnnnnnnnnnnnnnnnnnnnnnnnnnnnnnnnnnnnnnnnnnnnnnnnnnnnnnnnnnnnnnnnnnnnnnnnnnnnnnnnnnnnnnnnnnnnnnnnnnnnnnnnnnnnnnnnnnnnnnnnnnnnnnnnnnnnnnnnnnnnnnnnnnnnnnnnnnnnnnnnnnnnnnnnnnnnnnnnnnnnnnnnnnnnnnnnnnnnnnnnnnnnnnnnnnnnnnnnnnnnnnnnnnnnnnnnnnnnnnnnnnnnnnnnnnnnnnnnnnnnnnnnnnnnnnnnnnnnnnnnnnnnnnnnnnnnnnnnnnnnnnnnnnnnnnnnnnnnnnnnnnnnnnnnnnnnnnnnnnnnnnnnnnnnnnnnnnnnnnnnnnnnnnnnnnnnnnnnnnnnnnnnnnnnnnnnnnnnnnnnnnnnnnnnnnnnnnnnnnnnnnnnnnnnnnnnnnnnnnnnnnnnnnnnnnnnnnnnnnnnnnnnnnnnnnnnnnnnnnnnnnnnnnnnnnnnnnnnnnnnnnnnnnnnnnnnnnnnnnnnnnnnnnnnnnnnnnnnnnnnnnnnnnnnnnnnnnnnnnnnnnnnnnnnnnnnnnnnnnnnnnnnnnnnnnnnnnnnnnnnnnnnnnnnnnnnnnnnnnnnnnnnnnnnnnnnnnnnnnnnnnnnnnnnnnnnnnnnnnnnnnnnnnnnnnnnnnnnnnnnnnnnnnnnnnnnnnnnnnnnnnnnnnnnnnnnnnnnnnnnnnnnnnnnnnnnnnnnnnnnnnnnnnnnnnnnnnnnnnnnnnnnnnnnnnnnnnnnnnnnnnnnnnnnnnnnnnnnnnnnnnnnnnnnnnnnnnnnnnnnnnnnnnnnnnnnnnnnnnnnnnnnnnnnnnnnnnnnnnnnnnnnnnnnnnnnnnnnnnnnnnnnnnnnnnnnnnnnnnnnnnnnnnnnnnnnnnnnnnnnnnnnnnnnnnnnnnnnnnnnnnnnnnnnnnnnnnnnnnnnnnnnnnnnnnnnnnnnnnnnnnnnnnnnnnnnnnnnnnnnnnnnnnnnnnnnnnnnnnnnnnnnnnnnnnnnnnnnnnnnnnnnnnnnnnnnnnnnnnnnnnnnnnnnnnnnnnnnnnnnnnnnnnnnnnnnnnnnnnnnnnnnnnnnnnnnnnnnnnnnnnnnnnnnnnnnnnnnnnnnnnnnnnnnnnnnnnnnnnnnnnnnnnnnnnnnnnnnnnnnnnnnnnnnnnnnnnnnnnnnnnnnnnnnnnnnnnnnnnnnnnnnnnnnnnnnnnnnnnnnnnnnnnnnnnnnnnnnnnnnnnnnnnnnnnnnnnnnnnnnnnnnnnnnnnnnnnnnnnnnnnnnnnnnnnnnnnnnnnnnnnnnnnnnnnnnnnnnnnnnnnnnnnnnnnnnnnnnnnnnnnnnnnnnnnnnnnnnnnnnnnnnnnnnnnnnnnnnnnnnnnnnnnnnnnnnnnnnnnnnnnnnnnnnnnnnnnnnnnnnnnnnnnnnnnnnnnnnnnnnnnnnnnnnnnnnnnnnnnnnnnnnnnnnnnnnnnnnnnnnnnnnnnnnnnnnnnnnnnnnnnnnnnnnnnnnnnnnnnnnnnnnnnnnnnnnnnnnnnnnnnnnnnnnnnnnnnnnnnnnnnnnnnnnnnnnnnnnnnnnnnnnnnnnnnnnnnnnnnnnnnnnnnnnnnnnnnnnnnnnnnnnnnnnnnnnnnnnnnnnnnnnnnnnnnnnnnnnnnnnnnnnnnnnnnnnnnnnnnnnnnnnnnnnnnnnnnnnnnnnnnnnnnnnnnnnnnnnnnnnnnnnnnnnnnnnnnnnnnnnnnnnnnnnnnnnnnnnnnnnnnnnnnnnnnnnnnnnnnnnnnnnnnnnnnnnnnnnnnnnnnnnnnnnnnnnnnnnnnnnnnnnnnnnnnnnnnnnnnnnnnnnnnnnnnnnnnnnnnnnnnnnnnnnnnnnnnnnnnnnnnnnnnnnnnnnnnnnnnnnnnnnnnnnnnnnnnnnnnnnnnnnnnnnnnnnnnnnnnnnnnnnnnnnnnnnnnnnnnnnnnnnnnnnnnnnnnnnnnnnnnnnnnnnnnnnnnnnnnnnnnnnnnnnnnnnnnnnnnnnnnnnnnnnnnnnnnnnnnnnnnnnnnnnnnnnnnnnnnnnnnnnnnnnnnnnnnnnnnnnnnnnnnnnnnnnnnnnnnnnnnnnnnnnnnnnnnnnnnnnnnnnnnnnnnnnnnnnnnnnnnnnnnnnnnnnnnnnnnnnnnnnnnnnnnnnnnnnnnnnnnnnnnnnnnnnnnnnnnnnnnnnnnnnnnnnnnnnnnnnnnnnnnnnnnnnnnnnnnnnnnnnnnnnnnnnnnnnnnnnnnnnnnnnnnnnnnnnnnnnnnnnnnnnnnnnnnnnnnnnnnnnnnnnnnnnnnnnnnnnnnnnnnnnnnnnnnnnnnnnnnnnnnnnnnnnnnnnnnnnnnnnnnnnnnnnnnnnnnnnnnnnnnnnnnnnnnnnnnnnnnnnnnnnnnnnnnnnnnnnnnnnnnnnnnnnnnnnnnnnnnnnnnnnnnnnnnnnnnnnnnnnnnnnnnnnnnnnnnnnnnnnnnnnnnnnnnnnnnnnnnnnnnnnnnnnnnnnnnnnnnnnnnnnnnnnnnnnnnnnnnnnnnnnnnnnnnnnnnnnnnnnnnnnnnnnnnnnnnnnnnnnnnnnnnnnnnnnnnnnnnnnnnnnnnnnnnnnnnnnnnnnnnnnnnnnnnnnnnnnnnnnnnnnnnnnnnnnnnnnnnnnnnnnnnnnnnnnnnnnnnnnnnnnnnnnnnnnnnnnnnnnnnnnnnnnnnnnnnnnnnnnnnnnnnnnnnnnnnnnnnnnnnnnnnnnnnnnnnnnnnnnnnnnnnnnnnnnagcgaggccctcactcgcccatctgttggcgggggcggcaagtgggtttctttcttgcgttcagattttgcagtaatttgcatctggacatgggatacgggaggccaggctgctcctcgcagtacacccacccacgcctgcacctgcctcagcgaagccgctcgccgctggttccagcacaggctaaagagcttcggcatccagaaaaccagaagcgcgccgcgcacgcgcgccaaggagttcggcgacggccccgccccttcgggggtagggacagcgcggcttccgccgggagcccggaaccgagcccaggagccggggacggtgcgccagtgccccctccgcgagccccaaccagtagacggttaccctgtctcccgcgccccaatttcgattttcaaacgcaactcctacaggattctgagaccccgtcccatctcccatatcccatttccagctgcaaattactgcagaatctgaacccaggaaagaaacccatttgccgaccccctcttccctctccagacaggtggagagcgggtgagggtctcgctcggctttccccctgcacctttcccaccctcccgcccgtccctgggggtcctccgtcaccgcggccatggcccagaagccgaaggtggacccccacgtcgggcggctgggatacytgcaggcgctggtcacggaattccaggagacccaaagccaaggtgagagccacggtgggatcaggtggcagggtccgctgtgaccgccgcccggacctggcttcagtgccgctttcccgttgcagacgccaaggagcaagtcctcgccaacctcgccaacttcgcttatgaccccagcaactacgagtatctgcggcagctgcaggtcctggatttatttctcgattcgctgtcggaggagaatgagaccctggtggagtttgctattggtaagggcggggcccgttccctagatgcctaaatgggccagggtgagataagtgaattagaagtgagtccttggggccgggcgtggtggctcacacctgtaatcccagcagtttgggaagctaaggcgggcggatcacctgaggtcatgagttcgagaccagcctggcccacatggcgaaaccccgtctcgtacaaaaattagctagacgtggtggagagtgcctgtaatcccagctactagtgagcctgaggcaggagaagcttgaacccaggaggcaaatgttgcagtgagctgagatcgtgccactgcaccacagcctcggggacaagagtgagaccccgtctcaaaaaaaaaaaaaaaaaaaaaaagccgcacacagtggtgtgcacctgtaggcccagctactctggagactgaagcaggaggtattgcttgagtctgggaggcagaggccgaagtgagctgagattgtgctactgcactccagcctgggcgacagagtgagaccatgtctcaaaaaaatatgttttaaaaagagcagttttgtagccgggcgcggtggcacacacctgtaataccagcaccagcactttgggaggctgaggtgggcggatcacctgaggtcaggagttcaagatcagcctggccaacatggtgaaaccccatctctaactaaaaatacaaaaattagccgggcatggtggtgggcgcctgtaatcccagctacttgggaggctgaggcaggagaatcgcttgaacccggtaggcagaggttgtagtgagccaagatggcaccaccgcaccccagcctgggcaacagtgagactctgtctcaaaaaaaaaagcaatttcaggcgggtgaggtggctcacacctttaatctcagcactttgtgaggccgaagcagggagatcacttgagttccggagttcaagaccagcctgggcaacatgacaaaaccccatctctgctttaaaaaaaaaaaaaaaaaaattagtctggcgtggtgtcccagctactcaggaggctgaggtgggaggattgcttaagcctgggaggtcaaggctgcagtgagctgggattgggccactgtactccagcctgggtgacaaaacgagaatctgtctcaaaaacaaaaataactcatatttagtgttttcatatcaagagaagcagagatggcttgcagtctgtaacttatggcttctgtagttgttatgatcttaagacctattgagttattcactgggtagatatttattgcgcgtgtaccgtatatgcaagctactgctctaaatgctggagtatggtgaacagcttagggaaaggtctttgcccctcaggagcttacattctagtaggggggacaggtggttagcaaacaaaaaagatgatgctcagaaggaagtaaatggggtgatgagagacagcagtggaaggtgggggttacttcagttttggccatcatgagaaaggcattttagccgggacacagcatgggcaaaggccttaaaacaggaaggagccagacggaaggctgatgtgggaggatcgttgcagtgaagkggagaatggcacaaaaagagtttagagagttcagtggcaccagagcttgcaggagtttagatctaggccgtgggaaatagtttgaagcaaacaaaattttgagaacaaacaaaaattcctttttcaagcaatgcagtgcccacctgtagtcccagatactcaagaggatcgcttgagcccaggaatttgaggctgtcgtgtgctgtgattgcacgattgcacctgtgaatagccactgcactgcagcctggccaacacgcgcgtagtcacctggctgaagtcttgtcaggcttctccactgtaaaattactctttctttcccctctttacgtatgatacccattggaaggaagtcactacataaattatcttaaatctctctttttattctctttttcyttttttttttttttttttttgagatagggtctcactctgtcacttaggctggagtgcagtggtgtgatcatagctcaccataaacttgaactcctgggctcaagcagtcttcctgccttagcctcccgagtagctgtgactacaggtgtgcaccaccatgcccagctaattttttttttttttaattttttgttgtgacaggatctcactgtgttgcccagactggtctcgaactcctggccccaagaaataaatcccttgtaaccctaaacagaccctcatttcataacactgattctcgaaggccccaaccaggaatgcaaatgttcccccttccggtttgtctcattgcctctttgtggtttctttatcccctttatttcctataatccagaaattgggttgaatgtcttgataggatcaaataacacattttttattttattttattttattttattttattttattttattttattttttgagatggagtcttgctctgtcgcccaggctggaatgcggtggtgcaatctcagctcactgcaacctctgcctcctgggttcagacagttctcctgcttcagcctcccgggtatgggattataggcgcccgccaccacgcccggctaatttttgtgtttttagtagagacggggtttcaccrtgttggccaggctggtctcaaactcctgacctcaggtgatccgcccgcctcagcctcccaaagtgctggggttacastcgtgagccaccacacctggcccaactaacacatttttaaaaatactttttwtttatttatttttttttttgagatggagtcttgctctgtcgcccaggctggagtgcagtggcgcgatctcggctcactgcaagctccgcctcccgggttcacgccattctcctgcctcagcctcccaagtagctgggattacaggcgcccccccaccaggcccggctaattttttgtacttttagtagagacggggtttcaccgtgttagccaggatgggctcaatctcctgacctcgtgatctgcccgcctcggcctcccaaagtgctgggattacaggcgtgagccaccgcgcccggcaaaaatacattatgataagtgtgattcaaatttttcaaagaccatccaggtctcctctaaagaggagaggagattcctggggccagactacaaatgagggtcttctctccatgagggggctccagcacatgtgtgtgcggattcacacccccacagacagctgccccttggccactccctgggtttggaagtgcacacaccaacagtggcattcactcctgggagtcaggatccaagagagaggcccatgcagccgtgggagcaggtttagggcctggagctccaggtgcaggggaaggacggctgtgggctttgggtgagctccctggacttactgccccacagaggaccagagtggggcctgctaaagccaagccagggcaggagccccagttkcccaggtccccgagtgatgccagctcctctagaagattattatrccaaacaaatattctaaaaagttggtctctaaaacgtcctccgtcccgtcccttttcgtgcctctgcccccacagctgctgcagtctgaayggtgacggtggcccctgcagaagcatgtggctaaatctccaccagggggcgatagagctcctccaaatcaagctgctgcccctggagaaaaattggcggaagtcacagagcagtccccaccaaaagtgtttaccaagtggagtctttcctgctggcgtttcctcagggtcaggaagcaactttcccaggacaggggcaccctgaggtccgggtccactgagctatgggggcggcgtgggcctgggctgggttcttgccatcctgggcagcttcccggcgtgggtgactgagcccgggtcctggagtccgcggtcccagcgtctccacttytcagctgattcctagaagctgagtcccgtcccttctccgagcgtggtttcctctcccgccttgcctgcgtcgcaagcagttgtgggagcagaagtgtgtctgtgcatctgtgtytctgtgcaggtattttagaattgttaggatcattatcaccagctttacttttcccaaccatttttttcctcctttttttctcttccttcttctgccacagcaagacccccccgccccaagcacagtagctttytcagcgtcgaatccctccgtgggaccatgttgcaatgaaatttcaacatgcaaatgaaatttctcgaaatttctcttgtgtttattatgcatgactgagaaggagagcccccgcgtrttttcttactgccgtcgtttccctttctcttagtgtctctgcttggggatccccgacaggcacttattctgctgtttctggagaaggctctgtgctgcgctttggagctttgagtcttttatccgatgtggcagccctgagattgtgatctccctgagccagagccagccttacttctgtctgcatggtttgagtgcttaggccttttggcctagggaggaggaaagaaggggaagaaaaggcaggagatcttcacttaataggtgtggagtcctggccatgacttggtgcaacacccctgagcagggttggttctggaaggactggcacagtggagagctgagtcagattgcccatggctgtggctcgcagaaccaaaaccaagctgggtatggtggctcacacctgtaatcccatttgggaggccgaggggggwggatcacttgaggtcaggagttcgagaccagcctggccaacatggcaaaaccccgtctctactaaaaatacaaaaattagttgggtgtggtggcgcacacctgtagtcccagctactcggaggctgaggcagaagagttgcttgaaccaggagacagaggttgcagtgagccaagatcacgccactgcactccagcctgggtgacagagcaagactctgtctccataaaaaaaaaaaggaaccaaaaccattgtctgcttggttgagcagggtggttcatacctgtaatcccagcattctgggaggctgaagcaagaggattgcttgagcccccaggaggtcaagagcagcctgggcaacatagcaaaaccctgtccctacaaaaacaaacaaaacaagtatctgcttgttggcaggcagcacagtgagttggatgagagctgggccctggggtcaggcaggcatctgggtgtgggctctctctcctccaatcatctgtcagatggggacagtgccagtagctgcttcacatcagttgagagaattaaatgaaacaccacagtgctcttttagggttagtgtctgcagccatagataggattcccttggttgccatccaaagacaaatacccaaaaccctttgagggtgagctgtcgccccttgtcccagagaggtgaggtgcgggatgggataacgtcctatcaagggaatcactcatctgctccaggaattcttaccttctggaaaaacatcacggaatgacaggaacaccgatcctcagcctcccagagggtgcccaggcaatgtcaggtggggagagcctggctgcaggcccggtgctgttgtgcccccatcacggatggcattagctcacacttggggagcacccactgcatgccaggcgcttgcatcttgtgcattggacatagtactaaagtagatgtgcttacaccgccttctttccaatcaggactctgaggcttagagaggttctgtgggctggccaaaggtttaaagagtaccagacctaggccgggcatggtggctgacgcttgtaatcccagcactttgggaggccgaagtgggcagatcaccggaggtcgggagttcgagaccagcctgaccaacatggagaaaccccatctctactaaaaatacaattagctgggtgcggtggcacgcgcctgtaatcccagctactcaggaggctgaggcaggagaatcgcttgaaccgaggaggtggaggttgaggtgagccaagatcacgccattgcactccagcctgggcaacaagagtgaaactccgtctcaaaataaataaagagtaccagacctgagacttaaacccagagcagtyagagtctacaagctagtcccttggcccttttcctgcccttagaggagttccaattcctaggattgtggagcgaaagcgagaaaggagtttactccaaattgctcattttatcaataaggaagctgcggtgcagacagctgcccctcgtctggctgtcgcaggccaggatgagaatgcaggcttccttccgtctgtccctgcagccaccacactcacaggtacccttccatgctggctttgctgtggcagctctgagtgaggtctgctctttggcccagcacttctgcctcctctctgagggctggaagctggatgctatccaaacaaatggattcgctcaccctgcacactaaggccaattactgacaaaaatcgcagtgagaaagtgaggctttgtttttgtttttggttttggtttttttgagacagattctcactccgttgcccaggttggagtgcaatggtgcaatctcgtctcactgcaacctccgcctacctggttcaagcaattctcctgcctcagcctcctgagtagctgggattacaagcacccgccaccacacccagctaatttttgtatgtttagtagagacggggtttcgacatgttggccaggctgatctcgaactcctcacctcaggtgatccgcccgcctcggcctcccaaagtgctgggattacaggcgtgagccactgtgcccagccaaaagtgaggcctttattgtggggcgacaagcaagaagaatccggcagctcatgcttaagacccaaattcccagatggcttatggttaagggtgttcaaaggcaggaggcagaggttacagacaaagttttaaatcaacaccaggaggctatatattggtttggcctaagaaggcaggatgtctccaagggatggggcacagatcataggtggcttcaaagattttctgatttgtgagtggttaaggaggtgaagctttgtctacaaatttggcatcagcaaaaaagaatgttagctataacctgtgggcatgtcctccaggcccctcagggagtctaaagagtggtcagagtgtagttttcagttccccttatctgaggtctcagtgccaggggaattgtttgttgagggtccagatttctgaaaagcaactcaaggacagatattaagatgttatctttaggccgggtgtggtggctcacacctgtaatcccagcactttgggaggctgaggcgggtggatcacttgagctcaggagttcaagaccagcctggccaacatggtgaaaccccgtctctactaaaaatacaaaatctagctgggtgtggtggcaggagcctgtaatcccagctactctggaagctgaggcaggagaatcgcttgaacccaggaggcaggcagaggttacagtgagccaagatcgtgccactgcactccagcatgggcgacgaagcaagactgtctcaaaaaaaaaaaaaaaacaaagttatctttagtttctatggggaaaccagacatcccctgattctgacttccttggctattgttttaagctaactattaccttcttgcttatcgagttgctcacttgcttctcagggctagctaggtgcctggaatttcatgaagggactcaagattttcctttatttccatgcttgggggcctgcaggcccctagagaagcccctgctctctctccatgtcagccagggcttcagtctggcctcaagtgttcccatcarcggtggcagtggaactacagtggcagcaaccacttgccaacaggggcctggcctcactcaccgtcgtctctgtgtggcggtctctttctcctgtggcttcctctcagttgcccgccgtcggcaccgccacagccatgaggaaggatccggctacagcgaccgcggagaacacgcacgggttttcaagtctctggcctcttttgtggcctcttgtggatctgcccatttagagcaattgtagaactagtttattgaccctttctgtgcttctggctgccttttctgcccagggtccagggctcctgtttgggtgctgttgggataaaagctgcctctcctggatgcccgcccagtgcacaccatgtgctcgccacacgcccacctgaaccagcctgtccacaaggcctctgaatcggtcatgaacggcaaggccgatggttctaacccctttgtacatatcgggaacccccaccaccaagtgagggcaagtccactgcctggggctcccgctgttagtgataactggagccaggacttcgcccctgtcatccaggatccaaattctgtgccctgggaacccagctggcaccaggctcagactctagtcccttgttctggcctcaaactcctgggctcaagtgatcctccgaccccagcctcccaaagtgctaggattacaggcatgagccactgcacccagccccagtggcagttcctctatgacactggtacactggactgtacactggtacactggtacactggactggtacactggactattcacaggggattatttgttcttgggttttccttcagtgtcttgaaaatggctccttcaatttcaagtctgaaggacagacagtacatagagtaagctaccctttgtgtgagaaggcagggtggagatgaacacacctctgtgtatgcactcacgctggcaagacacaaaagtgtaataaggaaatgggttagtacgaggcagggaacaaggtagaagggaccagaatggtggtgagacttctgaaaataccctgtgatacagttttttctttttttttttttgagacggagtttcgctctgtcgcccaggctggagtgcagtggcgcgatctcgactcactgcaagctccgcctcccgggttcacgccattctcctgcctcagccttcccagcagctgggactacaggcacccgctaccacgcccagctaattttttttgtatttttttttttttttagtagagacagggtttcaccgtgttagccaggatggtctcgatttcctgaccttgtgatccgcctgcctcggccctctcaaagtgctaggattacaggcgtgagccaccacgcccagcctgctgtgaagactttgaccctgggctgcttcagctcagcatgggcgagtccccagatgtagctgtattttgagctgcccttgccgagggcctgcccagccaccaggtgccaggtgccagctaagcacttgtcagaagcatcacctcgttttgttttgtttttgagatggagtctcgccctgttgaccaggctggagtgcagtggcatgatctgggctcattgcaacctccgcctcccaagttcaagccattctcctgcctcagcctcccaagtagctgggactacaggtgagtgccaccatgcccagctaatttttgtatttttagtagagatggagttttgccatgttggccagggtggtcttgaactcctgacctcaggtgatccaccctcggcctcccaaagtgctgggattacaggcatgagcccccacgcccggccagcatcacctcatttaatccctgggaccatccttcaaccttcccttcatggtccaggttgtccctccctgcaccagtgcccaacatggcgtgtgagctgaggtcacccacctgacctccctgagtctccggctttctcatcttgctttcatgtggggtttcctcttttgcctctccagggttctcgtgtagagttcctgtgtgtcctgatgtctggaaggccctgcccttgcttcttgttttctctctgtcttgtgcagagcatgttcatcaggaagtcggaacttgttctcctttctgttttataacgatttttaagactgcagtatggtggctgggcacggtggctcaggcctgtaatcccagcactttgggaggccgaggcgggcggatcacgaggtcaggagatcaagaccatcctggctaatacggtgaaaccccatctctactaaaaatacaaaaaattagctgggcatggtggcgggcacctgtagtcccagctactcaggaggctgaggcaggagaatcacttgaacctgggaggcggagattgcagtgagctgagatcgcaccactgcactccagcctgggcgacagagcaagactcggtctcaaaaaaaaaaaaaaaaaaaagattgcagtatgatcaacagaataaaatgcacatatcttaagtgtcagtttggtgaattttgaaattcattgagctatgtgtacatccatgtaagcagctcctaaaccaagaygtagaaactcccttcacacccacgctgggtcagtatctcccactccaaggcaaccactattctaacctctatcctgtggatttgctttgcctgttcttgaacttcatacaaacagaaccatgcaggatctactctcgtatctgatttctttcactcaacattatgtttttcagattcatccaaattattgcagtatcatccattcctttggatgtgccacaatttgttcatgcatctgcctgtagacggagatttgaattgtttctagtttagaagctttatgaatgaagctgttaggatcatgttcatacaaatatgtactcatttctctcacctaggagtggagttgctcagtcctagggtagatgtgcgtttaacgtcatgagaagctgccaaatcactttccacgtagttacaccaggttatgctatatgctccacttccttgccaacacttagtattggcctttttttgtttgtttttgagatggagtctcgctctgtcgcctacgctggagcacagttggcacaatctcgtctygctgcaacctccgcctcctgggttcaagcaattctcccacctcagcctccggagtagctgaggttgcatgtgtaggccaccatgcctagctaatttttgtatttttagtagagacaggttttcgccatgttggccaggctggtctggaactcctgacctcaagtgatccaccctcctcggcctcccaaagtgctgggattacaggtgtgagccactgcacgcagcagcagtgttttttatttttgctattatgttgagtgtgtagtggcatgttcttgtggttatactttttatttctctgatacgtaatgagcacagttccatatgttttggcccttttgcaaagaagactttgtttaagtctttttgctcattttcaaaattgggttgttcatcttttattgatatgcaggagttcttgatgtgttctggataccagcgttctgtcagatggatagtcagtgaatgttttctccttttgcctttttactgtgttaatggtgtcgtttgatgagttattctcctatctcagtgaaattcagcttttaaaaaagaataacatctggccaggtgtggtggctcacgcctataatcccagcactttgggagggcgaggcaggtggatcacagggtcaggagttcaagataagccaggccaagatggtgaaaccccatctctactaaaaatacaaaaggaaattagtcgggcatgttgacgggcgcctgtaatcccagctactcgggaggctgaggcagagaaccccggaggtggaggatgcagtgagccgagattgcgccactgcactccagcctgggcgacagagcaaaactccgtctcaaaacaaaaacaaaaaagaataatatcttttaaaattattattattattatttttgacggggtttcactcttgttgcccaggctggagtgcagtggagtgatctcggctcaccgcaacctccgcctcctgggttcaagcgattctcctgcctcagcttctcgagtagctgggactacgggcgtgtgccaccacgcccagctaattttttgtatttttagtagagatggggtttcaccatgttggcaaggctagtcttgaactcctgacctcaggtgatcctcctgcctcaccacccaaagtgctgggattacaggagtgagccactgtgcctggccctggcttttttaatttttaaaagaatatctgtagagataacgttttcctatttattaaacacctgctaatgcgaggctgctgatagagaatgagacaaggcagagtccccattctcacggagtttatagtttagtggagcaacagccaatattttgacaaataactactgtaatgtcagtaagtgtgaaggaaagaagcaaagcctggtgaggggggcgtggtgggggggcaggttaggtgctcacagaaagctcttagaggaggtggcgtcttagcgggcctatcttattgtatgtacaatctggtgtccttcttccctccttcatcttaaattacaggcattttctaacatgaattattctttggacactttttttttttttttttaatttttgaggtgaagtctcactctgtcgcccaagctggattgcagtggcacgatctcagctcactgcaacctccacctcctgagttcaagcaattctcttgcctcagcctcccaagtagctgggactacagggacacaccatcaggcccagctaattttttttttttttttttttacttagtagagacggggtttcactatgttggctaggctgatcttgaactcctgaccttgtgatccacccgcctcggcctcccaaagtgctgggatgacaggcatgagccaccacacctggcctttgaagactttttttttttttttgagaccgagtttcgctctgtcgcccaggctagagtgcagcagtgcgatctctgctcactgcaagctccacctcccgggttcaggccattctcctgcctcagcctcctgagtagctgggactacaggcgcccaccaccgtgcccggctaattttttgtatttttagtagagagggagtttcaccgtgttagccaggacggtcttgatctcctaattttgtgatccaccgcgcccagcctgaagacattatttttaagaactgtaaatattgccagacacaatggctcacgcctttcatcccagtactttgggaggccaaggcatgaggttaggagttcgagattagcctggccaacatggtgaaacccccatctctactaaaaatacaaaattagctgggcgtggtggtgcatgcctgtaatcccagctacttgggaggctgaggcaggagaattgcttgaacccgggaggcggaggttgcagtgagccgagatcgtgctactgcactccagcgtgggcgacaagagcgaggctcatactcaaaaaaaaaagtactgtatactgtttcatcatatgcatgtaccataatttagccatctggctattaccaagcattctaggaagctcccagtttccacgttgctctttttccatggcccttctcagttcttcagggcaggttcacacaggtagacccagggagaagctcaaagcagctgttgctgtggcctcttgtgggtcctctggcgccatcttggctcatctttctgctccagctcagacttcctgccctgaaactctgtgcccttttcttttctggccctcaccgccttcttcatctctaagggacactacccgctaggcagaggagcttcaggagttccctgccactgcggagagggtccaagcagctggtgagctctggcaggcacccggtccatccttggagactcctaggcctctgtgtggggagggagggagagggtggctctcctgaggcctcctcctgcccccaccctctggttttccgcagtctgggtggcagtgccctgcccaggcgcacctgggtgtggtgatgactcagctgccaggcagtgactcaggcttcatcttatcacactttacacagagagaaatcccatcaccccacccgcagtccagtgtgcacaggaaggccgctcccgtcagctcgggagacatgccgcgggtgtgtctgagcagaagagtccgaccayagcacttccactgcccctgctccagactgagcctggcatctgcccaaggctggattcgttgtccttactgcttccagagggccccgccatttcccatgggagggccgccatttcccatgggagggccgaggggcagaaggctcccatctctttagcgttttgggcagctcactcagtctctcatagccttgacttctcccatggaaatgggggtgatgttagcacttrtttctagggttcagtcatgtgtccagtgcgtgctcagtgaagtgtccacggttctaggaacttgagccctgccttatagctcctggtggaagggacagagcaaggacaaaaggcagcctacagaaygccacagccacgctaggggccaccctgtgctttagcaagtgctgaagtgggactggcaagggaggctccaagggccccatggggagaggcgctcagtcagggcctgcttgccctctgctgctgctactctttctcaggactccagagaggccaaagagctccttccctccctcagatgtgtcctgcctgtgagctgcagcccagatctaagaactacagaagtccagggtgggcaggatgtcagggagccacactgtccagccccctgaccatctgcggttctttgaaccctttcccccccgggtcagtgcttaaaggatcaggtgatgaagggctgccctgacatggtagagcrcctagtcgggtatcccaggaagacgccacttgcaaggagagcagtggagggcttgttaccagcaagagggtgtcagtgtgtgacaactgggggctgaaaggtctcagggatggactgaggttggagactgcaatgagtgccagggagagggaagaacagacaggacggctcaggggtaaggagcacacggacatctggaatttactccacatgcagtgggatcctttaataatgttcccccagctgggcacggtggctcacacccgtaatcctagcactttgggaggccaagatgggtggatcacctgaggtcaagagtttaagaccagcctggctaacatggcgaaaccctgtctctactaaaaatacaaaaaaaaaattagccaggtgtggtggcatgtacctgtaatcccagctacttgggaggctgaggcaagagaatcacttgaacctggtggggcggaggttgcagtgagccgagatcgcgccacttcactccagcctgggtgaaagagtgaaactccatctcaaaaataaaaaaggttccctcaaagcaggaccagcctgacccaggtgctgcttgggagcaggcagcagagtgaaaccttggcagactcctgccccagtcagtggaggagggtccttggcgggggcaccatgggcacctgtccctctggctggggaagatgtcttagttgggtttcaggttcaggtaagtcttctctttgttagtttccagaaaaacaggggaagtgggyagagctgtggccttcactgattggtcactcaggacactgggcatgttttgcaaatgagctgagaggtggcttcctccactgagcaggaaccaaagggaggggtaccgtgatgacaggaagctcaggatgcacaggaagtcatcttcccgcagggagcagccagtgctgagcagagtgacctccaaaacaaggtagcatctgtccccaaggctaagaggtcattacattgagggggcctgacttgagggaatgggagtgggattccagccacattacctgagcacgtgagttctttgatccagaaccactgatctgtcactgttgccttttctgttttcccccagaatcctagtaacggtgacatggaaataacattaaaatgctctattctcttaattacactatatctgtcaaatggtacactccttaccattaatctacaatcactgcatagccatgaatgtgaatttattggcatggaaagatgttcacaatacattgtttttttgtttttgttttttttttttgagatggagtttcactcgtttgctcaggctggagtgcaatggcgcaatctcagctcattgcaacctcagcctcctgggttcaagcaactctcctgcctaagcctccctagtagctgggactataggtgtgctcaaccatgccccgctaatcacaatatattggtaaatgaaaaaagctgggcggggcacagtggctcatgcctgtaatcccagcactttgggaggccgaggcgggtggaacacctgaggtcaggagttcgagaccagcctggccaacatggtgaaaccccgtctctactaaaaatacaaaaatttagccgggcatggtggcacatgccggttatcccagctacttgggaggctgaggcaggagaatcacttgaacctgggaggcggaggttgcaatgagccgcgatcatgccactgcactctagcctgggcaacagggcaaaactgtctcaaaaaaaaaaaaaaaaaagctggcgtaagccatgcacagtggtgcatgcctggagtcagtcttaactcccagggaggctgaggcagaaggatggcttaaagccggaagttcaagaccagactggacaacatagggagatcccaccccatctcagaaaactgaccaagcagcaagcagagtatcccatttttactaaatacttacatatattcacatatttcaaattgtagaatgaaaaacaaatgttaggtcagccgcctaacattgagacgtagtatttgctctgttgcccaggctggaatgcagtggtgccatctcggcaacctccacctaccgggttcaagctattctgcctcagcctcccaagtagctgggattacaagcatgtgccacaggcccagctaatttttgtgtttttagtagagacggggtttcaccatgttggccaggctggtctggaactcctgacctcagggtgatccacccacctcggcctcccaaagtgctgggattataggcgtgagccaccgctcccagccatttgtttgtttttgagacagggtctcactctgtcgcccaggctggagtgcagtggtgcgttcatggcttactgcagctccacttcgtgggcccaagcagtcctcccacctcagcctctcaagtagctgagactacaggcgtgtaccatcatgcctggctaattgtgtgtgttttggtagcgacagagttttgccatgtcgccaaggctggtctcgaattcctgggctcaagggatcctcctgccttggcctgccaaagcactggaattacaggtgtgagccactgtgcccagcccattctagtattttaacagttttattgctatatgatggacataataaactgtacatatttaaagggtacaatttgataaattttggcataagtatatacccatgaaaccatcatcttatatttttataacttttataaactgttctaaggtgatgatacattacagggttttagttttttatttatttatttatttctgagacagagtctagctctgttgcccaggctggagtgcagtgatgcaatctcggctcactgcaacctccgagtcccaggttcaagcaattctcctgcctcagcctcacaagtagctgggattacaggcacctgccaccacacccggctaatttttgtatttttagtagagacagtttcaccatgttggccaggctggtctcggactcgtgacctcaggtgatccactcacttcagccttccaaagtgctgggattacaggcgtgaaccaccgtgccygggccggccttgttttaggtttttacatttaagaaaggggaaaaaaaaagcgtatcagccattgaacttgctgaactgagagggaaagggatttgtgcccacttctggaagggtgggctgtggcaggctggagcaggcaggcaggcctttctggaaacttgagaaggcaggagccggaatgggctttggatgccttgtgctggggccagcttctcaacagcctgggccyctacctggggctcacgggcaggggaggtgggaggaggcccggggctacagcatccagactcttccttgctctcccacaggaggcctgtgcaacctgtgcccagacagggccaacaaggagcacatcctgcacgcaggaggtgtcccactcatcatcaactgcctatccagccccaatgaggagacggtgctgtctgccatyaccacgctcatgcacctgagcccgccgggccgcagctttctcccagagctgaccgccacgcccgtggtgcagtgcatgcttcgcttctccctctcggccagcrccaggctccggaacctggcacagatcttcctggaggacttctgctccccccgccaggtggccgaggcccgcagccggcaggcgcactctgccctgggtatcccactgccgaggagcgtggccccacggcagcgctgatccatggagactgcgagaccgtggcacccctactgctggrgaccacagtcctgatgtggacgcagggaacggggagcacatactgccccattggtgccttttcagccatctgaaaggcgggttctttcagcaggacaggcatttacactgatgaaacgccactgggagtgaggaagccagactccagagacacggagaagatcaaactggagctgcgttcataggctggcactctcaatcctacatcaggtgccaccaccaccagactcaggccctggtgtaagaagcggccaagtgcctggacccagaggctttgcaggacagtgttctcaggagctgggcctgaggcttaggagagctgccttcgctgcaggaaatcagggattatcccttaacagaagtgtctggagtagttttcaggtataggaatgagatgcctcgtggtgaaaggatctcaccctgggaagatgtggtgccccctccagggctctggaggatggatgcctcccccaggggctctccaagctgggcatttgggcctggtggatgccaacctggataacctgtggcccagcattgactgtccacccagccttgctgttaggcaccatgactccaagatgaagatgtggtccctgccyttgagtgacagcccagggacttaatgtggccatcgggcatcaagcacaaggccatgcaggtgatgatacgtcggaatagaggcaccagccctggtaactgcatcttctccccttgccaccccatggccccggctgaaagcttcggccctcctctgctgtcactcaatgatggggagccctaccccagaagtgtatcccacgagggcatcagggacgcagtgagtgttgctcaagggagtcaggaagagacggcaacgtaaaggatgtggctccatgtccatggtgccccctggtcaacataaggagcgtgggatccgatggaaaggtggagctcagggaaaatgggggtccttgcctctcgtgtaccccctcaaggctgaccccttagatggcccaggaatggcaggtgctacaaaaatggtacccacgtgggcatggaaatggggcagattaggggaccactggactcagaggggagggaagggctcatcagcacccgctcagggagcctgtccctttatgttcccaaataaagggtcctagaagactagaaagccaaggtcttttattaaaggtcccgactggttttcccactgtatttccatgccagccagggtccagggacagcctctcgggaggtaccgggtggctgggcctggggcccggtagcacagcgcttaacggtatctgcctgctccactccacggggccagaggcaccagcacgatgccgccccgactcggctctgcggtggcccctgtgggcctgcccttcctttagctccagctgctgcccgcggcatccccgctcattcccgctgcgcagctccgcgcttgctatctaagatctccctccagttgtcactccaggagagcagccgtctccttgtcgggggcaggaccaggtgccgattgtggcagcaggtgaacaagatgtgctcccagcttggggtctcctcctggcctaggacaggaaagacagcgcgctgccatctgtcatgggtattattactccctctccctaatccgggcaggccagaggcctggaggctgccaaggataacgggtccaacctcgaactgtgtccttgtcatcaatgagcaggtcccccaagaccaccgtcttgtcccttgtcaggataattcgttctacgaactggggccccaggtgctgctccacccagcggtactgtgtagaaaacacagtctgtgagtagggcctgatggaagccggaattcagggatagggagttggctctaagcccttgagagccccccacccccaccttctgggtttctggtggtttctttttaaaatcaggatttaggcagctccacgtgcggagtaggggcggggcagccacaccttctcacccacacagtggtggtacttcagcagggggctggtgcagatgaagacctgcgtgctgcggagaaggacgcggttaccgccgggagccaggagcccgcccaggactccgcccgcccccctctctccttactccggtaggtcgttcatctcccgcacagcgtccaaggctcccgggatgggctccaggtccaggaaaaagcccggggcttcgtacacactggccactttatcctgaaagacaagagttctgggtcccggcttcccgttcccgcgaggacccgcagggaggctcctgggggctccgggcccgagctcagaggggcggagggggcgtcggtcaggggcacgcgcccaaaggctcctccccagggtgcgctgcccgcgggttccagggtgagagctctgcgcccttcacagagaagggggagacccccggaacggagcgagcgggccctgcccgggtggggaccctgcgccccctaccgccaggtcgggccgcagggcgcggtactgctcgcgggccaggaagccgcggcgttgctccagcggcacgtgcggctcctcagggaagcggcggcggaagccccgcaggaggccggcctcgaagtcggccaggacgccgtccatgtccaccagcacgcgcacgctccgcgccatcgccgccgggccggagctgcgagctctcggggtctggggggcgcgggctcggccggaagcggagggagcgctgcttccggagtccgccgggctgatttgcatagagtgtccgggccgccccgcccaggtcgtaaaccagtgccgacggccctgcggttgcgcgaggccttcctagggttcgggtgcagggacggctttggggggcacttttctgaccctgcgcttcttcgggacccagcctttgtccccatcagccgcctcccactttacggcagacgtacccccgttcaccccacgttactagtaggggaccgaccttccgggggcccaacaaagggatgctctgagatactgggaagcatctaacgaggagtcaagggtcctaaacccgtggggctagctccacattttttttctttttttctttttttttttttttattttgagacggagtctggctctgtcgcccaggctgcggcgcagtggcggcgcgatctcggctcactgcagcctccgcttcccgggttcaaccgattctcttgcttcagcctcccgagtagctgggattacaggcacccgccaccacgcctggctaatttttgtagttttagtagagacggggtttcgccatgttggtcaggctggtttcaaactcctgacctcaagtgatctgcctgccttggcctcccaaagtgttgggattataggcttgagccaccgcacctggccaaagtcttattaccgcagtaccgtggtctcagtggattgctttcgtctgtgcagtggagcaggaacaatccctcgaggactacaaagtgaaatgaatctgttaactggtttgtgtaagtctagctcgttaagagactaattcacactagagttggcttgaaacatgggagcttcaagtgtggtttcccccggaaagatgattttgatcaagcacaggtaatcaggactgtcctcaggactttatgtggaactgacatcgcttacctactcccgtctagaaaatgctgaacagggccaggtgcggtggctcacgcctataatcccagcactttgggaggccgtggcgggcggatcatctgaggtcgggagttcaagaccagcctgaccaacatggagaaatcctgtcgctactaaaaatacaaaattagcgtggtggcacatgcttgtaatcccagctacccgggaggctgaggcaggagaatctcttgaatccaggaggcagaggttgcggtgagccgagatcatgccattgccctccagcctgggcagcaagaacaaaactccttctcaaaaaaaaaaaaaaaaaaaaagaacatgctgaactgtgatacattttgttgactcttctttttgtggatgtcatgaaacttcctgactccactcaaatctatttgcctacaaactataaagccaggcgccgtggctcaggctggtaatcccagcactttgggaggcccaggtgggagacagcttgagcccaggagttcaagaccagcctgagcaacacagggagaccctgtctctacaataaacaaatcaataagctgggtatggtggcgcatgcctgtggtcctagctactcatgagccttaggtgggaggaacccttgagcccaggaaattgaggctacacagccttcatcctgccactgcactccagcctgggtgacagagggagtccctgttgggggaggggagagccaaaattataaacacagatttaagtggcccatctcgccattgttccccatctgatgaacccactgcttccaaatatatgtaacagaggctgggcacggtagctcacgcctgtaatcccagcactttgggaggctgaggcgggcggatcatgaggtcaggagatcaggaccatcctggctaacacggtgaaaccctgtctctactaaaaatacaaaaaaaaaaaaaaaattagctgggcatggtggcgggtgactgtagtcccagctactcaggaggctgaggtaggagaatggcatgaacccgggaggcagagattacagtgagccaagaccacgccactgcactccagcctgggccacagcgagactccgtctcaaacaaacaaacaaacaaaacatgtaatagaagcatcacacacacaaaaaaacctgacagggccgggtgcagtggctcacgcctgtaatcccagcattttgggaggccgaggcaggtggatcacaaagtcaggagttcgagaccagcctgaccaacatggtgaaaccccatctctactaaaaatacaaaaactagccgggcatggtgggacatgcctacaaatcccagctactcaggaggccaaggcaggagaattgcttgaacccgggagacagacgttgcagtgagccaagatcatgccactgcagtccagcctgggtgacagagccagactccatctcagaaaaaaaaaaagcctgacaaaccagtctaagaggggctcaagtcaacatgcatatgactcatagatacgcagacattttggaggcccagacttgcgagttatctcaaggggaagcagtcttgggggctgagccctcaacttgtggaatcaaagctatctccaggtaactgattgtcagaattgaattggagggccaggtgaggtggctcatgcctataatcccagcactttgggaagtcgaggtgggcagattacttgaggtcaggagttcgacaccagcctgggcaacatggcataaaccctgtctctactaaaaatacaaaaattagctgggtgtggtggcacatgcctgtagtcccagctactcgggagggtgaggcaggagaatcgctggaacccagaaggcagaggttgcagtgagcagattgtgccactgcacttcagcctgggcgacagactgagacactgtcttaaaaaaaaaaaaaaattggaggacacctagctggtatccactgcagaattgcttgcttgcttgcttgctggtggggagaaatccccgcatatttaaagttggagaactttttttgagacagggtcttgctgtcacccaggctggagtacagtggtgcgatcatggctcactgcagccttgatctcacagggtgaagcaatcctcctgcctcagcctcccgactacaggcgtgtgccatcacacctggctatttttggtagagacgaggtttcaccatgttgcccagtcttggagaacactttaaaatgttactgcccagaacaaaggggaggtagaagagtctaacctgctcatctttagagccttcttcagaaagaaacccactcctctctgggtcttcatctgttttaagattttgttttttaaggaggtctcgctatgttgcccaggatagtctcaaactcctgggctcaagcatcctcttgccttggcttcccaagtagctaattacaggcacatctggctatttaacttcaaatgactcctccaatcagtaggcaggatttatagtgacaaagagaaaagcatctaaccagggagaacactgaaaccatctcaaaaagaagacacagtacacagtgtttcaaaatgtggatattgtttacttgaagcaacagtccaggattgtgaagtacaacacattttaaggatgagactttcctttcatggtcaagcaccagcatcatgcacacagcatcaggttatttaaaacaacacgcctgtgggaccccgttcctggaggaagacccgcttcagtgtgattgcctcccttgcttcactgcttttagttccaggcagtttcattgtacatccaagccttcctctgcgtgagagcaaaggctttgctcatcagccagccagtcttgttactatctggctactttttaaggttaaaaaataaaaggcagtttctttgctttgcaggcggcaaggcaggaggcgcaggcctcttcattgttcacatgtcacaggaggaggctctgagcaaaggccactggcaagttagggcaacaccaagaaggctctgcggagagactccctgtgggttggggcctggcaggaacggtgcctgtggactgtttatggtctgtccagttgaggcttggtaaacccaagtaaagtgttaaaaacctcagtacaaaagatcctctaacacatctggaaccaaattatttcttcttaaaaacacagtactaagtgtcacaaagctttccctccaatctactactagaaaacactcatgccatggcccacagacccaagagtcaaggacagagagaaacctgttcttcaaaagaaaaaaaaaaaagacagcagtacataaagtgcttctttttaatgaaacaaatccaagagatgtacagtcaggctcaagttgtgcagttcacaagcatggaggaaacagacagaacgacagcgttcaggacagtcagagctaacccaagacgaggctggacttgccgccagggggatttcttctggatggcactggggccggggccaccgggctgggcacaggcgcagcaggcacgggcttctcttcactctgccccaggctgcctggcaagtctgtgtccacattttctatgaaaacagggaat

SEQ ID NO: 96952 - DNA, 13889 bp, Homo sapiens
tattaaaaaattctagtgttggctgggtgcagttgctcacgcctgtaatcccagcactttgggaggccgaggcaggaagatcatgaggtcaagagatcgagaccatcgtggccaacatggtgaaaccccctctctattaaaaatacaaaaattagctgggcgtggtggcgcacacctgtagtcccagcaacttgggaggctgaggcgggagaatcacttgaacccgagaggcagaggttgcagtgagctgagatcacatccctgcactccagccttggtgacagagcgagactgcatctcaaaaaaaaaaaaattctagtgttgttagccctcccttatgtggcactgcagcaggttactaatggacgagaagctgttgggggaagtagagttgtagggtgttggagctagaaaggctctggagtgctctagtttgggcctccaggtctctagataggacagccaaggccctgagacactgataccatggccaagatgtcccagcaggatggcaggcagtgcccacagtccagcgctcatcccagctccccaaggccttgggctgcagccactccacggtgcccactcatagtggcagattcttcaaccatccggtctttgtaagttgctcactgccttcccctcttccctgcctcttcacccccatgcccagattccaattcagaagaggcccttcctgcgtcagggaaaagcaagtatgaagccatggattttgacagcttactgaaagaggcccagcagagcctgcattgataacagccttaaccctcgaggaatacctcaatacctcagacaaggcccttccaatatgtttacgttttcaaagaaatcaagtatatgaggagagcgagcgagcgtgagagaacacccgtgagagagacttgaaactgctgtcctttaaaaaaaaaaaaaatcaatgtttacattgaacaaagctgcttctgtctgtgagtttccatggtgttgacgttccactgccacattagtgtcctcgcttccaacgggttgtcccgggtgcacctcgaagtgccgggtccgtcacccatcgccccttccttcccgactgacttcctctcgtagacttgcagctgtgttcaccataacatttcttgtctgtagtgtgtgatgatgaaattgttacttgtgaatagaatcaggactataaacttcatttttaattgaaaaaaaaagtatatccttaaaataatgtatttatggctcagatgtactgtgcctgggattattgtattgcttccttgattttttaactatgcactgtcatgaggtgtttgccactgagctgccctgctccccttgccagattgccctggaggtgctgggtggccgctaggctggtctgcaggaaagcgcggcctgccgtttccgggccgtatctgccaagccctgccttgtctcttactgagcaagtttggctcaaattataggagcccccatcttgtgcccagctcatgctccaagtgtgtgtctatccatttgtactcagactcttgagtaccttgtaaggaaggcggggcaagctgcatcattcctgttttccaggggaggctggcagctcctcaagaggcgaaatgactgtgggaggtccggttaccagtgaggaggcagagcggtgacccagaccaggccttctggttcttggtcccgtgcttccgtagtagctggggtaaagacaccgtttcagggactggtagaggtgagttcggctaaattgggcaccgggctagaagcctaagggctcattttaggggttacattaggtgttgattcaccagcatcaggtgaattcaagccctggcatgtgtcttggatgcaccatcagctttgatcctgagtggtcctgcggtttgtctgtgcctgtggacacactgtcagaacttcagtgacacccctggcagcggtacagacaggtggtctgggagcagtcatcttttttgggccagccaccagcccatcctactccctcaggtagtccttcgtctttaccttgtccttgtctgtaaagttgttttggtggctggggcaggggagccaggaggagggagtgaaggttgggaatagataggacaatctcctagctctcctccaattgagaaaacactccaattgggctttgctttaaactttgtgttcttaagtgatgtcaaagccatttccagcttaatgttctgtgggtaccttgggggccattcatgcagggagcatggccaggcagggtatgagtacattgtttctgatttctttcatacatcagggttcctcgggaaatttttgtattttttttttaagtcctgctgctttaaaaatttgaaagtggctcattaaactaaacaggctaatgtaatttgttgcttatgccaagcctagactgttgagaattgacgtttttaaagattatcaaatacctcagtaggtaaaatgagcccatgatcttccactgagtggtgagcatactcccagcccatggacaaggccggaagagacaggctttagtaggggtagggaatttgaactgttgtgtgtcacagcagttgacctctctggactccaatttcctttcctgtgaaatgaactgattagacatgtttcaacattgttagcttctgctgaggcagtgtctagcccaagatggcaaatacatagctcatgtgccactactcccacctccttgaccaatacagacataactaatcaatcacaccactcaggttccctgagcctggatgtgctataagaatcctgaaatcagtgctctggtaagtcattactaattgattagagttcaatctatttgacatcttgggctaatctttggaaggtttccaacaatcacacaaaaccatatgctggctgggtttcatgctggcctatccctgtctgtgatgttccgttccatgagagaaaactcccctaatgctattccatggcgtaacactcccaatactattttgacgcccacgtccccttgcagagggtgcagggggcggtagacgaatgacagacaggaacatatttggggaaggcagggcttaggaagatggaccaaaaagggacttcccacagcacagacctgatcattcggatttcctctttagctattcactgcctagcacatagtaggcacacaataaatgattatggaatgggataaaatttagatctttctgctgcctccactaagttaagtcctgatttacatcaaggagagaactgagataggaaagaacactagattccaagtctggagagttgggggagtccagattctaccaagaatttcctttgtaactttggtaagtcccttttactccctggcaccccggtgtgctgaaaggagttggtccatatatgatctcttagcccctcctatttgcttcttccttgattgctcttggtcaaagggtcagccttgggctggtgatactttagagtaaagaaatggagagttttagcaaaggaccagtctgtccctccctgctttggggtcagctaaagctgtcctttcatgtcagattaacctaggacacttgtagttagcttagacgttggcccttgagcagagacctgagcgtggcattgggacatgacatacctaaagtcagggctaggggacgctgcctgccaagggcatcgagtagtctctacttgctatcccgtacataaaatgctacaagttctaaaatttaccgaccctgcagacaacctctatcccgaaggactcattcggtgctgtgtattatttagggcaactccaaggtctattcagaaaaacgagtgaaccttggtctctttcccaccaaattgaggagtaacccagagggagcagctgccattggcaaccatctcgttgtagctctgtcctagtgtttgctcttgatgatgtttacatgtgatcgccataaagcttgctgtagactgtgtcgatagccgcccgcacagggcaggtcgtactgtccgtttctgtgccgtgctggtgttttccaaaaatgtctgatccaaccactaagtggaattcttccatctccttcctcagtctgtacaaggctgaatcagaatccccattctcgggggctctggttaccgaaggaaaatgcatcaaagagttaaagaatatgagtggatggagtgcagctaaggcccccaccccctgctccgtcacaacttgccccctcaaccaaaaagctgctttgagtcaaaaagcacccataagatacctgcatctgccttgaaatcttgcagcatggagtgtcatatgtactcaggagagaggcagggctttgcgggcaggagaaggaagggaggaatgctctgagctgcaaagacccagtactcaagttctgacgcgggaggagatgcagtgagacgtctcttgttgcctaaagcctgttcctgttggttttcttagagtgatttctcctagacatgtgcagtaggcccactggggctgctgtgcagtggtgagtaaaagggcagggaaggcatggacagcctggtccttctgcatggacagctcagtccatggcccatcccaggtatagagttcagttaatcccatttgagcctgcagcttaagagatggctcatcctaactgtgaagcaaaatcagccccagaggatgtattgatctgactcactgatgtcaaaattgcagtatttttttagcatttgagatttagcagctgccttcagtttggggttacccacatcccagcatcagatatgattaaggaaagaaattggatgtacaacagcaaagaaagtgaatgtcatggtttccctggccaaagaagagggaccctgtcatccttaccaatggggaagaagaaaactagtgcatgtgcaatatgtcaaagttagtcccctagtccctgaggggtttttacacacagatgggctccaggtctgctcgtcaagtttggaggtaccgggtaaatggaggggagctgcagagttggaaacccacatgcatggatgtgtccttggcccagaaccaccatgggatgggggaggccctgagccggctacaagacacccaggaagtaggcaaaggctgactttgcattaaacaataaaagcactttgagaaaaccccaacacttcagcctgggtccgtgtttctacactggaaaatacgagtctcctttggctgtgtgaagtgatcttctagagactgggacagggagtttgggaatggggctgctgtcaggtaggagagagcagagatgcctttggagatgtcagcagcaggagagccagtgctggggccaaccctttgctggccttttgttggaagcccttgaaacagggagccatgggtttagatcttggtacctacctttacagaaagatgaaaacagcccagctgagtgaaatgagtttgtagagtaagtcacttaactgtaagccatctcagaatcagaaaccctaatgtttcttacttgctatgtgaccttgggcccctgtttcctcatctaccaaatgagaatgttgaatatgagcattaaagtccctttcacctctgagaggctcagatccccaaccaggagcattgggaatccatcactcctccttgaaactgattccattctctgacttgacccagctcctgttcagggtgagggttctctgcaagaaccaaccagcagtaggttcaatcccactgtgtcctggctgagttgccttatccaagaagaccagctccccgggacagatctaagccatagtttctagtggggacagtaaggaattaaacccccaacttggctaggtaacgatgtcaaatctcacattaaccttgtctttgtccccactggatagctgttaatccgaatgttgtgaccatttggctgtttctctcttgttctcagacaatactagcaatacactttttttttttttttttaaagaaaaacagcttaggcgcttttcacacatttctttcaaatgattgtaaaacatatggggcaacaggaggcattgatcgcgctgcatatgtttagggcagcttttgttttttgtttctttaatggtatagcagcagtgactgagccttcgtgattcctggggacagcttttcagatactctgtttcatcagtatgctttgcacatccggaaggagtacaaaaatccaactgcccraatttggggcttggaaaataggttttataggtggtcggtccctgggctgtgcaacaactcctcaaagaggggtttatataactagaacccccctgggctgtatttttggtcaaaggagtctccaaggcggcttacaaaagcttcctttttcacttgaccacccttgctcattggttacttgtgaagggaattggtcagtttccacctcagcactttgccttatcaacatgcggtcgccatctagtggccaaaggttgtctccaccagctacccagatggaaggcaaataaatcctttcggccaccctgctgtccatcgtgaactttgggaatgaaatataatggcctgaacgaactgcctttgtgttcagagatcagtgcaacactagggtcagaagactccagaagcagccacttagtagactctcacgcagaactgagaaatgcactagctgtcctgtgggcagaagagacaggagtggaccaggagaggtccaggtgcccgggaagggtttactgtaactgcaatactggcagcccagctgctgaccttgttaagtaaacctttgctgggtggtccgaattctgccctcaaggcaagataagaagttgggtgtaaggattttgtggggggcctggccatgatctttgatatgatccccgaatagccaaatagttttttttgttyaattttttgtttctgtattttgtatttttaaaatcttgtcaaatgtttttgtgttaggaataaaaagtcataaactattcccaactttgtttcttgagggatgttctgattccaatggaaacaggtgggaaatctcaaggggagcgtggacaaggtggtatgtgcagcaggggaatagactgcttggatttccaaatggtttctggggaagatgaccatccagaagtccagcttagtgcagtctgctctggaattcacacccaccccctcgcctccttgtgccatgttgttagcattggcttggagcatctgcttcttccagaggcagctgctaatgttgaarccaacacgagccctctccccaaccccaggtttctaaagaaggtgtctgtagccagccttaatcaactgggcaaggtggtccctatggtcctttccagcatttccaaatcttggactcaaattattttctcttggtgtgaccacacagcctagagaattctgagcaataggagccagggctttccctgactctgcgacagggtcaaaccaaggaatggctaaacctgtgaggttttgtcatccccgggggtactactgtagggggcattatttattaggaagcttaacaaggtaactacggcctgagtgcgtgagtgtaaggctgtgtttgtggtgggggtgtgtgtgtgtgtatctgtgcacacatacacacgtctgtgcctgtgtgtgtgtgtttgtgtgtgtgtgtgtgtgkggaattacattgatgcatttattgagaaaggtgcaagaatttcacctacacagagggacacatctgctttgttatttataatagaaagctaaattttaattttttaaaggacactgctaatgattgagaatcaagtttttagttttgctattttttttaattggtagaggatttttatatattttttccattttgttgggttgtgtccttatttatataaatactttatccgtaagaggcaaggaggaaaccttctttgcttttamwtattgtggttgtcatcgtccctattttatttctggtgtgatttctctgtcttaccttctaaatgagaaaatgttttcttgtatttgtacattgtcagattctatagtttcctagataatttaaccaaattgctctatgtattattattctgtgagtataaagttctattttaatgtctgtaaatacttcagaactggcttcttttctcaaactcccactgtggggttattgtttacatcacagaaactgtagaatctctatgctcatgtactgtaaatagtgaagtgatctgcttataaataaacttaacaaatacactatggagattaaaaacaaaataccacccacagctttgcccatgtgtgtttttccttgttggtcctgggagctcattgagggacactctgaccactaaatggggaagagatttcagttttcagcgtcaccttctcagataagaccccggatgatgtctgctcctcacctcaccacacttctccctccttcagagcacttttcacagttcataatatccattcgtgccaggcacaggggctgaggtgggggatcacttgagcccaggagttcaaggccagcctgggcaacatagtgagacccccatctctgaaaaagtaaagtaaataaaatataataaataaataaaataaccattcagactcatctcacataacagctgttccatgaacgactttttgccctgacttttataaagctataccactttctgaacaaagacttccttgttttggtatatcaactttcacataagcacattgaataaatgcactgtaggaggtattttggcattgtggttccaggcaaaacactcatcaatttgtaattacaaaatggtttctggtcagaggatctcatagagagcaggcctgcattgtgtgcggtaattgaatgagctcagaacattttcctttgtgtacttccagcaagtagggtgaggaagtggcatcttccaagactctcagttgcgtgcctgtgtgttatttcctcacgtctcaaaggggttagcctgtattttgccctaaagctgttttttgtgctttaactttatttttaaatgccagacacccataagccccaaagggttgaaacactggcaaagagaattatatataaacaagaacaggctgggcgcggtggctcgcatctgtaatcccagcactttgggaggctgaggcgggcggatcacctgaggttaggagttcgagactagcctggccaacgtggtgaaaccccatctctactaacaatacaaaaattagcccggcgtggtgaggggcgcctgtaatcccagctactcgggaggctgaggcaggagaatcgcttgaacccgggaggcggaggttgcagtgagccaaggtcgtggcaacagagcctgggcaacagagcaagactccatctcaaaataaataaataaaataagaacaggtgcaatgaatgattacattttatgttatgtgcaaactattttcaggttgctatttattacataaactcatacaaactcatacatatattctccttgttcaggtgatttattttccccatctgtaaagattgtttggatttctttgattgcaagggaacacatcatgattttttcccattaaaattaataggaacgtttccacttaggggcagagttctctggtgtgatgagaatatgtgtgtgattgagggctcagtacctgttgcccatctgttgtaagcttcaggagaacaggcctgcctttccgttcactgcagggcactggccccatcagtcaggaattcctgagtagatcctacccgtagtgcaaggaataggatggcagatgcagagcctcaagacctgcctttgggacccatctctgccacttctgtattgtgtgaattgggcagaccacctccttggtccctggttttcccaaatatgaaacaatttgcttagctgaactcaaaggtcctttatgttcttatgttctttaaaaacaacaataaaacctgatttgcagaagcagtatggtacaaggaaaatgcttacaagctggggttctggggttctggtgtcaagctgcttggctttttttttttttttttgtgatggagtctcgctcttgttgcccagctggagtgcaatggtgcaatctcggctcactggaacctctgcctcctggattcaaatgattctcctgcctcagcctcccaagtagctgggattacaggcacccgccaccacacccagctaatttttgtatttttagtagagacagggtttccaccatgttcgccagactggtctcaaactcctgaccttagttgatccatccacctcggcctcccaaagtgctgggattacaggcattgagccaccacgcctggcctaagctgcttggctttgaaacttggctctaccgcttatcagctaggtgtcctcgggcaggttttctaacctctctaagtctgctcctcaccatgtgataaatggagctagtaacagtttctcccttggagtattgttgttaggatgaaattagatcgtgcacagtacctaggacatggtaagtacttaatcagcatcagctgtgatcctcattcagctcagtctcatttggtgctaaccatagtcctctgagagaggcactgcaaggatcttgacctttttttgacagattgggaaggctgggaagtggagcagaaggaacctgccgaagggactcagaaacatggcagcagagtcaggaccagcaacatcaatgcccgtgtgttcctgagtgacacttatttctccttgctactctgccatgtaaccaccaaacgtgatgttcttaggacaggcctctgcttaaagaccactgctatcagggtgtgcattgcagcagggcagaacatctagtttgggagtttaaagatgcaagttccagacccagttctctattgacatcaccacctgcaaacatgagcagggcccatgcgtcaggagcccagattgatctactgtggaggccaccaggatgtggctgccctgtacactatgttctctgtgatcctgggcatctcctggagggaagccagggaactgtgccaggaacttggcccagccccgtcttctcactggccttcaatttcctcatgtgtctaaaaagagagattacagtagatgagtggtttaccgtttggggaaaccatgtggctccctctcctcaaagcaactgttttaatatattagtttctgcataacattcagtgtggaaggaagaaaagttctagagctaatgtccatttattagaatgagacagaggaatgtgttacatgcggccacaaagaaacaaacagataaatacagaatgtgggaaaactgactctgtttctgcaaggtgatgacaatggaaaaaaggaaggagtactttgtagattaaaagagacttcagaaacttaaccatggctatgtgaggtgatggatatattaattagcttaattatggtaaccatttcacaatgtatatcaaaacatcacagtgtataccttaaatatgtatactttttatttgctaattatacctccataaagctggtggtggggggggaacgatagagaaggaaaaaaaatcaagatttggacaagtgtaacaaattgacttgcaaatttttagcatgttattgccattttcaacttctggtttatttgtgctgttttcaacatcagttactatggtatgaatgctgatcaggccagtgcattccgctaggtattgcatacttgccagaacatacttagattcggtttaaaagaaataagtcctggccaggtgcagtggctcacgcctgtaatcccaacactttgggaggctgaggcaggaggattgcttgaagtcaggagtttgaggccagcctgggcaacagaatgagaccccatgtctacaaagataggttttaaaaaattagctgggcatggtggtgcatgcctgtggtcaccgctgcttggtaagctgagatggaggattgcttgagcccgggcagctggggctccagtgagctatggtcataccactgcactccagcctgggcgacagagtgagacctcgtcatgaaagatagagaaagagagaaattctatctgccacatctttttttttttttttttttttttttttgagacggagtcttgctcttgttgcccaggctggagtgcagtggcatgatctcagctcactgcaaccttcgcctcccaggttcaagcgattctcctgcctcagcctcctgagtagctgggattacaggtgcacaccaccacacccagctaatttttgtatttttagtagagatggggtttcaccatgttggccaggctggtcttgaactcctgacctcaggtgatccacccaccttggcctcccaaagtgctggaattacaggcgtgagccaccgcgcccggccaacatctatctttttaaaccaacagaatgcctgctaatttaagaaacagaagttctggaattgagaataatctgacttaatttatactctgtgaaatcaatgaaaaatccaagaataaaaagtacatcttcttttttctaaaaaccaacaaaaagaaacaactaaattcaatatgtgaatttgtttggatcagattcaggcaagccaaccattgaaaacgttcatgagaatgaaggaaggttgattaagggctggcatcacaagttgggtgtcccagaaagcagactctaaaatggacttagtctgcaggatgcttattaagcagtgccctggggaccgatgcttggggaagggaaggaaataggagtgggcagagggagaagtcgagttgggatgtgagcccagtgacagccttagtggaccccacgaggagtcgtggagctggaacagccctgcacagttatcccatgctcagccaagatggccaggcctctccacctggcatggatcagtcattgggtgtaggccaccctggggaaggctgcagtaacacctgatggggttgatactaagggtctgtcaacagcactcaaagctggtggggtcccaagtcctttgctgaagcttggggtctgtgcagcccatcaaagcatagatcacagctgggtattaggcaggcattggttgcatgggccagtgatgtggttatgttagaaaacatacttatttctttaaagatgagatagtagaggtgtgaaatgatatgtttgggatttgccttttcttttgcttttgtttgagtcagagtctcgctcggtcgcccaagctggagtgcagtagcatgatctcagctcactgcaacttccgcctcctgggttcaagagatcctctcacctctgcctcccaggtagctgagactacaggtgagtgctaatttttgtattttttgtagagacagggttttgccattttgcccaggttggtctcagactcctgggctcatgcagtctgcccacctcagcctcctgaagtgctgggattacaggtgtgagccaccacgcctggccaggatttgcctttaaacacttcaggtaagaaaaaaaattgaaaagaaaatgtaaaaaggacagacgaaatgcatgtagcaaaatcttgatattgggatctgggtgatgggtatgtggggattcaacgtacaattctctacttttgaaaatgattgaaaatttttacaatacattaactgaaagtataagaacaaaaatgattctaagcaagccagtgaatctggcattaattaaatgtaattaaatgtttaactgatgtctatgaaagctagaatattggttttagctcaataggcagttctcaagactaaaagaatgtttaaaagccactggataaggtataagccaagcttgttcaacccacggcccgtgggccacatgcagcccaggacggctttgaatgcggcccaacacaaattcataaactttcttaaaacattatgaaatttttttttttggcgattttttttttttaagttc

SEQ ID NO: 96953 - DNA, 13321 bp, Homo sapiens
  misc_feature (1)...(13321): n = A,T,C or G
tcaggcctaagtttgagactcttcttcaatgtcctctcttctcggaagccttccctgactggctcactccctcctggcatcttctggggttctagagcccctgcttggtccaggccccatggcatttgtactgtttgtgcctcttctgtactgtggagcccatcagggtggggacagagcctgacagactgtggtgtcaaaagcaccaaggcaaatgtcaaccaaagcctggttaaggagtcaagcgtttgccctcagaaacaaactgttggttgactgttttaaaaaatggaaagtataaagggtgctgtaacaagcatctacttttgtcaaacattaatattttgccttattgacttcagattgtttttaaaggatatgcgatattacagatgctcttgtactgattccatttccctctctccttctactgccttgagcttggtgtttatcttcctcatgagtatttttactccatcactccatatgttggtacccataaacaccatatgatacctggggtttttttggcctgtttttgcacttcatggaaatggaagcacatcatacagtatgtgctgcttttgctcagcataatgtctgtgacattcttccacattgtcgtgtgtatcaatagttcattcttttttttctttttctgtttattgagacataattcacataccataaaatttgctcttaaccataaaattcactcttaaaatgtatagcaaagcgattagtatatcacgaggttgtgtaactatccactacctaattccagaacattttcatcacccccaaaaggaaccctatatctattaacatacaccctcccattccatttccctctcctcccatccccgggccatcacaaatctctttgtctctatgaatttgtctgttttggacatttcatataaatgcagtcatataatatgtggccttttgtaactgccttcttttacttcacataagttttttaaggttcattcatattgtagcatgtatcagtacttcattcattttcatgactgaataatattcctttgtatgaaaatacctactacattatagctaggatgcggtggctcacacctgtaatctcagcactttgggaggttgaggtgggtggattgcttgagcccaggagttcgagaccagcctgggcagcgtagcaagaacacgtgtctacaaaaaagaaaaattagccgggtgtggtggtgcatgcctgtggtcccagctacttggggggctcaggtgggaggatcagcaagttgaggctgcagtgagccatgattgcaccactgcactccagcctgggcaacagagtgagaccctgtctcaaaagataaaaggaaaaagaaatgccacattatgcttatccattcacccattgatggactcttggctatcacaaataatgctgctatgaacattcatgtgaaagtttttatgtggacatatgtttttcgttttcttgggtatataactaggaatggaattgcggggtgatatggtaattctatgtttaactttctgaggaactgcaagtgttctccacagctgccatatggggattcaaatttaaatttaaccacattctctccaacactcctttctttctttctttctttctttcttttcttttcttttcttttctttcttctttctttctttctttctttctttctttctttctttctttctttctttctctctctctctctctctctttctttctttctttcttttttcttttttttcttttttcttttgtttggcagggtctcactctgttccccaggctggagtacagtgacatgatctctgctcactgcagcctcaacctcctgggttcaagtgatcctcccacctcaacctcctgagtagccaggactacaggtgcatgccatcacacccagctaaatttttgttaatttttcgtagagatgggattttcgccacgttgcctacgctagtctcaaactactgggctcaagcaatctgcctgccttggccttgcaaagtgctggaattacaggctaccatgcctggcctccaacactttttattgtccctctttttgattctagccatcctactgggtgtgggtgtgaagtggtatcttgttatggttttgatttgcatttccctgtgaccactgatgttgagcatattttcataaacttgttggtcatctatcttctttttttttttttttttttttttgagatgtagtcttgctctgtcacccaggctggagtgcagtggcacgatcttggctcactgcagcctccacctgctgggttcaagtgattatcctgcctcagtctcctgagtagctgggattacaggcacccgccaccatgcctggctaatttttgtattattaggagagatggggtttcactatgttggccaggccagtctcgaactcctgaccacaagtgatccatccgcctcagtctcccaaaatgctgggattacaggcatgagccaccgtgcccagcccatttatcttctttggagaagtgtttatttaaatcctttgcccattttgaattgggttatttgtccttttattgttgagtagtaagagttctttatgtattctggatactagactctttttagatatgtgattttcaaatattgtcttctgtaggttgtcttttcactttttttttttttgagacaggttctcactttgtcacccaggctgcagtgcagtgggggtgaacgtggctcaccgaggccttgaccccccaggctcaagtgatcctcctgcctcagtcccccaagtagctgggactacagttgcatgccaccgttcctggctaatttttgtattttttgcagagatggggtttcaccatgttgcctaggctggtcttgagctcctgggctcaagcaatccactcacctcagcctcacaaagtggtgagattacaggcgtgagccactgcgtccagccagaaagcttatagttttgatgaactccagtgtgtctatttttctttggctgcttatgctttagatgtcacgtctaagaaaccattgcctaatccaaggtcacaaagacttaagcctgttttcttctaaagcagcggtccccaactttttggcaccagggaccagtttcatggaagacaatttttttccacagaagtggggatgttttcaggatgattcaagcgcgttacattagagtctcataaggagtgcacaacctaaatccctcgcatgcannnnnnnnnnnnnnnnnnnnnnnnnnnnnnnnnnnnnnnnnnnnnnnnnnnnnnnnnnnnnnnnnnnnnnnnnnnnnnnnnnnnnnnnnnnnnnnnnnnnnngaggcgggctcagcttcatgaatggcagcaagccgcagctcacctcctgctgtgtggcccagtttctaagagaccacagatgggtttgtggcctggaggttggggacccccgttctaaaagttttatcgttttagctcttacatttaggtctttgatctgttttgagttgttttttgtatatggtatgaggaaggggtcccactttattcttttgcatgtggatactcagctgtctcagcaccatttgttgaaaggagcattctttccccattgaatggtcttggtacacttgtcaaaaatcaattgctagctggacacagtggctcacacctgtaatcccagcattttgggaggccaacgtgggaggatcacttgaacccaggagttcagcctgtccaacacattgagaccctgtctctacaaaaagttttttaaaaattagctgagcacagtggtgcatgcctgtagtcccagctacttgggaggctgatgtgggagtatcgcttagcccaggagtttgaggctgcagtgagctatgtttgtgactgggcaacagagcaagtccctgtctcaaaaaaatcagttgcctataatgtatgaatttatttctggactttcaattctatttcgttaatttatatgtatgtttttatgccagtagcacatggtcttgattactgtagctgtatagtaagtttttaaactggaaggtgtgagtcctctaactttgtttttctttttcaagattgttgtattttgggcccctagcactcccatgtgaatcagcttgtcagttctgcaaagaagcaagctgggattctgatagggattgcatcaagtctgtagatcaatttggggagtattgccatcttaacactataaagtcttccaatccatgaacatgtgatgtctttccatttatttaggtcttctttaagttctttcaataatattttatggttttcagtgtataagtcttacccttctttcattcattttattactaagtattttattcattttgaagctattgtaaatggaatagttttcttaatttcacttttggattgttaattgctagcatatatgatacaaaatcttatatcctgcaaccttgctctaatggttatgcactaatggggctctaatggtttcgtggtggattccttaacattttctatgtataagatcatgtcatctgcatatagggatagttttacttcttcctttccaatatggatacgttttatttctttttgttgcctaatgccccaggtagagcatccaatacagtgttgaaaagacatggtaagaaggggcatccttgtgttgttcctttccaactttcaccattaagtatgatcttagctgtgggttttttgtggatgtcctttatcaggttgaggaagttctcttctattcctagtttgttgagtgtttttatcatgaaggaatgttgaattttgtcaaatgttttttctgcatctcctgaaaagatcatgtggtgtttgttctttattatgttaatatgatgcattatattgattgattttcattagttgaccaaaccttgcattcttgggataaatcccacttggccgtggtgtataatccttttatatgttgctggattctacttacttgtatttttttgaggatttttgcatctatacttagatattggtctgtagtttttcttgtgatatctttgtctagttttctcatcagagtaatgctggcctcataagttcgttcccttttattgaaagtaatattccatggaatggatataccacattttgtttaaccactaatctgttgatgaacatttgcattgtttctagtttctttccctattatagcaaatctgcaattcataaactcatattcctctctctgtgcacacctgtgaaggagtttctcgggggaggagggaggaaatatcagagcatctacccattcattcatctacctacccactcacccatccacccatctgttccttccttccttcttctattccttcattttctctttcctttcatccataaatcatccatcttcaggcatataatgtctgggtccatggcaaattgtcttttagaatgaggcagaaaacccctttcctctttttttccactgccagaaaatgctacaggttttaggaaagccttttacttgctaaaactcatatcctcacactccctctcttcgcagcactcttggggctccttggcggttcagtcacagggtctggctgaactaccgtctgaagactatttagcgaccagagtccagaagaccaggggctcctttacttcaggagactctcacgcatgctcctccatccatcactccttcactcaggaatccacacacttcccttcccacttgcctgactcatctgtctgtcccttctcttgttttagaacccaaaatgtcctcaggcctcttctctagctgacatcctcttttttgttgaactcatccagtccctatcttcaaaatatctccagaatctaaccattttaaaaaaatcatctccatgcttgcttcggcagcacatatactaaaattggaacgatacagagaagattagcatggcccctgcgcaaggatgacatgcaaattcgtgaagcgttccatatttttttggcaaggcatgttggtttgcgtgtgggaatcccaaaggagaccccagctctcacgattaataggctctgtggttctggttttcagtccactgtgaataggtgttaggaaatttgtgttaaagaagctgaagttgttttatgcggaggaaccaaaagcatgagccaagctccctactgtgtcagaaatgtgtgttttggaaccaagcttggatcagatatcaagctggaagattctttatggataggattaacagatcagcatgtccagctccccatggcaatgactgcagagaatcttgctgtaaaacataaaataagcagagaagaatgtgacaaatacggcctgcagtcacagcagagatggaaagctgctaatgatgctggctactttaatgatgaaatggcaccaattgaagtgaagacaaagaaaggaaaacagacaatgcaggtagatgagcatgctgggccccaaacaaccctggaatagttacagaaacttcctccagtattcaagaaagatggtactgtcactgcagggaatgcatcggggatagctgatggtgctggagctgttatcatagctagtgaagatgctgttaagaaccataatttcacaccactggcaagaattgtgggctactttgtatctgtatgtgatccctctatcatgggtattggtcctgtccttgctatcagtggggcactgaagaaagcaggactgagtcttaaggacatggatttggtagaggtgaatgaagcttttgctccccagtacttggctgttgagaagagtttggatcttgacataagtaaaaccaatgtgaatggaggagccattgctttgggtcacccactgggaggatctggattggttgatgaattaaggcgtcgaggtggaaaatatgccgttggatcagcttgcattggaggtggccaaggtattgctgtcatcattcagagcacagcctgaagagaccagtgagctcactgtgacccactcttattctacttggccaggccacagtaaaacaagtgaccttcagagcagctgccacaactggccatgtcctgccattgaaacagtgattgagtttgttcaagccatggtgatacaaaaatgcattgatcatgaataggagcccatgctagaagtacggtctctcagatttgtaccagtgaaatatgtatttctgaactaaaactcaactatagaagacattaaaagaaattgtattcttgccaagtaaccaccacttctgccttagataatatggttataaggaaatcaaataaatgttgccttaacttcaaaaaaaaaatcatctcctggctgagtgcggtggctcacgcctatagtcccagcagtttgggaggttgaggcaggaggatttttttttttttttttttgagacagagtctccctctgtcacccaggctggagtgcagggaaacgatctcagctcactgcaagctccgcctcccgggttcacaccgttctcctgcctcagcctcccaagtagctgggactacaggcgcccgccccatgcctggctaattttttgtatttttagtagagatggggtttcaccgtgttagccaggatggtgttgatttcctgacctcgttatctgcccgtctcagcctcccaaagtgctgggattacaggtgtgagccaccgcgcctggcaggaggatctcttgaggccaggagttcgacaccagcctgagcaacatagcgagaccccgactctaccaaaaaaaacaaaaaacccaaacaaataaaaatcacttcccctgtccctgccatcacacttgcgtggaccactgcaggggcctccccctcactggtcgcctgtttccaccctcgccctgacagtctattttccgcagtggccagagggagcctgttaaatcctaaatcagatcacatccctcctctgcccacaaccctccttcagctgcctgtcgctcatagtaaaagacaaagtcctcgccctggcctgccagaccgcacccatctgtaccccttgcttccccaactggcgtccttgctgttcctcacacacagcaggcacattcatgcatcagggcctttgcactggccgatgcctctgcctggtgtgcccttcctccactggccatctgtgtggctcatccctcatctcttcagatctgtgctcaagacacttctcagtcacactttccgggaccgcctcattagacatcagaagctgtcctagcaattttttttttcaagtcagagtctcgctctgtcacccaggaaggagtgcagtggtgcaatctcagctcactgcaacctctgcctccaggttcaagcaattctggtgcctcagcctcccaagtagctgggactacaggcatgcgccaccacagccagctaatttttgtatttttagtagacacggggttttgccatgttggccaggctggtctcaaactcctgacctcagtgatccacctacctcggcctcccaaagtgctgggattacaggcgtgagccactgtgtccaacctgccccaacagtttttatctgcattccctcttttccgtgttttctttttctccaaaccatttaccaacctgtaacatacttaatattttacctacttagttttatttattttctttctctcccactagaatggcaactccaccaacaggggtatgcttatctcctttgctcaatgctgtctctccagtgcctggaacagggcctggcacacaggtggttaacatatgtattttagttgactgaatggtggagggggggcagaaacaggaaatctgaccttgtcccacctaacctgccacaagctatgcttcaattgagatgatttggcttatttctttatttattttgtggaggtgggtggtctcactatgttgcccaggctggtctcgaattctttgatctactagatccaaaggtagaaagtgctaaataccctgagagtgagactagagaaggctctcctgaaagaggtagtatcacctggtgctggtcctggaaggtctgatgggaataagagatcctgggattctgcgaggcccaggaatggagaaaacagcaggcagcagctggaggagtgagaaaagttaggaaaggatgaagacaatggcatcactgacaaggagaaatctgtcaggggccttgaatcccgaggtgatgaccctagattcggtgctcagaggcgtcataccctggtcataggcctccgaccgaacagctcagagatctcacaccctacataaacacccatgcatggcgccaatacagtaacgaagaccccgtattcattgagaggttatgcatttattaggccaactttgatgacatacagacatgtaggtttggtcccaaacctgtcttgggtcccccctcagcaggatgtgtgaagtgcctaagtcctcagtctttggagatctctgggcctgggtgggggtttgcaggaaggaaaggagagggcgacatcaagggggacagaatggaggaggtccagcctccatcacgaggagatgtagttggacacctcaatcagatttctgtcggggtctcggaagtagatggacatgataggcccttttgcccctgttctggggactggcccctcctcaayagggacatcacaagcctgaagtgggaagaaaagacaaaagtcgttcgtcaaaatgtgtgtgtgagaccaaaatttaatgccttttttttttttttgtgacagagtctcgctccgtcacccaggctggagtgcagtggtgagatctcagctcactgcaacctccgctgcctcctaggctcaagcaattctcccacctcagcctcctgagtagctgggattacaggcgcatgccaccatgcccagctatttttcatagagacgaggtcttgctgtgctgcccaggctggtctcgaactcctgacctcaagtgatccgcccgcctcagcctcctaaagtgctggaattataggcatgaaccactgcgcctggcctgtaaaatttaattccttatagtggcctagaagaccttagaacaccgctgtatctttctgacctcatctcctaccatcctcccctccatcactccgttccagccacttatcagctagatggccttgggcacagtacctaactaccctgtacctcgatctcctcatctgtaaaatgggaaggataatagtacctagtattatctagtaaatggcagaaccagaattcgaacctaggcagtctgggtcaacgaccatactcttaacccctatgcttcacccattttacttccaaaccagtctttttcactgacacttcccaaagaaggagtctaggttatttgcacagaatatatataagacctcaatccgtgttctgcaaaagggaaactaaaaccccttttatttatttattgtagagatggggccttgctctgtcacactgactagaatggagtggtgcgatcacagctcactacagcctcaacctgggctcaaacgatcctcccacctcttagcctcccaagtagctgagactacaggcacacaccgccacgtctggctaatttttttttgtattttatgtagacacagggtctcgccatgttacccaggctggtctcaaattcctgggttcaagtgatcctccctccttggcctcctaaagcactgggattacaggcatgagccactgtgccccagccttattttaattttttagagacagggtcttgctgtatcacccaggctggagtgcagtggcgtgatcatagctcactgtagcctccacctcctgggctcaagtgatcctcccacttcaccctcttgaatagctaggattacgggcatgcactaccatgcctggctactctgtttattttttttaagagatgggatctcactatgttgcccaggctggtctggaactcctggcccaaatgatcctgccacctcagcctcccaaagtgctgggattacaggcgtgagtgaccgtgcccaaccaatgcctcttctagatgacatcattttaagtattacagagacactggattaaataacaacaaatcagaaattattccctctccaatcttctttcagtccttctttttacacatagaaggtggatgctaacaagttcttagtatctctttaaccacctgccatatctccctttgtaatgtcagggccagggagtacagggaacggaagtggctagaatctaatgacattgttatgctttcatagctgttggtttttacagttacttttcctttatgccaagatataatgggtttttcatgtacttggatgaacgttttctttttatataaatgtatttagggctgggcacgtggctcatgcctgtaatggccagcactttgggaggccgaggtgggcggagcacttgaggtcaggagtttgagaccagcctggccaacgtggtgaaaccctgtctctactaaaactacaaaaattagccaggtgtggtggcacgcacctgtagtaccagcaacttgggaggctgaggcaggagaatcgcttgaacccaggaggtggaggttgcagtgagccgagatcaagccactatactacagcctgggtaacagagcaagactctgtctcaaaaaaaaaaaaaaaaagtatttcagtgcataaatgtaggtttgtttgtttgtttgtttgttttacaatgggaatgcacagtttcctttttaaacacatttatttacatgaaagaattgtcagtcaaaatagtacataactgtgtgcagacattatctggttgtggtaaaacttgttacctctctgggtcattcttctgttttcactgcgtttgcagcagcttttgcaaaaagaagagaagtcccactcaccttgaggtgctggatcatttcctccaaaggcacctctgtgatcagacatatgtccagggagccaggaactgggtgagcggctttgggttcaaattcctttcccacctcgtggaggttaaatttctggtctccaaaacacrgtgctttccggtcttcctacttggtggggaggggcagagaaaacagcctagaattaaacctccaagatgagtgtgagatgaagcctttccacctatcccaacaaggtttaaaaaaaataaaaactagaatggggctactacacaacagccctttgccccacccaaggctcattccctagaggcaagtgtacgagtttatttctccttgaaattatttccatatctccaaatagtgtttataccactcaaggcagagatagcaatttgcctacccagtatacatttcccctttatttcttataaacacaacagaaatttcagtggggtcaaccgtgtacccaactttaaaaacctacatttcccagcacgtccggaggccacgttagctggaccaggcaatgagatgggggcagaggtgtggatggggcttctgggaacctcccaaccctactgcgctggcccttattgctcattcacttcctcttgcttcccagccactgcccatgacctgactaactacctctggactggttgttcagtgaaacgaaaagaaaactcttgtcttgtttaacccacagttagttgagttttctcctacatgcctccaaagtccctaactgatgcaccactgtttgtttgtttatttatttatttatttattattatttgagacagagtcttgctctgttgcccaggctggagtgcagtggcaccattttggcttaccgcaacctccacatccctggttcaggtgattctcgtgcctcagcctctggagtagctgggactacaggcacacgccaccatgcccagctaatttttatatttttagtagagatggggttttgctatgttggccaggctggtctcaaactcctgacctaaggtgatctgcccacctcagcctcccaaagtgctgagattacaggtgtgagtcactgtgcctggcgtctttttttttttttttttgagacagagtcttgctctgtcgcccagccttcagtgcagtgatcacggctcactgcagcctcaacctcccagactcaagtgatcctgcaacctcagcctctgagtagcagggaccacaggcacaccccaccacgcctggctaatttttttttattttttgtagagaccgggtctccccgtgttgcccaggctggtcttgaactcctggctcaagtgttccccgcctcggcctcccaaagtgctgggattacagatgtgagccagtgtgcccggctgcaccactatttcttgatttagcaactccctgctatgacaaatgaaaat

SEQ ID NO: 96954 - DNA, 31419 bp, Homo sapiens
agaccttagtagagtgtgtgtgccattctgttaaccttaacttgaaataaagggagcacataaacttgacaaagccattttccacatttgagaactctcggcttatttgtttaatggcaaatgagttttaaaaggaaataaactccttgagctgtcttttccagtatattgatctgtctttttttgtgaggatacagctaagaaaagaatggacagatgcatactaaatttggccttcggagtaatggatgcagaatgtgtctgtgaagatgtggttaagtcacaagtgatacgcttaagggacgccctgagatgttgggattgagaagtaaagtttgggggaaatacttgtccctggacgattttgttagttcaatcacttaaccaagttcaaaagcacatgactagcaatttttttttctttctttttttttgagacagagattttgctcttgttttccaggctagagtgcaatggcatgatcttggctcactgcaacctccacctcctgggttcaagcagttctcctgtctcagcctcccaagtagctgggattataggcatgtgccaccacgcacaggtaattttgtatttttagtagagacagtgtttctccatgttggtcaggctggtctcaaactcctgacctcaggtgatccatctgcctcagcctcccaaagtgttgggattacaggtgtgagcccacacgcgcctggccagcagtggttttaaaatgaaatcttaaggaaacctggtattgttttaggaggacagtcaagaaaaaggtgacaaaggacatagggagagagggccaggatctgggaccctctgcccagttgtaatcacagctgctttgctgttaatctattttatatatatgggttttgctttcatagaagttcaagaggctgggcacagtgactcatgtctgtaatctcagcacattgggaggcagaggtgggaaaatcctttcgagccagtttgagagcagcctgagtaacatagcaagcctctgtctcaacaacaaaaaaagccaggtgtggtggcatgtgcctgtaggcccagctactcaggaggctgatgtgggaggattccttgagtccaggaagtggaggctgcagagagctgagattgtgccactgcactctaacctgggttatttagagcaagacgctgttaaaaaaaaaaaatgaagtttaagaaacactgctataggtcatgaagaagctgttagaccattccttgtcatcaggattaatctttcttctgtttcctttgattttttggttaccttgagaacttaaacaaatatgctaaacaggccaacagccttactcacttgtttgttttacatacatttgctctgattcataaatcagatcagattaaaagggttctcctgggactgattccttacctttgtagcaaaggttctcagctcaagctgtaaatgagaattacctgtttaacattttaaagatatccatgactaaaccctcaccccagaaactgcaatttagtagatcttgggtggagacctggcattcatttatattcttcaaaaatctcataggtgattctgatgtgcagccaggatggggcacttctaatagaaagttttctggattttttgagatggagtcttgccctgtcgaccaggctagaatgcagtggcatgatctggtctcactgcaacctgcgccacccaggttcaagtgattcttgtgcctcagcctcctgagcagctgcgactacaggggcatgccaccacgcccagctaatttttgtatttttagtagagatggggtttcaccatattggccaggctggtctcgaactcctgacttagtgatccacccgcctcggcctcccaaagtgcttggattacaggcgtgagccaccttgcctggccagcatgtacattcttatatttatctcattccagccctcacaactcagaacaggtgtcagagacgtttgaaccagagcaactccatcttgaataagttctgggtaaaataaggccgagacctaatgggctgcattcccagacgattacgcattctaagtcacaggatgagataggaagtcagcacaagatacaggtcataaagaccttgctgataaaagagttttcagtaaagaagttggccaaaactcaccaataccaagatggcaatgagagtcatcctaaaaattagccgggcgtggttgcgggtgcctgtagtcccagctactcgggaggctgaggcaggagaatggcgtgaacctgggaggcacagcttgcagtgagctgagattgtgccactgcactccatcctgggcaacagagcaagactctctttcaaaaaaaaaaaaaaaaaaaaaaaccataaaaatggacaaccagcagccttcctggctgctctacctgtggagtaactattcttttgtttctttactttctgctctgtcacccaggctagagtgcagtggcgaaatcttggctcactgccagctccgcctcccggggtcacgccattctcctgcctcagcctcccgagtagctgggactacaggcgcccaccaccacgcccgactgattttttgtatttttagtagagatggagtttcaccatgttagccaggatggtctcgatctcctgacctcgtgatccacccacctcggcctcccaaagcgctgggattacaggccggagccaccgcgcccagcgtgttttttactttcttaataaacttgctttcactttatggacttgctctgaactcttcttcataatatccaagaaacctctcttggggtctggactgggacacctttccagtaacacaagtgctattaatcccttttttgtttttttgagaagcagtttcactcgttttgtccaggctggagtgcaatggcgcgatcttggtttactgcaacctctgccttctgggttcaagcgattctcctgcctcagccttgtgagtagctgggttacaggcgtatcaccacgcccagctaatttttatatttttggtagagatggggtttccccatgttagtgaggctggtgtcaaactcctgaccttctgatccgcccacctctgcctcccaaagtgctgggattacaggcgtgagccaccgtgccagcctgcaatcccattttatagataagaaaattgaggctcaagggcataaatgatgtaccagtgtcttatattgggaaaaggcaaaaccagaacttaggtcttttgacttctagtctattgtagcattgcctcaccaagctatcttctattagactgcaaggaaataagtacaacctgaaaatgtaagccaaaagaccatgcgagtcaagtccaaacccctcatttaacatacaagtatgtgattgctttctaaataagtctgataataaaatggactatcactttgatgacttgtatattgagccaagccgtttacatccatgaggtcacttagtccccaaaactccacagacccccaggtactattgtgtgtttatttcagaaaggtgaaaactagtgcttagaaaaggtaagggtcgagattccaatccaaatttatcccatgagagtctgagctagcaaccactatactccactacctcctagttgataattatatggtttctgaggagggcgtgctcactggctagattggtctgatttttttttcttttaagattttggaaatataggctcagcctttaagagtgggaagattgggccgggcgcagtggctcacgcctgtaatcctagcactttgggaggccgaggtgggcggatcacgaggtcaggagatcgagaccatcctggctaacatggtgaaaccccgtctctactaaaaaaaatacaaaaaaattagccgggcgtggtggcaggcgcctgtagtcccagctactcaggaggctgaggcatgggaatggcatgaacgtgggaggtggagcttgcagtgagccgagattgtgccactgcactccagcctgggcgacagagcgagactctatctcaaaaaaaaaaaaaaaaaaaaaaaaaaagaatgggaagattggccaggtgcggtggctcatgctgtaatcccagcactttggtaggccgaggtgggcggatcacgaggtcaggagatctagaccatcctggctaacacggtgaaaccccatctctactaaaaatacaaaaattagccaggcatggtggtgggcgcctgtagtcccagctacttgggaggctgaggcaggagaatggcgtgaacccgggaggcggagcttgcagtgaaccgagattatgccaccgcactccagcctgggcgacagagcgagactctgtctcaaaaaaacgaaaacaacaacaacaaaaaaagaaagaatgggaagattggctgggcgtgcggtggttcacacctgtaatcccagcactttgggaagccaaggtgggtggatcacgaggtcaggagattgagaccatgctggctaacatggtgaaactccatctctactaataaactacaaaaaattagccgggcatgatggcacgcacctgtagtcctagctactcgggaggctgaggcaggagaatcgcttgaacccgggaggtggaggctgcaagtgagcagagatcgcgccaccactgcactccagcctgggcgacagagcaagactctgtctcaaaaaaaaaaaaaaaaagctaagattttggctagatgcggtggcttacacctgtaatcccagcactttgggaggccaaggagcatggatcacctgaggtcaggagtttgagaccagcctggccaatatggtgaaacgccgtctctactaaaaatacaaaaattagtcaggggtggtggcgcacgcctgtagttccagctattacggaggctgaggcaggagaatcgcttgaacctgggaggtggaggttgcattgagcgccattgcactctagcctgggtgacaagagcgaaactccacttcaaaaacaaaaaaaaaaagaaaggaaaaaaagaagggaagattctaacacaaacaagtggtgcgcttcgtgctgttgtggtaagcacataaatgcatcatccgtgctttctagaacagaacttctcactggcttttcatgaaagcccggggggggagggtggttaacctagactgcccagaatacaaacttccaactacctgaaaggtggctttgcaaagaggaatgtggttcaattattatggaaatattgagacaagcaaagacatctgccttgaggaaatatgcaagacatgagaagggcctgccctcttttgcccaaggctttcctattatgatcttgtaaaccatcattcctgaatcctccaagtgtgtctgcatttgtcgcatggatagatttacccagacaggtggaagagtcatgacttaagggttataaacagctgcagaggcctgagctgcttccatagtcttggtagcagggaatgagtccattcctggtgccaggcattaaccagccttagaataggcccccaaataggagcgactgtaattttggtccagtacatgcaccacccattacaactaaacagtaacattaaaatgtaaggaatttccagtccttttaaaagggatcatcttggtgcgctctctgttgctgactcattgtgcggctgctttgagactattaggtttctaaatgggacacacagtaggtattcaacagataaatgtcaacttgttgcagtacttttcatcctttaaggaggatgcccttactatcccaccatcagtaaagcaaatgagagaacagtaacagtgacaaatctcccttctgcttgccgaggttgtaactccccaagaaagagcttccccctctgtcaggtaacgttttacagtgacagccagcacgacttccacccagcgcgaggtagattcgccttccgtccaatcatcgccgagattttggggtgggggaggggagagagtcccaaggccttcccagtccaggaagggggcgggcttaggctgagccgtggccgccacagcccatcgtaatgccgcatggtgcttggcactccagagagccaataggaatgaaagaattcatttgaatcggccaatgccggcgggttagggggcgggggttgaaaaccctataaaggcgtcgatcggccggacaggcggcagcggcggctcctgcagcggtggtcggctgttgggtgtggagtttcccagcgcccctcgggtccgaccctttgagcgttctgctccggcgccagcctacctcgctcctcggcgccatgaccacaaccaccaccttcaagggagtcgaccccaacagcaggaatagctcccggtgaggcgaccgggtcgcgcccgagccgcgcggggctgaggggctgggagggccgctgccggcggggcctcgcgccggtcgttgcgggtaacgagccccgtgcgctgtgctcgcgccggggcgggtggcggggttctgccgtcggcgccgcctttgtgccgcctggcgagccctgcgcgccggccccacccgggtccctgctgctctccattcattccttccacggagtcaggggctgaggaggccggggctggtcgcccctcggagcacggccggttttcgttaatcggaaccttcggggagggcttcgctttctcctgtgtgcatcccggctggtgcatccccagggtggtgggcttggccccccaggtgcccggggatcctttagggccccatgcatggtcaggtcctattgtcccattgatgggccacgcgctcctgtctctcccccgtggcatgcggttggtctcgctctcgcgcgcagccattggatccggagaccggatcgatcaggtccggcgggctccttaccctcgccgtgcccccactccttattcggacctacctgacaggtgcatgtgtggtcragcggggctggtcatcgcgacccttcaccccccattgaggacccaatcgttcttcccctcttcgaagtgcctcccctcttccaagtgtctccccttcctaacaaaggaaagaccccttctccccatccctgcgctcatttctaaggcggggggcgggggcgggcgcggggaacgagccaacccgagtgggttttctgcgcttaaaccttcggaccgtggcctttgcatcctaccttcgcttcctcctttgacgtttgcccagtgagttcatccctggccctggttcccttgcaggaggaggtttcttgttcttgggcggggccggagacatccattgtctctaacgtggtagcgctacctgggaagcgggggatttttcttgcccttcttcccactgctttttgggcttggggcactgggtacagtgtttggacaggaacccttttccaagtccttgcttaacttacttggtggaagggtttggattctgtggaaggtgtccacattgtctcagctaattgcacactgttctttaaggtgggttacagttatgtctgggatcctcttcaaggcttggaagaagcttaaatcacttttttgagcatgtattttacatcgattatgacctgcattcatgtgtggctaccctcggggtcctggccaagtggcacaaagggagccattttgtggggctaagaagacacgtgaaatagccatatctcacaggggttagagaacttgggaacaaaaagcacgcctcactcagcaattgagccttaggaggaaagcatgggaaatgacattcctttacaactcaatactttcaggtttacaaggtcaaaaagactaggtaagattaaaaaaataaattggtgattactgggaggatggggtacttaagtagcacagacctaggaaactggtcgctccctttctgttttctttccaatgagatgatttcttcagagaacaggaagagattgagccttggtttttcattttgtgttacgaggccaactttctgccggttagacttcagtcgtcggaatgataatgtgtaatctggggttttattctttggggttgagttgatattagtgttttgtaaagaatttcagtaattaggtcaaatgaatcctcacacttagtttttcatgtgtacatttgaaatgtgagacaaatgagttctgatcctgtgaaatgaatgtttaattcacctttcgtcatcaatttccctccaatattatgctctagggactgtagtagcattgtcattttattgtctctctaccttccytttttctatattctcacctaattctcataaacttaattttgtccagtaatgttctcctggccccataaactcgttataaatttagtctggtagggaatgatctgcaaagatatacagaaacttcaggattttaagagagaagaaagaaaaggagcaattttttaaaaattgctatttacagtacatggacacatttttgttcagtcttaaatatataatcctgatttagttgtcgtgtatgattctgaaagaatagtaggatcctaaaacattgagatactttctgccttatgatctacatcctttgtttggggatatctcactattacaaatggtctctacaacactgacgtcatccgagttggttactacctgctattgcaggaggaacagagacctttaaaaagtgggactggttagagttttgacttgctcttaagctggtgttcgggtactagtgtctttttcttgattttttttttttttttgagacgcagttttgctctttttgcccgggctggagtgcagtggcacaatctctgctcaccgcaacctctgccttccaggttcaagcgattctcctgcctcagcctcccgactagccgagattacaggcatgtgccaaaacgcctggctaattttatatttttagtagagacgggttttctctatgttggtccagctggtctcgaactcctgacctcaggtgatccgcccgcctcggcctcccaaagtgctgggattacaggcgtgagccactgcgccctgccttattttttttaattaatttatttttttgagacagtctcactgtgttgccaggctggagtgcagtggcatgatctctggctcactgcaacctctgcctcccgggttcaagcgattcttctgcctctgcctcagcctcctgaatagtcgggactacaggcatgtgccaccacgcccagctaatttttgtacatttgtagtacagacagtttcaccatgttggccaggatggtcttgatctcttgaccttgtgatctgcctgccttggcttctcaaagtgctaggattacaggcatgagccaccgctcctgaccttaattttattattattattattattatcattattattttgagacggagtctcactcttttgcccaggctagagtgcagtggtgtgatcttagcttactgtaggctccgcctcctacagggttcaagcgattctcctacctcagcctccggagtagctgggattacaggttcacatcaccacgcccagatagaagtgctaaatattcttagaaaaatgtttcttggccgggcgcggtggctcacgcctgtaatcccagcactttgggaggccgaggcgggcagatcatgaggtcaggagatggagaccatcctggctaacacggtgaaaccccgtctctactaaaaataaaagagttagccgggcgttccggcgggcgcctgtagtcccagcttctcgagaggctaaggcaggagaaaggtgtaaacctgggaggcggagcttgcagtgagccgagatcgcaccattgcagtccagcctgggcaacagagcaggattctgtctcaaaaaaaaaaaaaaaaaaaaaaaagaaagaaaaatgttgcttattcaaactgccttatgaagaaacaaaaccagaccactcatatcaccagtaaaggaattgaatcagtagttagaaagtctttccatattctgcaattacacaggcagtaagaaaacaaaaaaaagaagttaaaaaaaaagttggctgggctgggtagctcatgcctgtaatcccagcactttgggaggctgaggcaggcggatcacctgaggtcaggagttcaagaccagcctgaccaacatggtgaaaccctgtctttactaaaaatacaacaattaggccaggtgcagtggctcacgcctgtaatcccagcactttgggaggccaggcgggtggatcacctgaggtcaggagttcgagaccagcctggccaacatggcgaaaccccgtctctactgaaaatacaaaaattagctgtttgtggtggtgggcacctgtaatcccagctactcaggggctgaggcaggagaatcgcttgaacccgggaggcggaggttgcagtgagccgagattgcaccactgcactctagcctgggcgacaagagcgagattgtgcctcaaaaaaaaaaaagaaaagaaaaaaaagtatttctataaaaccacctgcattttctgttttgagaggtggcaagaggagttaaattgagtttttccaaggaggagacaaattggtcaacctatggcagaaagatttggaaatgttaaaaaatatattaccatgttgaacagaaagctacagatgatattcaaaggaacactgatatagaccatgtcatggaatcttatacttaattgctcatactgactttgccctcatgggtagttacttatgtttattgtgagaatagtgaggtacaagtatgtaaatggctttttagtgaggttgagatagaagagactattatcagctcttcttgggcttctaaattggtcaagctgacttaagtgtgtgtgtgtgtgtgtgtgkaagtgtgtaagtgattagagatggggatctcactatgttgcctaggctggccttgaactcctgggctcaagcaatcctcctgcctcagcttccagaatggctgggactataggggcctgctactgatcgtgcccaagttatttatctagttgaaaataagaaggaagtgattttttaaaatttatttactttttttggctgggcgtggtggctcatgcctgtaatcctagcactttgggaggccgaggtgagtggatcatgaggtcaggagatcaagagcatcctggctaacacggtgaaaccccgtctctactaaaaatacaaaaaattagctgggcgtggtggcgggcgcctgtagtcccagctatccgggaggctgaggcaggtgaatggcgtgaacccgggaggtggagcttgcagtgagctgagatcgcgccactgcactccagcctgggcgacagagggagactccgtctcaaaaaaaaaatttatttactttttacattttgagacagagtcttgctctgtcacacaggctggagttcagcggtgtgaacacagctcactgcagccttgacctcccggccgaaacgatccttctgtctcagagtccagtgtagctgggaccacaggcatgcgccactacgcttggctaatttttaattttttttttatagagacacggggtcttgccatgttgcccaggctggtcttgaactcctaggctcaagtgatgatcctgccttggcctcctagggtgctgggattacaggtgtgtgccactgtgcctggaaatgatttttaaatgaataataacaagaaatacttctaaacttctttgaaagtatattcagccaagcccagtagagtaaggtccattagatcttttgccatttctgaaaaggggacaccaaccaggctgttatttatgatgagttccatgctgtttcagctgccttgtgtgatcgatgaccttattacaagtattataaagcagtatttagtatcttaacatccagcactgaatgtagacactgatggagttgattcttttttcctgttagcagctatctgttgtaggggtgagggagatgaatgggtgaggaaagtgaaatgaaagttstctgaaaagatttatgccaagaaatgtttcagtatgatctgaagttgatgttttgccattatttgcagagttttgcggcctccaggtggtggatccaatttttcattaggttttgatgaaccaacagaacaacctgtgaggaagaacaaaatggcctctaatatctttgggacacctgaagaaaatcaagcttcttgggccaagtcagcaggtactcttgttatctgtgctcactgttcaaagggatgggcccagcatcaacagccacagatgcagcttgggcaccagcatgtgcccccgtgtctaaaaaacaaaacaaaacaaaaattagctggtgktagtggcagtgtgcatttagtccctgatactccggaggccraggtgggaggattgctgagcctgggaggtggaggctgcagtgagctgtgattgagccactgccctccagcctaggtgacagagtgaaaccctgtgtcaaaaacaaacaaaagaaaaaccaactacagctggttttgaactaataacaaaatctagcttacaacagtttagacttagcctgagaggaaagaaatgggaaatactgagaggctgtgtgatggatcagagtaaggactgaagtcagactgggttaatgtttaagtgatcagcttaacttccttaagactgtttcctcatttcataatgtgagactaacacataacgtcaattgctgaagttttttgtttttgtttttgagataagagtctcattctgttgcccaggctggagtacagagtgcagtggtgccatcttggcacaccacaacctccacctcccgagttcaagtgattcttctgcctcagcctcccgagtagctaggattacaagcatgcaccatgacgtccagccaatttttatatttttagtagagacagggttttaccatgttggccaggctggtcttgaactcctgacctcaggtgatctgcccgcctcggcctcctaaagcactgagattacaggcatgagccaccgtgcccagcctgaagtgttttgctttaggttttttctattgtatttctgaagaaagtatattttgatttttaggtgccaagtctagtggtggcagggaagacttggagtcatctggactgcagagaaggaactcctctgaagcaagctccggagacttcttagatctgaaggtcagtgtgacagcatgaggccagaaaggctttcaggtcaatatgattctgaaatttgtactaagagtttcagttcwcccactggaattttacattgaggtagttaggaaagggactgggccatattgataatggaagattgatagtaaaatcatagaagtgtgttaacatggtctcagtctgtttctgtatctcttttaccattaggatttgttttatctcccctattgatttttggaacttgtggatctttctcacttcctgtgtgtctcatatatagaagcatttctgagttcagaactgctttgcgttgaactccaggagactagtgctggcattaccattggttgtgtctgcagttgaatactgccaccaagccccccagggggtgtgctgcgaagtggaaagaccccgcccgactaagcactaaagccctcagagcacagtgaggcatcacctgtctgagtggggagagaactggagaagggctttggaactgataggggtccttccataactattatctagtttccccttatcggggaaaggagagagaaatgaaaggagagatttaccagttttccattctaataaaagatctctgaagtgctaattggtgttaggtcctcagaggaaatgttggggtttgttgtagacgwggtactagcactagagcaatttrtcatgcagaatttttgcatagcattgtcctgagttggrtagaggtagcagactgaccctgtgcttgattgcaacacaatgaaatgtcacattcggtttcaagtagatgttagctgctatgaactatgactgttttgcgtgttccaaaattaaaataggaagtaaatttttgaatttttttcttttctagggagaaggtgatattyatggtaagtrcttctgaagaccaaatttctggctctgtccatggttttaggacagatctgaatcttgatttaaatcatgtcttggggaaagagactggggagtgaaacctggccatgccccaagtgccgccatactctaatctgccagtaacgcgatcaatgctagaaacataatagaagggaaaaaacagagaatcctttaaaattacatatattggctgggcatggtggctcacgcctgtaatctcaacactttgggaggctgaggcaggcagattgcttgagcccaggagttcaagaccagcctggaaacatggtgaaaccctgtctctataaaaaagtacaaaaattagcctagcatggcggcacatgcctgtagtccagctactcgggaggctcaggtgggaggattgcttgagctcaggacgtggaggttgcagtgagcagagatcacaccgttatactccagtctgggtgacagagtgagaccttgcctgaaaaaaataaactaaaccaaaatatatctaaacacacacacatacatattaatcaggtcagtatttgttacacttaatgagagcttttttttttgagaccaggtgtmtctctgttgccaaggctggagtgcagtaggcaatcacagcttactgtggcctcgacctccttgggcttaggtgatcctcccacctcagcctccctagtaactgggactacaggggtacaacaccacacctcgctaatttgtttttatttttagtagagatgaggtctcactatgttgcccaggctggtctcgaacccctgagcttaagtgatcctcccacctcagcctccccaagtgctgctattactggcaagagccccagcacccagctgagagctttttgtatttatgtagctatttatcacagactagccaagtgcagtattgagaagaggggaaagagtaaaacaaggaggttgatctgtaactatgaacaagataactcactaccagccagagagagctttttaatataaccatttcaagctcagctcacagcatccactttacaaagttcatttgtttttatagggagatgcttattcagcaagacattggttacctgcttggtgattttgtaaatgatgatttagggggcagatgtaaattttcagctaaccaaccatattacgaattataggtggaaatgagctgtaatcattgacttaattatcttaaatcttggaggtatttattggcatttctgtaacaagtgctaaagacttgscgatgagtgcaaggtttgtaagtgtcaggcagtagcagtcagtgaagtgcagcagtcacaaggccctctggtctagacagaagcagcagcttcctcttaaggccttttcctacccttatgttttgtggtgtgcttacaaggacacacggaaaggttgaagaagcagattcctctcctgccttctcacacagtgttctgtttttttggttgtgtttttttttttttttttttttttgagatggagtctggctctgtcatccaggctggagtgcagtggcaggatctcagctcacttcaacctctgcctcccgggttcaagcacttctcctggctcagcctcctgaatagctgggattacaggcacgcggcaccatgcccggcatgagccactgcgcccggcctcacagtgtttcttggtgggcttagaggagaagctcctgagcctttgggagcattgcctgggttcttccttataggacctgtttagggggaaaacactcaaacgtgtttttcctctttttttcacaccacaacaatcatcaacacagaagacgacacctgtgaccaaatatggggggtttctccccacacgccaatcagtggacaccagttgggagtcctccaatccagtttccacaccctctgcctgaagataacctcagattcagcaggttgagggtcagtcccacaagactgccccttccttcccaccagttgtaagtctgggcctctggaacttctgaccgactggcttcaaattggggttcctgtgaccccttctatggttttgattaatttgctagagaggttcacagaaagaactcagggaaacacttatgtttacaggttcattatgaatatatgatacatttttttttatttttttctaaactgaatcttgctctgttgtccagactggagtgcagtgtcaccctcacagctcactgcaacttcaaactcctgagctgaagcaatcctcctgcctcagcctcctgagtagctgggatacaggtgtatgccaccatgcctggctaattttttttctttttttgtagagatgtggtctcactatgttatgttacacaggccagtcatgtgatcctcccacctcagcctccaaaagtattgagattacaggcatgagccactgtacctgggttgttacgaaggatatttgaaaggatacaaataaacagcccagtgaggagatacttggggcctggtatggaaaggtcccaagtacaggagctcctgtaccttggagttggggtgtgccaccctcctggcacatggatgagttgttgcaccttcctgtcagcttccacatgttcagttatccagaagtcctcagaatccatccttctgggtgtttttttaagactgggttttggtcttaaccaggctagagtgcagtggcacaatctcattgctcactatagcctcaacctcctggactcaagcagtcttcctacctttgcctcccaaagtgagccactgtgcccagccccttttgggtttttcttttttttctcgagatggagattcgctcttttttttttctgagatggagtctcactctctgtcacccaggctggagtgcagtggtgccatctcagctcactgcatcctctgcctcccaggttcaagcgattctccttcctcagcctcctgagtagctgagattacaggcatgcaccaccatgcccaggtaattttttaatttttagtggagacagggtttcgccatgttggccaggctggtcttgatctcctgacctcaggtgatccaccctcctcagcctcccaaagtgctaagattatgggtgtaagccaccatgcctggccaagtttcacactttttgcccaggctggagtgcaatggcatgatcttggctcactgcaacctctgcctcctgggttcaagcaattctcctgcctcagcctcctgagtagctgagattacaggtgcacgctactatacctggctaattttgtatttttagtagagacgaggtttcaccatgttggccgggctgatactgaactcctgacctccagtaatccacctgctttggctttccaaagtgctgggattacaggcatgagccgctacacctggcccctttwggttttttatggaggcttcattacataagcatgattgacaactgtacagaaatacgattagacaaaaaaggtttgatttcataccaatggactgaacaagggaactcagaaggcccgtctgttagattcttcttggcctctccatgtagcattccctcctccagggtatggagcaggaccctctggattaagggtcttttgacctgccatcagattacagtcctgccctgggcaggtaaaaggaggacaggaggtcacaaagagattctgtttcctgagggctgctcctgaggcttaatgcaccccattcaaaagacttttaagggctatgggagttaccagccagtagctgtggacaaaaacagattttgtgtgtgtgtgtgtgtattttcatatacgtatgtatatcataatatcacaggaccagttacttttgcattggaccgaagatgtatgtattaattactgtttgtgttctatttgtactgttctggaaagacttctggaggtaaaatctaggttttttgattccacttcttgcttccttccttcttccctcctctcccttcccctcccctcccttctcatcccttcccgttcccttcctcccccttccctccatccccccctcccctccctcccctccctcccctcctctctcccccttcccctccctccctccctctccctccctctcccctcccctccccccttgacggagtttagctcttgttgtccaggctggagtgtagtggcacgatcacggctcactgcaactccacctaccggtttcaagtgattctcctgcctcagcctccctgcgtagctgggattacaagggctgccaccacgcccggctaattttttttttattagtagagacagagtttcaacatgttggccagactggtcttgaactcctgacctcaggtgatccacctgccttggcctcccaaaatgctaggattacaggcgtgagccaccaggcccggccggttctactgctttctatattctgaatactttcactgtcagaccttatttaacaagaatcagctaatctttattcaattattttggtcagttaatacaactagaagttaggggaacttggagaagtatgtcaacaatgtgtcaatagtcctaccacataattaataattctgttcccttttcagtccccttcacagtttttgttttttcgagacagagccttgctctgtcacccaggctggagtgcagtggtatgatctcagctcaaggcaacctccgcctcccaggttcaagcgattctcccgccttagcctcctgagtatctgggactacaggtgtgcgccactacagctggctattttttttacttttagtagagacggagtttcaccatattcaccaggctggtctcgaactcctgacctcaagcgatctacccaccttggcctcccaaagcgctgggaggcatgagccactgcgcccagcctcgctcaactaattttttttatttttagcagacacggagttttcgccatgttggccaggctggtcgcaaactcctaagtcctttctttttccccccagtggttatctggttacctgttgttgttttttcctttttgttttttttgagagtctcactctgtcgccaggctggagtgcagtggcataatcttggctcactgcaacctccgcctcccgggttcaagtgattctcctgcctcagcctcccgagtagctgggactacaggcatgcaccaccatgcctagctaatttttgtatttttagtagagacagtatttcaccatgttggccaggctggtctcaaactcctgacctcaggtgatccccctgccttggcctcccaaagtgctgggattacaggtgtaagctattgtgcccggcctttttaagtttctgatctgatatattctgtgtggctgactgctgcaactttagttcatctgtcttaaaatgaaaaggggcacaataatatttttttctttactgagacaggttctcactgttgcctgaaccacgagtgcagtggcacaatcaccactcactgcagccttgacttccgggttcaagccatcctctcacctcagcttcctgagtagttgggactacagttgcatgccaccatgcctggctaatttttgtggttttgtttttgttttgtttytgagatggagtcttgctctgttgcccaggctagaaatgcagtggcatgatcttggctcactgcagcctccacctctttgattcaagcaattctcctgcctcagcctcccgagtagctgggattacaggtgcccgccactgtgtccagctaatttttgtgttttcagtagagacaggatttcaccatcttgcccaggccggtctcgaactccttacctcgtgatccacctgccttggcctcccaaagtgtcgggattacaggcgtgagccaccgtgcttggccaatttttgtagtttctgtagagacagggttttgctatgtttcccccggctggtcctgggttcatgttgatcttcctgccttggcctcccaaaattctgggattacaggtgtgagccgctgtgcctggctgaggtacagtaataagatacatctggaggattaaaggtcaaccccaattcagtttaaataagatagattccctttggatatacgggaaatttattttacctcttgggcaattaaacgcaggaatggctacaggaatgactttggagtttccatcttgagaaatctaagagggagaaggtccaggaagttcaggcagagaagtctccctgactgcgggcaagttagatggtcggctacatttcttccagttctgattctttgatgcttacaatgaatcattttctattcagatagagatgtctttgttcagttatcttattgatgtgccaaagaaaagagaccaggagtgtctaaaatgtatattttggtagaaataatttcatttaaagccctttttttttttaaattatcttcagcagacaaaagctttctgtgtcaaattggcataaaagtttctaaacatttggctgggcgcggtggctcatgcctgtaatcccagcccttcgggaggctgaggtgtgcggatcatgaggtcaagagatcaagaccatcctggccaacatggtgaaagcccgtctctactaaaaatacaaaaattagccaggcgtggtggcacgcgcctgtaatcccagctacttgggaggctgaggcaggagaatcgcttgaacctgggaggtggagatagattgcgccactgcactccagcctggcaagagagagagactccatctgaaaaaataaatcaaagtttctgaacacttactctcaattcctgtacttatctcattatgggctggaaacaaacaaacctccctcctctgtgggtggagtacttctgactggacagacatttatttatttttgagacggagtcttactctgtcgcccaggctggagtgctgtggcacgatcttggctcacttcaaactccgcctcccgggttcaagtgattctcttgcctcagcctcccgagtatctgtgaatacaggcgcgcacacacgcccagctaatttttgtacttttgtagacacggggtttcaccatgttggccaagctggtctcaaactcctgacctcaggttattcagctgccttggcctcccaaagtgctgggattacaggtgtgagccactgcacctggcctggacagacatttaaagtaaggcctactgctgcttgtttagtctccataggtgcttttttatttttttcttcttctttattagtatgttatgtatttgtgaaaaacaaaacagttctagtaataatgtaagacaaatataagattagtagtattgagcttgattcatctgaagaggattttatgaaaataaaccactatggcaggactgcaagataattttttgttcttcagaatgttcattaactgctggattcagagagagaatgaagacttcagtagatcctgtatrtatagcaggaggccatgtcccaccagcagaaatgaaactgcttgaactaacaagttgtctcagtccgaattctctttatcttgaatattttaaatgtggagttttgtttttcttttatatttacaattatatttaggttatttcagggacacttattgtaggacttgtgtgtctgatccagtgcatttgatcttgcttcttttacaatggatgtaaccaaggaaactaatgggtgaccctctctgagttttagttcataattgtgacagttgtcattctgaaaagcttcatactctatttttgcttgtagttaaatagtatagaacattttatgttactcccatagaatgttccagaaattcatgaaatgttaaaagcagcagtagtatgttaacattaacaaagcatgaaaaataaataaataaaataaatgtctgtccaatgagaaatactgcagccacagaagagggaggtttgtttgcttctagcctatcatgagataagtacatgaattgagagtaagtgttaaagacctcttcttggccgggcatggtggctcacgcctgtaatctgagtactttgggcagctgaggtgggtggatcacttgcggtcaggaggttgagacaagcctggccaacatggtgaaacctggtctctacaaaaatacaaaaaattagcygggcatggtggcgggcgcctataaccccagctattgggaggctgaggcaggagaatcgcttgagcctgggaggcggaggttgtggtgggccaggatcacgctactttactccagtctgggcgatggaatgagacacagtctcaaaaaaaaaaaaaaaatccattaatataggagcattattaactgcccttactgccttttcaggcaaaagggattctatgaaatatttttacgaatatcttagaatatgcaactgaatttgattggttaacactgaaataaacttgctattaaaaagaaaactaaggcccagtatggaggctcacgcctgtaatcccagcaccttgggaggcyaaggcaggttggatcacctgaggtcaggagtttaagaccagccaggccaacatggtgaaaccctgtctctactaaaaatacaaaaaattagtcgggcgttgtagcgggcacctataatcccagctacttacttgggatgctgaggcaggagaattgcttgaacccgggaggcacaggttgcagtgagccgaaattgcactgttgcactctagcctggacaacatgtgtgaaactccatctcaactaaagaaaaaaaaggaaaactaggccgggtgcagtggcttaatgcctgtaatcccagcactttgggaggccaaggtaggtggctcacttgaggccaggagtttgagaccagcctggccaacatggcgaaaccccgtctctactaaaaatacaaaaattaatcaggcatggtggtgcatgcctgtaattccagctactcgggaggctgaggcaggagaattgcttgaacccaggaggcagaggttaaagaccctgtctcaaaaaaaaaaaaaaaggaaaactaggctgtgtgaagggtgaaggtggctcatgcctgtgatcccagcacttagggagggtgagatgggaggatcacttgagtccaggaatttgagaccagcctgggtaacataaggagaccccatcttttaaaaataaaaaaaaaamaaaaacaaaaatagccagttgtggtggtgcgcgcctgtagtcccagctatttgggagactgatataggaggattgcttgagcccaggagtttgaggctacagtgggctgtgattgaggtactgcactccagcctgggccacagagtgagaccctgtctcaatatcctccacctgccaccccacccctccacaaaaaacaaacaaacaaaaaaactaaaaatatgtatactattaagctcttagtaaaagtttcctttcatagaaaatatagaatttttgcattcactttgcactttgaatcagttttttcccggtttagaaacaaccctaatgagagacaattcatttggaaaattggatgggttccagtttttttgctgtcagagaattggataaatagcctatatcatgtgataattactataaagcaatgaagcttgacagtgaggtgagggatttgaaaacatacagttaataagcaaggcgaattactaccctgtttgtaaatatggatacatttccaagagtgaaaaaaagaagttgataccatttatgttaaatataaccaaaacatgttacatgttatctggctacatgtaaatatacataaaacaagtggactagaaggctgcacaggacttgcagtgggacctctgggaatagggggagcaggatccacccggagctggaaggggccgtagagctagagttccctgttcttatttaaaaatcttcatgtccttgggccaggcgcggtggctcacgcctgtaatcccagcactttgggaggccgaggcaggtggatcacaaggtcatgaattcaagaccagcttggccaggatggtgaaaccccatctgtactaaaaatacaagaattagccgggcatggcggcaggcgcctgtaatcccagctactagagaggctgaggcaggagaattgcttgaacctgggaagtggaggttgcagtgagccaagactgcaccattgcactccagcctgggcaacagcgagactccgtcaaaaaacaaaacaaaacaaaaaaaaacttcatgtccttatatatttgtgtaatttagaaaagaacataaacaacaaatatgggaaaagatgaacaatggttaattctgtggagtgggagcatggtgggtgattattttgtttatgcttttaggtatgtttccaaccatcaaaccaaaaaaaaaagaaaaagagaaacagatccttgatcttaacaggaaatggctgtcattatgagtattatttctattccctgttttcatagaaaatgtggacacagacttgccaggcagcctggggcagagtgaagagaagcccgtgcctgctgcgcctgtgcccagcccggtggccccggccccagtgccatccagaagaaatccccctggcggcaagtccagcctcgtcttgggttagctctgactgtcctgaacgctgtcgttctgtctgtttcctccatgcttgtgaactgcacaacttgagcctgactgtacatctcttggatttgtttcattaaaaagaagcactttatgtactgctgtcttttttttttttcttttgaagaacaggtttctctctgtccttgactcttgggtctgtgggccatggcatgagtgttttctagtagtagattggagggaaagctttgtgacacttagtactgtgtttttaagaagaaataatttggttccagatgtgttagaggatcttttgtactgaggtttttaacactttacttgggtttaccaagcctcaactggacagaccataaacagtccacaggcaccgttcctgccaggccccaacccacagggagtctctccgcagagccttcttggtgttgccctaacttgccagtggcctttgctcagagcctcctcctgtgacatgtgaacaatgaagaggcctgcgcctcctgccttgccgcctgcaaagcaaagaaactgccttttattttttaaccttaaaaagtagccagatagtaacaagactggctggctgatgagcaaagcctttgctctcacgcagaggaaggcttggatgtacaatgaaactgcctggaactaaaagcagtgaagcaagggaggcaatcacactgaagcgggtcttcctccaggaacggggtcccacaggcgtgttgttttaaataacctgatgctgtgtgcatgatgctggtgcttgaccatgaaaggaaagtctcatccttaaaatgtgttgtacttcacaatcctggactgttgcttcaagtaaacaatatccacattttgaaacactgtgtactgtgtcttctttttgagatggtttcagtgttctccctggttagatgcttttctctttgtcactataaatcctgcctactgattggaggagtcatttgaagttaaatagccagatgtgcctgtaattagctacttgggaagccaaggcaagaggatgcttgagcccaggagtttgagactatcctgggcaacatagcgagacctccttaaaaaacaaaatcttaaaacagatgaagacccagagaggagtgggtttctttctgaagaaggctctaaagatgagcaggttagactcttctacctcccctttgttctgggcagtaacattttaaagtgttctccaagactgggcaacatggtgaaacctcgtctctaccaaaaatagccaggtgtgatggcacacgcctgtagtcgggaggctgaggcaggaggattgcttcaccctgtgagatcaaggctgcagtgagccatgatcgcaccactgtactccagcctgggtgacagcaagaccctgtctcaaaaaaagttctccaactttaaatatgcggggatttctccccaccagcaagcaagcaagcaagcaattctgcagtggataccagctaggtgtcctccaatttttttttttttttaagacagtgtctcagtctgtcgcccaggctgaagtgcagtggcacaatctgctcactgcaacctctgccttctgggttccagcgattctcctgcctcaccctcccgagtagctgggactacaggcatgtgccaccacacccagctaatttttgtatttttagtagagacagggtttatgccatgttgcccaggctggtgtcgaactcctgacctcaagtaatctgcccacctcgacttcccaaagtgctgggattataggcatgagccacctcacctggccctccaattcaattctgacaatcagttacctggagatagctttgattccacaagttgagggctcagcccccaagactgcttccccttgagataactcgcaagtctgggcctccaaaatgtctgcgtatctatgagtcatatgcatgttgacttgagcccctcttagactggtttgtcaggctttttttttttctgagatggagtctggctctgtcacccaggctggactgcagtggcatgatcttggctcactgcaacgtctgtctcccgggttcaagcaattctcctgccttggcctcctgagtagctgggatttgtaggcatgtcccaccatgcccggctagtttttgtatttttagtagagatggggtttcaccatgttggtcaggctggtctcgaactcctgactttgtgatccacctgcctcggcctcccaaaatgctgggattacaggcgtgagccactgcacccggccctgtcaggtttttttgtgtgtgtgatgcttctattacatgttttgtttgtttgtttgtttgagacggagtctcgctgtggcccaggctggagtgcagtggcgtggtcttggctcactgtaatctctgcctcccgggttcatgccattctcctacctcagcctcctgagtagctgggactacagtcacccgccaccatgcccagctaattttttttttttttttgtatttttagtagagacagggtttcaccgtgttagccaggatggtcctgatctcctgacctcatgatccgcccgcctcagcctcccaaagtgctgggattacaggcgtgagctaccgtgcccagcctctgttacatatatttggaagcagtgggttcatcagatggggaacaatggcgagatgggccacttaaatctgtgtttataattttggctctcccctcccccaacagggactccctctgtcacccaggctggagtgcagtggcaggatgaaggctgtgtagcctcaatttcctgggctcaagggttcctcccacctaaggctcatgagtagctaggaccacaggcatgcgccaccatacccagcttattgatttgtttattgtagagacagggtctccctgtgttgctcaggctggtcttgaactcctgggctcaagctgtctcccacctgggcctcccaaagtgctgggattaccagcctgagccacggcgcctggctttatagtttgtaggcaaatagatttgagtggagtcaggaagtttcatgacatccacaaaaagaagagtcaacaaaatgtatcacagttcagcatgttctttttttttttttttttttttgagaaggagttttgttcttgctgcccaggctggagggcaatggcatgatctcggctcaccgcaacctctgcctcctggattcaagagattctcctgcctcagcctcccgggtagctgggattacaagcatgtgccaccacgctaattttgtatttttagtagcgacaggatttctccatgttggtcaggctggtcttgaactcccgacctcagatgatccgcccgccacggcctcccaaagtgctgggattataggcgtgagccaccgcacctggccctgttcagcattttctagacgggagtaggtaagcgatgtcagttccacataaagtcctgaggacagtcctgattacctgtgcttgatcaaaatcatctttccgggggaaaccacacttgaagctcccatgtttcaagccaactctagtgtgaattagtctcttaacgagctagacttacacaaaccagttaacagattcatttcactttgtagtcctcgagggattgttcctgctccactgcacagacgaaagcaatccactgagaccacggtactgcggtaataagactttggccaggtgcggtggctcaagcctataatcccaacactttgggaggccaaggcaggcagatcacttgaggtcaggagtttgaaaccagcctgaccaacatggcgaaaccccgtctctactaaaactacaaaaattagccaggcgtggtggcgggtgcctgtaatcccagctactcgggaggctgaagcaagagaatcggttgaacccgggaagcggaggctgcagtgagccgagatcgcgccgccactgcgccgcagcctgggcgacagagccagactccgtctcaaaataaaaaaaaaaaaaaagaaaaaaagaaaaaaaatgtggagctagccccacgggtttaggacccttgactcctcgttagatgcttcccagtatctcagagcatccctttgttgggcccccggaaggtcggtcccctactagtaacgtggggtgaacgggggtacgtctgccgtaaagtgggaggcggctgatggggacaaaggctgggtcccgaagaagcgcagggtcagaaaagtgccccccaaagccgtccctgcacccgaaccctaggaaggcctcgcgcaaccgcagggccgtcggcactggtttacgacctgggcggggcggcccggacactctatgcaaatcagcccggcggactccggaagcagcgctccctccgcttccggccgagcccgcgccccccagaccccgagagctcgcagctccggcccggcggcgatggcgcggagcgtgcgcgtgctggtggacatggacggcgtcctggccgacttcgaggccggcctcctgcggggcttccgccgccgcttccctgaggagccgcacgtgccgctggagcaacgccgcggcttcctggcccgcgagcagtaccgcgccctgcggcccgacctggcggtagggggcgcagggtccccacccgggcagggcccgctcgctccgttccgggggtctcccccttctctgtgaagggcgcagagctctcaccctggaacccgcgggcagcgcaccctggggaggagcctttgggcgcgtgcccctgaccgacgccccctccgcccctctgagctcgggcccggagcccccaggagcctccctgcgggtcctcgcgggaacgggaagccgggacccagaactcttgtctttcaggataaagtggccagtgtgtacgaagccccgggctttttcctggacctggagcccatcccgggagccttggacgctgtgcgggagatgaacgacctaccggagtaaggagagaggggggcgggcggagtcctgggcgggctcctggctcccggcggtaaccgcgtccttctccgcagcacgcaggtcttcatctgcaccagccccctgctgaagtaccaccactgtgtgggtgagaaggtgtggctgccccgcccctactccgcacgtggagctgcctaaatcctgattttaaaaagaaaccaccagaaacccagaaggtgggggtggggggctctcaagggcttagagccaactccctatccctgaattccggcttccatcaggccctactcacagactgtgttttctacacagtaccgctgggtggagcagcacctggggccccagttcgtagaacgaattatcctgacaagggacaagacggtggtcttgggggacctgctcattgatgacaaggacacagttcgaggttggacccgttatccttggcagcctccaggcctctggcctgcccggattagggagagggagtaataatacccatgacagatggcagcgcgctgtctttcctgtcctaggccaggaggagaccccaagctgggagcacatcttgttcacctgctgccacaatcggcacctggtcctgcccccgacaaggagacggctgctctcctggagtgacaactggagggagatcttagatagcaagcgcggagctgcgcagcgggaatgagcggggatgccgcgggcagcagctggagctaaaggaagggcaggcccacaggggccaccgcagagccgagtcggggcggcatcgtgctggtgcctctggccccgtggagtggagcaggcagataccgttaagcgctgtgctaccgggccccaggcccagccacccggtacctcccgagaggctgtccctggaccctggctggcatggaaatacagtgggaaaaccagtcgggacctttaataaaagaccttggctttctagtcttctaggaccctttatttgggaacataaagggacaggctccctgagcgggtgctgatgagcccttccctcccctctgagtccagtggtcccctaatctgccccatttccatgcccacgtgggtaccatttttgtagcacctgccattcctgggccatctaaggggtcagccttgagggggtacacgagaggcaaggacccccattttccctgagctccacctttccatcggatcccacgctccttatgttgaccagggggcaccatggacatggagccacatcctttacgttgccgtctcttcctgactcccttgagcaacactcactgcgtccctgatgccctcgtgggatacacttctggggtagggctccccatcattgagtgacagcagaggagggccgaagctttcagccggggccatggggtggcaaggggagaagatgcagttaccagggctggtgcctctattccgacgtatcatcacctgcatggccttgtgcttgatgcccgatggccacattaagtccctgggctgtcactcaagggcagggaccacatcttcatcttggagtcatggtgcctaacagcaaggctgggtggacagtcaatgctgggccacaggttatccaggttggcatccaccaggcccaaatgcccagcttggagagcccctgggggaggcatccatcctccagagccctggagggggcaccacatcttcccagggtgagatcctttcaccacgaggcatctcattcctatacctgaaaactactccagacacttctgttaagggataatccctgatttcctgcagcgaaggcagctctcctaagcctcaggcccagctcctgagaacactgtcctgcaaagcctctgggtccaggcacttggccgcttcttacaccagggcctgagtctggtggtggtggcacctgatgtaggattgagagtgccagcctatgaacgcagctcca

SEQ ID NO: 96955 - DNA, 237635 bp, Homo sapiens
  misc_feature (1)...(237635): n = A,T,C or G
gataaaaccatcagatcttgtgagacttattcactaccaggagaacagtatggggaatccacccccacgattcaaattacctcccaccgggcccctcccacaatatgtgggaattatgggagtacaattcaagatgagatttggatggggttacagagcaaaaccatatcagtgagcttcaagcatagttctgagcctcttggctgtcacgacaagaagagatattctatttaaaaaaaaaaaaaaaggaagctaccaacccatcaaaaggtgctcagttccatagccctaaactccaaaaagtttgtagggaatttgaatcaggacctatgacaacataatagtgtcttgaatagatgcttttagaacatagagagataatctttagatgatcattattacattcatattttacaaaaccctttggcataaaatattataaatctcttctctgttacatcatttccatttgagtaagaaaatcttagtatataactttttaacttaattttattttttgagacagtgtctcgctctgtggcccaggctggagtgcagtggcacgatctcggctcactgcagtctccgcctcccaggttcaagcgattctcctgcctcagcctccctagtagctgggactactggtgccctccgccatgcccggatgatttttctatttatagtagaggcggggtttcaccatgttggccaggatggtctgtaacttctgaccttaggtgatccacccgccttggcctcccgtagtgctgggattacaggcgtgagccactgcgcccggccttcgtatacaactttagatgcagctggaccgtgtgtgtgtgtgtgtgtgtgtgtgtgtgtgcgcgcgtttcccactctgtgcctcccgcatgcccttgaagcagagggctccttcgcttcacttcctctacttcaccacattgaagcagaggcccctctccacttcctcaggggttgtgttcagcacaatggaaagcagctgcgtctgcaacgccttctggctgttatgctccgagaacctaagccttggattaacacggcagagaaaaatgcccactgctcagggactatcccatgttctccaaacttccccatttcctggtaattaggtgggggtcatgtgacttgttttggctaatgggctgtgggtagaagtaaacatgtgaatatatcaatataattgcgtgtatgtgttgatgtaaaatgcaatgtcctgcacatacactctgcaactttattttaaggaaatacttaaccttggagacatttctatattattatacataagtttatctttttattttaaactgttatcatatcacaataagaatatagcataatttcaatgactcccttcttgttggacatttagatgctttccattattttgcaatgataaaaacacttctgtgtgttttctaggaaacctagaaatgaaattgtttggcagaaaggtatctatttttacaaattaaaaaaaaatcattcttttaaacatatttcattgaattcaatttgttggaatttttacccagcatttttacaattatattaatcagtgagaatgttctaagtttttttttttttttttttttttgaggcagatgtcgctctgttgcccaggatggagtgcagtggcatgatcttggctcactgcaacctccgtctctcaggttcaagtgattctcctgcctcagcctcccaagtagctgggattacaggtgcctgcacaaagccccgctaattttttgtatttttagtagagacgggtttcaccatgttagtcaggctagcctcgaactcctgacctcatgatccgcctacctcggcctcccaaagtgctgggattacaggtgtgagccaccgtgcccagccctaattcttttaatgttaaactctttcttgctttcctctctcttcttcactcctcaagaggggggaacactgacataattggatgagattccaggatgttgatggtgccaagtttatgagctacaaacccttgtgtggctctccctttggtactttgctctttctccagggagaaaggaggacaaacaaactggagctgatctcttattatggacagaacctgtcatctctcttcctccctcgtaagcagtgttgctcattcaccctcccaatcttggcaaggagctggtggaaagatctgagtgtagaagggagaaaggctccagcttagtgcccaactcctgtgcccacatagccaggtcaccccgcactagagttagaggcacttaaagtaaggaaattccttatctccttctgccattgtctatcgtgctgctcatcttcaggaactgcagaaagatgatgaccacaccaaggcaagactgagtccattcctgaatatcattcctgtaagatcaaaatctcattctaagagtattgtctttgctaggttttagtatcagtaactattttgaagagtgatttgaaatttccaaatatttgagagtttttgtttatataaaatatttttgttcagtttttcttaatttgctgtggggatatgttagtaccctacaaggcatccagcttttaaaataatgccacattacaaaggaattggttaacaagaagtgtaggggggaagggtaatttttttttttttttttttgagacggagtgtcactctgttgcccaggctggagtgcaatggcacaatctcggctcactgcaacctctgcctcccaggttcaagtgattctcccgcctcagccttccaagtggctgggattacaggcacccgccatcatgcccagctaatttttgtatttttgtagagacaggatttcaccatgttggccaggctgttcttgaactcctgacctcaggtgatctgcccaccttggcctcccaaagtgttagggttacaggcgtgagccacggtgcctggccggggagggtaatttaaaaacagacctgctttatgccatttaaaatgggaatatgtcttgttaaaaacacatttaaatccagggaggtttctctgtgccattagtatcaagcactaaatgaacactgtatgactgagatgacagaaatttcctcttggagaaaattgaagccaacagttgatcaacacagcatataattaacagggcagggtgtggagtcaggctgcctgggttcaaattccggaaccaccattgagtggccttggagaaatagcttaatattctgtctcagtttacttatctagaaaatggacataattatgatgtctccctcaaagagcttttctaagtattaaatgatgtaatatatttaaagaggttagaacatggtctgacattcaatacattctagctatgattaagtgttaattcagtctggtaaaagtgaacgtagtctttgccaagggtagtaaaaaagctctgaccctcatcaaagatgttagattgagagccaggagtctacattcattgtcccaaataatgaatgctgaactcaagaacatcacagcatagagaaacctctgtttgagctctacctccccgtgatggcccctgtccccacctacctctcccaaggctgcccctgatggcgaaaactcccttcaccacaagagctaacaaaggttcagcaggaactgcctcactctctcagtttctccttcctcttcagagggagtgcctctgttttaattccagctcaggttctttctcacacatatatacaaggagttaacattctccgtctcctctggttccagtttttgcagtgggcttaggaaaatgcttttcctcccttcatttcctttatcaccctccctcctccaccaaacattctgatcatggccataagcccaagcagtggcagtgatagacttgtataaagaaaaggaaaacccattgaacctgaaaagtaaacagcacaaaggtcaaataacaacgaaaggcttgtcaaaggcttgtacatggttgccaagagtgtggtactggcaagcaatgctttgagactgtacaggtagagagaagttattagggccgcagcatccatgggagggctttggggagagagagaagagctagagctgaccctgaagggacggtgattcccaaactgtggtaatctgggtggcctgagtaaagtcatctgtgctcagaggcagggaccaggtgggtctctctgggatgggggtttgtgttggaggcaatgagcaaaagtctgaaagtataatttgagcccttaatggtaaagtccagaagtttgacatcaaagatggcagtgatttgatcaatgtcgcttactgaggtttaaggaaagatacaaattatctgtaaaaatgtaaactcaaaacaaatttgtcaaaagttcagtatagtagtgtatcaccactgtgctaaaggttttcttatttcaaataactcaataaaaatgaggcaaaccattctgtaactagctaaactgaagtccataccaactatttaatgcttcaaaataaccttaaacttctactcacttatcattctacaatttaagtaagtaatgtttcacattttcaacagaatgtatgcttatagacacataaacacgaaagatagggacagatcatcttggtgacttgcacgtatgtggcaagtgtcctagggaaaggagcaggcatggggtgaaggtgggaacaagagtgcctggcgtgaccatgtgaggcagggcatttggctatgtgttgctgtgtgctctgtctcacccccgtgacccaagaatattagtgtggcagggtgtggacagcaaggattaatgggtcattggcaaacatgggcgaggctggtgttttactcccttctgaacagtcttcagtactatcaagcttttgcttgttttttggtggtgtggatggcaggtttcatttgcagggccaaatatatataaactaataactgccaggaatgatttgtgatatggaatgaaatctttcagtactttttaaatgatagaggcattaaaagaatgcaggagaaataaattcctgtggatgaagcagactttttttggggggacagaattactcagttctaacattaactatgttttattagttctttgaaaaacctgcaaatgatctggtcagttctataattttaaaatctaaaatcgtttactatcccaataccctaaaaacaatacttactgtggggtcttttattaagactttaaagatacttttcataagcacaattttatttcctggtgactggaaaaataggaaaatatttagagccttttgcttaattgataaggtaacactgaaacaaaggttaaaaacaaagctgaatggagaaaataatgcctatagaaatattcatgtcaaacaggtaagaatattcttggcaactgcagcccctgcctccacaattgcaaaattgcagctccctgtcccttctgtctgtctcagctccgcccacgtccagtggctgagctacaacgaactgccccacctcttttaaagcgtctttctctgaactgtgcaaggaagagagcatcgcctgacagtggtgaggtgaaaattaaaactacacaggggtcaatgctctgctgaaaagtatgaaaagaagttcgtttgtagcgtttcccgcagtctcctcgcctctcctcggcctctggcgccttcctcccctgtctgctcgcaccctatatttctaccccagctcatcagtgtatttgtttgttaattcattcattctttcattcatattctccgctgttgttaattttcccattgacagtaggcgcaaggggcaacgccactcgccctgtccctctagcgtggcctctgtttgggggtctggggtggaggtcgtcccggcccgggtggttccggacgccggctttccgcacctggctcggtgacggcctcggcgccccgccctcttggccacggtccgcagccatcgccccagtgagggcgcggtctgtgggcggggccggctccaggagccgcgctgtgattggccgtgtccaggcaaccgcggagacgccgtcgtcaacagaccgcgctcggaaccagaggcgcgggtcacagagacctagaacakctggaatccttcgcccccggcgcgcagccttcgcccgccggaatcgctgccttatccaccagcgggatgcttacctcgcccgccctctcgggtcaggcgggcccgggaggatgggagggtggctgctgagcgggagccgccacgtcttccacccgacatattgcctagtaagtgtgggagcgatgcctgccgcacgagagccgccgaggtgccgagccttccaacaagcggcctagggaggtcttggaaaaatgccatttctgaggtggactacacgcccactttacagatgcggaaacagtaccaggaaagctcggtgacttgccctggcccacttaatcgtccgctacccagggcaagccgagggtcaaggtaccgacccctcctactctagagctctttccatcacacctcacccgagcccacgcccagccgctctggtggaaaagcggttttcctagtttctgtctatgccataggccagcagttcaaggtgatgaagtccacctgggctttggagggaacatgggaaccagaagaaacacatttcctgaacataaggataaatatgtatagtctaaaagccaaagcaacacttacatggtttcacaatcatatcagtttctttcaccctccttatatggaaataagacttaataagtagatttagtttccatttggtagagcttttcctttcattttcttggaagctctgtttcttctcagcaatgaccttcctcctaaagcactccaattattctcagatattgccttcttgactattttctcaacggtgggacagtccgtttcaatatccttgtctctgtccacattatttgagccaatgatcacagccaagccttgtcccttaagggcagaaaaaatgggaggaggtttaagggtttctggggaagagttgcatcaggatccatcatgaagcttcgtcccagtttcctttcttcctggaaaaatcatcgttcacaaattcacctaaatcacaagatatatatccacctagcccagacttctttttcagaaactaacaggggtataggaagtttggggtgttgataataaagtagctagaagcttattgaatgtctaaactggattaatggactctcaaccctgcactgtccctgaacctccgagcacataggaccttttctctgagggcatgctgacttcacaagactgtcgcccagggcagcccaggagcatctgcttccagtagacggggcccttgtacagttgccagcttaacctttctattttccccaaagctttgcctgcccacattttcagctcagactttcacttccttgtttttccttttacacttcctccttcttctaaggaaatactttcctatccaaactctatgtatggttcttgggatggcctctaaaacttagggcaatgctcaactccggtatgttgttgtttccgacttctgggttacttggttccccaatttataataacctcagctgaggaaactctgaataatagtaaataaataaataaatagcatagttttatcagaaaataatatatccccctttatttttttttgagacagggtctcgctctgtcccccaggctggagtgcagtggtgcaatcttggcttactgcaacctctgccccctgggttcaagcaattctcctgcctcagcctccctagtagctgggattacacgtgtgtgttaccatgcccggctaatttttgtatttttagtagagacgaggtttcaccatgttggccaggctggtctcaagctcctgacctcaggtgatccgcccgccttggcctcccaaagtgccaagagagcactttggcactttaagggggcattacaggagtgagccaccgtgcccggccaatatatcccttttttaaaagagctgtttcctgatattagccttattaacactgtggatatttgccttctttgaacaaaatcaggattctcttagtagctctgagtgatcagttttattcatctcaactctcacaccaagtgcctgctgcgtatgaggccctgtgctgagaatcttcctgtagtttgtctccgtagtcattgaactgtctttaagtctagtgaggacaagcctgaagtgcctaagaccttagtgataaagtatcatagcaaaagttagggttttcccagggaggggctgcggaaggttgtgaaggggtttcggggaggcttaatggcagaggcagcatttgaaatgagacttgcaggctaagagtctgcataggagagccgtctgagaccaacctggaggtgggaaagcaggcgggctagtgggggtggggtggggagaagggggctacgtcccggctcgcagcaggcttccttgctctgatagaacagttcctatcccacttgagtggaacaattccttctgttgggagatggcttttctccctttccccctttccttcctttttttttttccagacaatacaaatattccatttgtatttcagacaatacaaatattccatttgtatttcagacaatacaaatattctcaggctacaaaacgctggaggtaagatctgaatcagactggactgtacaggttctcagatccagtagagccaattacactttttttaaaaattaattttttaaaagtcatatgagtgcaaaagggactggggcgtgcaccttagctatactggagaagttttgattgccttttttggggatcaaaaacatgtccctttagcttaaaaacaacacctgtgactattctgaacccctctttaaggttcccaaatccactttacaaaatcttattagggcagtttatgtaaaagtgctcccttttaaacctagtactcccttcagcaagaatattgtaggaggtgggtgtgtttcagggaagagaaaaattaattggaaatgatgaaatagtaaagaaaaaagtttcttctgagcttccctttcttgtttcttggaacaactgaccaaatttaaaagactttctttcagctccagtctttgtggatagatcctcaaaaacaagttgaggcatattagtctgcccttgttttcatgttctgtgattctaaactttctagctcagtatgattggagacttggggataaaaagtgcttgggatgaaagtgggtctcatgaaacaaaatacaatgactaaagaaccatgacttttagatcatttatttgcacatagctgtttccaacatataaagtgcttatccacgcataacttatacatcagcacagttgttccttgaatagccctgggagttagggtgtgcaggtggtattactatcctagagaggtggaatcaccttaaagtggcagaatgggcttatactgagttttgattctaaacttttccactcctacgtgatgctctccaagtaatattgcaatattctcctcaaattgagcctttgtagaaagaaagccagatcttcaccaataataatttgtatacctttgcaactcaacatatgtggacaatacaaattcacataaaccttgaaatggaaattattatctttttttttttttgagactgagtctcgctaaagacaagttcttgctctgttgcccaggctggagtgcagtggtgcaattagagctcactgcaacctcgaactcctgggctcaagcaatcctcctgctgcagcctctcgagtagctgggactacaggcatgcaccaccatgcctggctaattaaaaaaaaaaaattagtagagatgagtcctccactatgttggtcagggtagtctcgaactcctgggctcaagcgatcttctcaacgtgctgggattacaggcatgagccactgcacccagcctcattatctttaaaagtttgagagtgataagccaagaagcttattgagtctgagctctgagaataaagattagcgttccggatgaggacctagggccctactagaatgcagtcctactggaatgcagattgccttgtcccataagacctggctggaggaggttaattgtaaagatagcagagtggttaagaaatggctttgactcctgcttttctcactggctgtggcagaacctgtgagcaagttctttaaatcctcgaagcttgcgattcctcacatgtaagtggcgtgttaataatsagtaactgatatggtatgaagaagctgtgagctagtgcgtataaaaggaccaacaaatggaagttgttgcattgcttctattacactaaagatcacagaacacagatcctggagctgaatggcctggtttagaatcttaactccaccccttaccagttgtaagattgtggacaagttaattaacccctctctgtcttggtttcctcatttgtaaaatgaaaataagagtagtacctacctcatgaggttataaggattaaatgtaaattgcacataacatgatgttaaataagtgcttgctaatgataatacttctaactcctttttataaaacctccctgacttggtccaactgatttttgtgtttgactgaatttccatgtcatgacagtgaaacttttaggaaatacagttaaagtkttagaaatagggaaagaacctattttcattgttaaaaagttttacaattcagggtatcagtttacatgcattgtgaattctggatacagaagtaagcagaactttctacacttcctccaggtcaccaggccctgcccatttgtggtgagcgggttaagattgcattatagtttggccccawcctttcctcttgcatacactagctatatttaggcaggtctagctaagtttaatatgttgcatatggccttgggtccagttgatcccagaacagatggctacatgggccagaatgcttaagtccaattgtagagcaaagccccagacaataaaacattcagaaagtggatacatgtattccagctgggctgagctgtggtctggttcccaaccgccaccagctcccaattagccactacacctgttcgacaggtaaaaacctgtcagagttttatccttctcatcctcattgggcacaaaatgtcaggtgtgattgttattggaatacagatgtgtagtgaaggttctggggctagtgtttatttttttccaaaatggaagagctttgcagttttctgattataaaagtaaattccagctgggcgcagtggctcacgcctgtaatcccaacactttgggaggccaaggcgggcggatcacgaggtcagcagttcragaccagcctgaccaacatggtgaaaccccatttccactaacaatacaaaaattagctgggcatggtggcacgcgcctgtaatcccagctactcaggaggctgaggcagcagaattgcttgaacctgggaggtggaggttgcagtgagcctagattgtgccactgcactccagcctgggcaacagagcgagactccttctcaaaaacaaatgaacaaaaaacaacaacaacaacaacaaagtaaaccccattttagaaatattcaaataatgcaaaaatttaaacaatatagaaaaggcaaaaaccacacatactaccaccacacagagaaaactactctaaacctgttacggaatatctttctagatgtttttgtatatatatatatatatatatatatatatatatatatatatatagttgaatattgaactttatggatacctcttagcaattcatgtgactgtcctcttttccaccaaatatacatgtataattttaattgataaatagcattccacttcatgggtgtactataatttatgttaagccagtcccctgttgacgttagatgatttccaagtttttaggaagtctgagtttatgattgcccttacaggagtttgctgtgacttagatcttgattcagagatggagaaatcaggcccatcttctaccatctctgagcagcagctgcagaggcaagagggatggattaacaccaaaacagacttggctgagcagagtctcatttcatctgagaaatggcttcaactgcaygggcttaagagcaacaaattgaccttgaaacagattttgtcacagatcggattcccacattgtgaaggtacagtactcacaaacaaccagcatgctgccatttagcctttgaggtggaggtggctgcatcagctctgaaggcccctcaaaaaccacaggtctctgagcttgctttgatcttatatccctatcagtagaaaatgcttgcacgtgtgcccccaatatatgtgtattaagtagacgtacaattgtcaatccatgtattaaataatgcttaatttcatcctttcttttttactttttaaattgacagataaaactgtatgtatttatcatgtacaacatgatgttttgaagaatgtatacattgtgaatggctgtatctagctaattaacaaatgcattgcctcatatagtcattttttgtggtgagaacacttacccactctttctgtgtttttcaagaatgcaatccatcatcattaactatgatcaccatactgtacaatagatctcttgactagatgtcctaattgtagtggtatatcctttgactaayatcttcccgattcccaccgccacaaccaccccagcctctgataagcatcactctactcgctacttctatgagataaactttttaaaattccacatgagtgaggttatgtggtgtttgtcttcctgtgccttggttattttatttaacataatgcccttgaggttcgttcacgtagcaaatgacaggatttctttcctttttatggctgaatagtatttaattgtgtatatatactatgttttctttatccagtcatctattgatggacacttaagttgatttcgttatcttggctrttgtgaatagtgctgcaccaaacaagagagtgcagatatctctttcacttactgattttatttcctttggatatacatatccagtagtgggattgctggatcatatggtagttctatttttagcgttttgaggaacctccatactgctttccataatagctatattaatttacattcccaccaacagtgtgtgtgggtatccttttctccatatccttgccaacacttatctttttgatattagccattgtgacaggagtgaaatggtatctcattgtggttttgatttgcatttccttgaccattagtaatattgagcatttttttcatatacctgttggccatttgtatgatttattttgagaaatgtctattcaggacttttgtccatttaaaaaccaggtttagttttaatatttaagttcctttaatattttggatattaaccccttttcagatgtgtagtttgcaaatattttcccctatttctgtaggttgtctctttactctgttgatttttttccttttctgtagagaaactttttactttgatgtaatctcatttgtttatttttgcttttgttgcctgtgcttttgaggtcatatccaaaaaatcatcacccagatcgatgtcatagatcttttccctttttcttccagtagtttcatattttcagatcctacaattaagtctgtaattcattttgagttgatttttgtatatggtggcaataagggcctaattttgttattctgcctgtggctatacagttttctcaataccttttattgaagagaytgtcctttccccattgtgtgttcttggcacccttgtcaaaaatcaattggctgtacatacatatgtggatttattttttggctctctattctattccattgatctatgtgtctgtttttatgccagtatcatgctgttttgattactatagttttgtagtatattttgaagccaggtaatgtgatgcctccaggtttgttctttttgctcaaggttgctttgggtattctggctttctttgtggttctatacaaatttaaggattgttttttctatgtctgtgaagaatgtcattggtattttgttaggggttacactaaatctgtagagcactttgggtagtgtggatatttttaacagtattcatctttccaatctatgaacatggaatatctttaaatttgtgtcttttcaatttcatccatgtttatagttttccttgtagatatattccacctccttagttaaatttattcctaagtactttatttatttgtttttggtagctattgtaaatggaatggtttccttttacacttttttggatagtttgctgttagcatgtatatcactgctgatttttgttgttaattttgtagtctgcaactttactgaatttgttaattaattctaacaggtttttagtggagtctttaggattttctctgtataagattgtgtcatctgcaaatagggacaatttagcttctttctttccaatttagatgctgttaatttctttctgttgcctgattgccttggctagaacttctagtactgttgtgaataaaagtggtgaaagtgggcatcgttttcttcttccagatgttaaaggaaaatctttcaactttcctgccattcagtatgttagctgtgggtttgtcatatatggcctttactgtgttgaggcacatttcttctatacataatttgttgagagtttttattatgaagagatattgagttttgtcaaatgcttattctgcatctattgaagtgattatgtagttttttgtccttcattctgttaatatgatgtatcccatttactgatttgcatatgttgaaccatccttgcatttctaggatgaatcccacttgataatggtgaatgatctttttaatgtgttattgaatttggtttgctaatattctgctgagcattttgcatctatgttcatcaggggtattggcctgtaagttttcctcttttgttgtgaccttgcatggttttggcgtcagggtaatgttgcctcagagaatggatttggaaatattctctcctcttcaagtttttgggaagagtttgagaagaattggtattagttcttctttaaatgtttggtagaattcagcaatgaagccattcagtcgtgggcttttctttgctgggagattttttttttttttaaagatggagtcttgctttgttgcccaggctggagtgcagtggcacgattttggctcactgcaacctctgcctcctgggttcaagtgattctcttgcttcagcctcccaagtagctgggattacaggcatgtgccaccatgcccagcaaatttttgtatttttagtagagacgggatttcaccatgttggtcaggctggtctcgaattcctgacctcagctgatccacctgcctcggcctcccaaagtgctgggattacaggtgtgagccaccatgcccagccaggagattttttattactgattccatctccttactcattggtttgttcagattttagatttcttcataattcaatcttggtagaatgtatgtgtccaggaatttattcatttcttttaggttatctaatttgttcatgtgtaattgttcacagtagtctcttatgatcctttgtatttctgtggcatcagttgtaatttttccttttttacctctgattttatttgagtcttctctctttttttcttagtttagctctaggtttgtctattttgtttatcttttcaagagactatctctttgttttattgatatttttatgtatttgtattctctatttctgctctgatcgctaaggtaaggtaaaacattgggttgtttatttgagatatatttgagatatatattttttgaagtaggtgtttattgctataaactttcctcttagactgcttttgctgtacccataggttttgttatgttgtatttccattttcatttgtctcaaggaatattttaatttaatttaattaataaatttttttacttcagtagattttggggttcaagtggcttttggttatatggatgaattgtatagtggtgaagtctgagatttcagtgcacctgtaacccaagcagtgcacattggacccaatatttagttttttattcctcaccgcatcctccccacttctgagtctccaaattccattgtaccaccctctttgtatacctttgtatacccatagcttagatctcacttataagtaaaacattttggtatttagttttccattcctgagttgcttcacttaaaataatggcctgcagctccatccaagttgctgcaaaatacattatttcattctttttttatgcctgagtaatattccacattttcttctaccacattatccactcattggttgatgggcacttagattggctctatatctttgcagttgtgaattatgctgtgagaaacatacatgtgcaggtgtccttttaagacaatgacttcttttccttttggtagatactcagtagatcagtagtgggattgctggataaaatagtagatctacatgtagttctttaagaaatctccatactgttttccatagaggttgtactaatttgcattcccatatataagcattctttttttctttttttaaccacatccatggcaacatctattgttttttgactttctattaatggccattctggctggggtaaggtggtgtatcatcctgattttaatttgcatttctccagtgattaatgatgttgagcattttttcatatgtttgttggccatttgtatatcttcttttgggaatgtctattcatgtcatttgcccatgaaatattttaatttaccttttaatttatttatagacccattrgttattcaggtgcatgttgtttaatttcaatgtattcgttaattttccaaagttcctcctagtgctgatttccagttttataccattgtggtctgaaaagatacttgatacgatttcagtcttctcaaatttggtaagacttgttttgtgacctaacatatcagctatcctagataatattatgtgtgcagttgagaagagtgtgtattctgcatctgttgggtagaatgttctgtgtatgtttatttggtctagagttcagtttaaatctaacattttctggttgattttctctctggatgatctgtccatgtgaaagggcaatactgaagtcctctgctattattgtactattattgcattttagtctatctcttccttcagatctattaatattttcttaattattaattagattggatgcatatgtttgaaatttttataccctcttgatgaattgacccctttttgattatataataaccttctttgtctctttttacagtgtttgacttaaaatatattttatctgacataaacatagctacccctgttctcctttggtttctatttgtaaggaatatctggttctatcctgtcattttcagtctgtgtgtccttacaggtgaagttaatctcttgtaggcagcatataggtggatcttgttttttatacagccactctgtgtattttgattgaaaatttagtccttgaacataagttcaaggtaattattgataagtaagaacttactgctgccattttgttaattgttttctagttgtttagtggatcctttttttgtttcttactctttctttgtgattaagtgatttttctctagtagtatgttttaattacttgctttttatttttagtgtatctattataggtttttgctttgtgattaccgcaaggcttacaaaaaccatcttatagttataagaagttattttaagctgataacaagttaattttgatcacaaaaaccttctaaactttaactctatcccccaattttgaatttttgatatgatttatatctttttccattgcacatcccttagcaaattattctagttattattattaatagttttgtcctttaacctttatactaatgatataagtaatttaaaaaccaccattgcagtattagagtattctgaatttgtgtacttagtgagttttatacttttagatgtttttgtgttactcattagtgtccttttctttcagcttgaagaattccctttagcatttcttataaggcaggtctggtagtgatgaactccctcggcttttgtttatctgtgaaagtctttatctctccttcatttgggaaggacagctttggtgagtacagaattcttgattggcagggctttttgttttcctccttgagctctttgaatatrtgattctattctcttctgtcctgtgaaatttctgctgagaagctggacatattggaacttccttatatgttactagcttcttttctcttcctgctttcagttttctctctttgtctttgatatttgacagtttgattataaaatcttttggggtagtcttatttagattgggttggaggattagagacttttgacctttctgtaaccagatacttatatctttctccaggtttggaaagtttcctgctattatttctttactctttctacccctttatcattctctactcccttttgaacatttgctcttttgatgctttcccataagtcccatagctttcttcattccctttttcttttttattttttctgctctgtatattttcaaaataacttctcttcaaattccagattctttcttctgcttgttcaattcagctgttgatactccctattgcatttttctttgtgttcagttatttttcagctccctggttactgttttgttattatcatgccaatctctctkacattttttattctggtaacttatggttttccttattttgttgaattgtttctctgtattttcttgaagttcactgagcttccttaaaacagctactttgaaaatgttgtcaggccgttcatacatttccatatttgtagggtcagtcactagcacgttactatgttcatttggtgatgtcatgtttcctggatcgttcttgatccttgtggttgtacatcaatgtctgcattaaagaagcaggtgcttattccagtctttgccatctggctttgtctgggaatatccttcattagtaaccctgtccacagattctgggcaagtcttctggtgtggtccctaagcatgtgaccactacagacattgcagcactagggggtgtcctaagcccaggaccaccatgatgactggcacagtgctgggttagaatcttatggccaccaaggctggcacagcactgggctggattcttatggctgctgtggctgatacagtgttggggcacacccaaagtccatggccactgaggctagtgccacacagaggcacaactaaagcccatggcggctgaggcctgcctgtcactgtgggttatttttagcccatggtcactgtagtcagccagtggtgataagggctagagcttgcattcatctcacagcagctatgggttcctgtttggcaccaggatagatctagargcttagtccacgagtaccggcctgcagtcaagggccatgtggatctgcctgctgctggattttcctgtgtcaggccctgtattagggtccaaggtaaagtcctattctttcttccctgtcttttgcccagatagtggtatttttctgcattgtgctgcctggggttcagggaggggtgatgcaggtaaggtaaaactatcctttataccctcatattatgctgtaaccaggtaccgtgatctgtcacctggttttcttagctcttgtgaaggtatttttgtgtgtagacagttgttcaaattgatgtttctgtaggggacaatcactggaaagtcctgttttgccatcttgctctgccttcatctctgttctttcttttttaaaagacaaaataaaaaataaatagaagttatttgtatttactgatagcccagccaatgtcttgttcatctcctgggatgtgcaagtcctttttggaggccactgattaaaacaatagctgtgtgaagtttcagggaaaatgtactgttttcctactgcggcctgctttgtgttatggtctgctttttcctaaatgcattggccagaatgttggttcttaactcccagtagtgctgcccaccacagaaagcatgaaaatgtgtgagggtatatacaacgtatatatacttttgcatgatgtattgttgggatgccattgaaatataaggcctgggaatccagagtactgagtgtcttacaatgtatgagacagcccattcagcaggaactgccctgtccaacatgttagtaacattgcccctgaggagtactccttcaatcagggaaatttccactactaggactttactcagtaattctgaattagtcaattaattaattaaacaaatatttattgagcaaccattaataccattttttaaccagattatttaccaattccttgccagctttgttctattctggtactaaggaagatctaggggatgtggttgttgtagattgatttggaggcccattcaaatggcaaggccttgttcttcagggctcagcctgtgctttttacatatacatcctttcacatggactacagccctgtgccatctaaatatcttttgagtagggtctcccagagtcagggcctgtggaattcccatataaggaaaaatactagaagcagttttatcccatctttcttttttttttttgcatgtttatatttttttattttttatttttttattttttattttttgtatttattgatcattcttgggtgtttctcagagagggggatgtggcagggtcataggatgatagtggagagaaggtcagcagataaacacgtgaacaaaggtctctggttttcctaggcagaggtccctgcggccttccgcagtgtttgtgtcccttggtacttaagattatggagtggtgatcactcttaatgagcatgctgccttcaagcatctgtttaacaaagcacatcttgcactgcccttaatccatttaaccctgagttgacacagcacatgtttcagagagcacggggttgggggtaaggttatagattaacagcatcccaaggcagaagaatttttcttaatacagaacaaaatggagtctcttatgtctacttctttctacacagacacagtaacaatctgatctctctttcttttccccacatttcccccttttcttttcgacaaaaccgccatcgtcatcatggcctgttctcaatggtcgctgtcttttcggagctgttgggtacacctgcagaaaggctgtcacttcacacttggaagattgcacagtggccaggcagaggtgcttcttacttcccagaccaggcggccgggcagagacgctactcacttcccagacggggtggcggccaggcagaggcgctcctcacttcccagatggggcggccggcccttatttcaaataaacctaattcagtcaaggaagttagcgaaaataccaatttcttacattttgttaagaattttttcatctaagttcgtaagagatattgctccgtaactttcttttcttgtaacgtcattgtcaggtttcagcatcaagattatgctggactcaaaatgatttggaagtgttcctcctcctctatgctttgatggcatttgtacacgattggtatttcttctttaaatgtttgatacaactgacaagtgaaatttatctgggcctagttttgtttgtgggaaaagattaataaaaaattcaatttatttaataaacagagggctaatcagatattctgtttcataatgccaatttggaaaattgtgtttttcaaggaatttcctcaacattctctaatatgcacacaccaacagtattttcctcaacagtattttctaatatgttggcaaagcattgatcataatatgcccttaacagccttttaatgcatgtaggatctgtagtgatgtcacctctttcattcttttttaatgcctgtaggatctgtagtgatgttacctttttcattcctgatattgataatttgtgtttcctctgatttttttcttgctaagtcttgttagcagtatataataactcttttcaaagaaacacatttttagtttgctggtttttaaaattctttgtcttctatttcactggtatctgacttaatcatcattatttatttctttctgcttactttgagcttgatttgcattcctttttcctgcttttaaagatataaatttaaataattatttttaaacctttcttcttttctaatataatcatttaaaattgtaagtattcctctaagcattgttttagctgaatgccacaaatctcaatcagtagtgtttaatattattgctttaaagtttttcccttgtgattttttttcttgaatacactttaaaaaatgtgttgtttaatttccagttattttaggacttttaaaagtacttgtttttgttggattactaatttaattacattgaggtcagagaatatagtctgtaagattttgatcttttgaaatttactaagatttatttatggccagagtctatcttggcaaacattgcatgcacacttgaaaagagtgtgcattccacagttgttaggtagtatttataaatgttaattagataaagatggttgaaagtcttgggagaaaaattatatatatttagtgctttttttgtctactggatttgttcatttctcccttagttctgtaagttttgtttatgtattttgaagttccaaatgcatacacatttaggattgttatgtttttctaaggacttgacaaattttaataattctgatatgtcatatttatttcagacattagtcattgttttgatgtttactttgatattaatatagccactgtagctttcttattaagttttacatggtgtatgtgtttataatctttaatgataaatatctatagtctatatattaaagagggcttctcatggacagcatatagttggagttggtgtttttaatgcagttgcatatgtcttaattaattaattcaaccaattaattaaatcagttagtgtctttatccatttgtgttgctgtaaaggtatgactgaggctgggtaatttataaagaaaagatgtttatttggctgatggttcttcaggctatacaagaagcatggtaccagcatctgcatctggtgagggcctcaggaagcttccactcatgatagaaggcaaaggagagttggtgtgtgcagatcacatgtcaagagagaaggcaaaagacagagcggaagagggaccaggctcttttcaacaaccagtcctcatgagaactaagattgagaactccctcattcccacgagaatgtcaccaagccattcatgagggatctgtcgccgtgatccaaacacttcccattaggcttcacctccaacattggggatcaaatttcaacactaggtttagaggtcaaatatccaaactatagcaactagtgtttgattctatacatttaatgtaataattgatatatttaaatgtaggtctaccatgttactatttgctttctatttgtccaatctttttctttcatctgtgtttctccttttggccttcttttgtgctaaatgaatattttttagtgtttcatttgatgaaatctttatttttcatttaattggctttccttgttacatccttaacttgttacagtccactaaaagtagatttcatatgacttcatataaaatgaaacaagttttcaacactcatacctccccttactcctcactcctgtccttggtgttactgttttaatgtattttatttttacatacattataaatctcacaattcagagtcataatttttgcttttaaaagtcatctgttttttaaagaaatggagaagaaaactatacactgctaagatccacatgtttaccacttaaaatattcttccttcttgtaggatttgaggtttcaactgatgttatttcctgaataatttcttttaggcatttcttacagtgcaggtctgctggtgacagcttttttcagttttcgtttatctgaaattatctttatttcacctgcacatttatttatttactcattcattcattcatttatccatttgtacatccatacttatatattctgaggtaattgtaaagtgtaaagatcccatgtacctttcacccagttttcccaatggtcatatcttgtaaaataatagtataatatcaaaatgaggaatttgacatgtatgcaatgtgtttgcaagtctatataattttatcacttgtgtagatttctgtaaccaccactacaatcaagagagagaactgtttatcaccacaaagatcttcctatgttaccccctcctatgtttttttctaaatgtttcataattttacatttagcctgtgatctattttgaattagtttctgtataaggttcacgtttttttgtaatcccagcactttgggaggctgaggtgggaggattgcttaagcccagggtatcaaggttgcagtgagctatgatcacactacttcactccagcctaggtgatagagtgagactctatctcttaaaaaacacacacacacacaaaagcaaatggttcatttttttttttactatgggtgttcagttgctccagtgcattttacttaagtgactacccttcctactttgaattgcttttggatttttgttaaaagttggttgtgcctatatttccaggttctctattttgtttttatttatttatttatttatttgatttattttttttgagacagagtctcgctctgttgcccaggctggagtgcagtggtgcaatttcagctcactgcaagatccgcctcccaggttcacgccattctcctgcctcagcctcccaagtagctgggaatacaggcgaccaccaccatgcccggctaattttttgcatttttagtagagactgtgtttcatcgtgttagccagtatggtctcgatctcctgacctcatgatccgcccacctcggcctcccaaagtgctgggattacaggtgtgagccactgcgcctggccctaggttctctatttgttctattcatctgtgtttctctgtcaatatcacacagtcttgattactgtaactatagaatttcttgaaattgggccgggtgagtcctcctactttatttttttttcaaaattgttttagctactctagttcatttgcctttccaaataaattttagaataactgtgttcatgtctacaaaaatattgctataatattgataggagttgcattaaacctgtatattaattaaaggagaattgacatctttactatgctgacgaaaatgctgagtgtttcagttcacgaatatgaaatatctttccatttatttacatattatttgatttctttcatcagctgtcttaaaattttcagtatacgaagcctgcacatgttttgttagatttatacctaagtattttattttttttagcagttgtagatggaattgtattttaaattttggttttcacatgttcattcctagtatatagaaatatgactgacttttgcatgttaaccttctatcttgtgatcttgccaaactcacttattctggaagatttctaggtagactatcatgccatctgcaaagaggaaaagtcttatttctttctttctcatctatgtgtcttgtctttccttttcttgctctgttacgctggctagaacttccagcactatgttgaatagcaacggtaagagtggatgtccttgcactgaaagctttcagtcattcaccactaagtatgatgttaactgtaggtttgcaatagatttttaaaaattatattgtggaaggtccctgatattcctagtaatctgagaatttttattattaatgggtgctgaattttgtcaatttttttctccatcaattgatagcatcctgtgatatttctttgttagcctgttactttaatggattatattattttttttaatccagccttgcatccctggagtaaactagagcatgttttagaagtctttttatattatacattgcagaattcaatttgctaatgttgtgttacggatttttgcatctgtattcttgaagaatattggtctgcagttttctcttttttaaataatggttttgtctggttttggtatgacaaggctagcttcataaaatgagttgggacgtattccttcctcttccattctctagaagatgttttgtagaattattattttttgtttcttgttgagataacaagaaacaatgtagaattaatattaattattctttaaacatttggtaaaattctccagtgaactcatccaggcctggagattcctttttgaagaagttttaagtcaagaatttaactttcttaaacagatataggactagtcaaattattttatattgtgtgagttgtggtagtttgttttctgaggatttaattcatttcatccaagttgtctaatttgtgaggagtttgtagtattctattattcttttgatgtctgccgcatcttttgtggtatttcccattttattcttgatatctgtaatttataccttctctctttttatctttgtcagtcttactagtggtttgtcagtttattgatctttaaaaaataccagcttttttgtttggttttctctattgtttttctgttttcaatttcattgatttctactttgatctttattatttatttccttctgcttgtttgggtttattttgcttttcttttttctaatttcttcagttgaaagctttgattattgatttgagattttatgttttcttatgtaagcatttagtgctacaaatttccctccagtcagtgctttagcaatgtctcacaaatttttatatgttgtattattatttccacttaattaaaagtcttttattttcatcaagacttcctctttgacttatggacttttagatgcgtattgtttagtttctaaatatttgtagattttcctgttatctttttatttatttttgatttctagtttgttcccatcttggacagagcacgtacttgtttggtttcagttcttgtaaaatgtttaggatgttttataaccaaatatgtgctttgttttgtacatgttccatgaatacttgaaaagagtgtgtattctgctgttgttttatagagctttctataaatgtcagttagatcctgttcattgatggtgttgagtatccttcctgattttcttgttcttgttctatcagttattgagaaagcagtattgaagtttccaagtataattgtggatttgtctatttcttctttcagttattctgttttttgttgcaaatattttgcagttctattgggtgatacatacacatttaggattgctatgtctttctggtggattgacacctttgtcattatataatgtcctgctctgtccccagtaatattctttgctatgaagtttatttttctaatatagccaatcctatttcctttttttaaatatttgcatggcctatctttttccatccttttacttttaacttatatatataattatatttgaagcaaatttcctgtagacagtatattgttgagtctttttaaaaaaatcctctttgccaatctctatcttttacttggtatattagaccatttacaattaacttgattattgatatgttagagcttgttgaccattttatttttcgttttctttttctctgtttttggcttgtctgtttttttcctacctgcttttgggttacctaaacactttttagaattcttatttatctataatgtttcttttcttttctttttttttttttttgagacagagttttgctcttgttgcctaggctgtaatgcaatggcacaatcttggctcaccacaacctctgcctcccgggttcaagcaattctcctgcctcagccttccgagtagctgggattataggcatacaccaccatgcccagctaattttgtatttttagtaaagacagggtttctccatgttggtcaggctggtcttgaactcctgacctcgggtgatctgacaaccttggcctcccaaagtgctgggattacaggcgtgagccaccgcgcctggctataatgttttctattgtatatcttcatatggcttttttagtgattgtgctaggtgttacattatgaatacatacattatcaaaatctactgatgtcaacattttaccagtttgagtgatgagcagaaaccttcttttccmtttatagccctttgcccttcccatttataataaaatgtattattttatcttcttacattgagaattacattagactatgctagaattttggttcaaccatcaaacattatttgtaatactcaaaaggagaaggactgtctattttatttgcctatagttttgcttactgtgttcgtctttcctgatggtccaaggttccttcttttgttattttctttctgcttagagaagttcttttattctttaagagtagctctgctagccacaaattcctttagtttctttgtctgagaatgtctttatttctactttattcctgaagaagaatttcaccagatgtaagatttagggttgatagttctttttttttttttttagcacttaaaaaatattgtgcccattctttctggcctccatggtttctgatgagaaaaccactatcattagaatttatttttccctattgatatatgctttaaagatttttttatttgtcttttgttttcagatgtttgagtatgatgtgccttggtgtgaatttatttgcatttattatcttcgaatttcactcagattcttgaatctgttgctttatgttttttgtttttgccaaatttggagaattttcaacccttatgtctttgaattctttttttttttcttctttttcttccccctaccctctttctcttctccttctggcactccaataatatgaacattggatctttaaaaaaaataatcctacatatctgtaaggctctgttcagctttctcaggctattttttccctcttgtctagattgggtaatttttattgttctccaagcttactcattcttcttttttcattttgctattgagttcatccattgagtttttaattttgattattctattttttgctctaatatttccattttattcttctttatatcttctatttctttactgagacttcctatgtttttattcattttgagaatgtttgtaattgccattaagtatgtttatggttgttgctttaaaatccttgttaggtcattctatgacatctctcatcttggtgttgatattgtcagttgtctttttttataatcttcctggttttttgaatgatgaatgattttttattgaaactgggacatttcccaaattttgtttatatttttggatttaggtgtacaagtgcagttgtgttacatagatatattgtgcagtggtgaagtatgggcttttagtgtatccatcatctgaagagtgcacattgtacccaataagcaatatttcatccttcacccttgatacagtctggctgtgtctctacccaaatctcatcttgaattgtaactccaacaattcccacgtttgtgggagggacccagtgggaggtaactgaatcatgaaggcaggtctttctcttgctgttttcacaatagtgaataagtctcacaagatctgatggttttaagaagaggagttcctttgcacaaactctctctttgcctgctgctgtccatgtaagatgtgacttgctcctccttgccttccaccatgattgtgagggctccccagccacatgggactgtaagtccattaaacctctttcctttgtaaatttcccggtttcaggtatgtctttatcagcagtgtgaaaatgggctaatacaacccctgctccccccaccttttggattctccagtgtctatttttctctgcatgtctgtgtgttcacatgccacttaaaagtgagaagatgtagtttttcactttgtttctgagttatttcattaagaataatggcctccagttccatatatgttgctgtaaaagacatgatttcatcttttgaaatggatgagtagtattccatagtctatacacaccatgtggtctatatatataaaccacattttaaaaatactacagcaaacatataagggcaggtgtctttttgataaaatgatttcttttccattgggtagattaccaatagtgggatcaaagggtagtcctattttaattcttaaagaaatctccatcctgttttccatagaggttgtactaatttacattcccagcaacagtgtataagcattcccttttctccacaatctcaccaaaatctgtaaatttttgactttttaatagtacccattgtgactggtgtgaaatggtatctcattgtagttttgatttgcatttctctgatgattagtgatgttgagcattttctcttgtttcttatccacttatgtgtcttcttttgagaagtgtctattcatgtcttttgcccatttttaaatggggttattttttgcttgctgaatagtttaacttccttatagattctggatattcaatctttattggatgcacagtttgcaaatattttcaataaatatttgcaaatattttcttttactttataagttgtctgcttactctgttgatagtttcttttgctgagcagaagctctttaatttaattaggttctacttatcaatttttgtttttgttgcaattgctgttgaggacttagttataaattatttgccaaggcctgtgcccagaataatatttcttaggttttcttctaggattccctaggatcttatgtttaaatttttaatccatcttcaattaatttttttatatagtgaaaggtaggggtccagtttcattcttctgcatgtagctagccagctatttcagagtcatttattgaatagggagtcctttcctcattgcttatttttgtcaactttttgaagatcatatgactgtagttgtgtggctttatttttggttctgtattctgttccattgttctatatgtctgtttggggtgtgtgtgtgtgtgtgtgtgggtgtgtgtgtgtgtgtgtgtgttttaccagtaccatgctgtgttggttactgtatccttgtagaatagtttgaagtcattaccttcattcttgaagaacacttttgctggttttagaattactggttgaagttttttttttctgacctttaaatatgtcaagccattgttttctgatttccaccttttcatcagagaaatcagacataatccgtaacattttccttccatatgatgtatataatgtatctttttttctataactgcttttaagatttttcctctttattcttgttttcagctattgatatgccttcttttggttttctttgtacatacattgcactggatttatcgagcttcttggatctgtagggttttttttaatcaaatcttggaaattttcaactattatttcttctaatctatttttacgccctatctgttctctctttttcttctgagactcaaatcatagtttgctaagcatcttgatattgtcccacaggtcactgaaactctgttcattttgtcaatattttttttctctttgtttatcagattgagtaatttctcttgacagattttctaggttactaacactttattctggtacctccaatctgctgtgaagcccatacagatattgtactttttgttctaaaatttcytttcttttcaatttctctgctaagttccccatttgttcacttattatgatcacagttttctttccctccaacattatatatatatataatgtttatggtatttatagtatacttataatatattgaggcctttttcttctaatttcaacatctggtccatttcagggtaggttttattgattgcattttcttttgactattggtcacatttttctctttgtttatgtatctgataattttttgttctatgctggacaatgtgaatggttgtagagactttgggttgtatagttttcctttggtatatgcaaacgattgtttccaggaccccctgtgtataccaaatccatgcatactcagttcctgcagttgtctcttcagaacccacatatatgaaaagttggccctctgtatgagtgggtttcacattccactgatactgtatttttatccacatttggttgaaaaaaatctgcatataagtagacccatgcagttcgaaatcatgttattcaaggttcaactgtataatccttcttctaggagaagtgatttttattcttataaaaattgatactatatattatttataacagctttattgagctataatgtacctacctacaattcaatggttttactatattcacagatatgtgcaactatttagaatgtttttatcacctcaaaaagaaactctgtacttcttagctctacactttcctacccctaaactttctctatagatttgcttgttttgagcatttcattgaaatagaatttataatatggggtcttttgtgactggcctcttttacttagcttaatgtttttaaggttcatccatgttgtaaccagcaccaatactttattcctttttgcgaccatatgtattccattgtatggctgtactacgattttcttatccatttaccagttgatagatggagagctgattttcattctagtaggcagttaagttggctggactcaaactccaaactctctctttcctgctaaatacatacaaataacaaatgccctcctttttaggatggatgccattccagtttctgcatgttctagattgctgtctaatgcctacaaatagctctttttatatttcgtccagaatttatcatattttttctgtgtgaaggttagctactacaatctactccactgttactggatgcagaactcacaatgccttacatttcaattcccaatacagcttatgaagccttccatagtcttatttccttcaagcctcaaaaaacagcttcctctcccaactccagataaatgtcttaggtaaacagagaatgctgctagtgatatttagtcacttcatcaatgtcagctaagaaggtgaaatmttggaaacacaaattttagagctggagtggtctattgagtgagattattgctgatggaattcaagtatccattctttactctttactattgtgaaagttgcacttcaagacttgaaatcaccccttgtgattggggagcaagcctggccagggtgtctataaaattcagccttgctctttttagctctccagaggaggctgttatcctgccttcctagtaaggcagagggaaggaagtaccagcaccacaagtaccaccattctgtctcccacctttgggacttaaaaataataattaaaattacaataaaataatcatccgataaaaaacatctctgtgaagccttacctcatcttctgtcctgccaaatcctagctagtctttgaatcctctccataggcttctgagagttccatgaaggagcaggactatgttgtaggcaacaagaaggagtaggactatgttgtaggtaacaattgtattcctatcctgtaagcatgcctagtacatagtaggcacccaataagggtttatgcaacagatatttgaatagctgagcatataatctgataaggagaaaatcttgtagttctgacattctgtatggcaattctgaatctgtgaccggctggctttatttcagtgatttaattatgacccttcagttgagagtacagttgaaatatctaagtgaaattttaaaaaccctgaaaaccaagtccaagtcacgaataacttcctatgttgctttttttttttttttttaacctctgttgtaattactctggaccaaagtacaaggaaactaggacacaaattctattcttcctgtttattcatgcattaaaagattacaatgccgttctcactcataggtgggaattgaacaatgagaacacttggacacaggatggggaacatcacacaccagggcctgtcgtggggtgggggaaggcgggagggatagcattaggagaaatacctaatgtaaatgatgagttgatggttgcagcaaaccaacatgtcacatgtatacatatgtaacaaacctgcacattgtgcacatgtacctgagaacttaaagtataataaagaaaaatattacaatgccatagacagttacatttatcacagcacctagaaatacttcatgatttagaacagaatagaaagcatcacaaattattgatggcacaagatataatttgaatggtgtcagagaaaaacatttcaaaataaaaataggaaggttcactcatgtactactgttttgattgtttttctttataaaaatgcagattatgtggcgtctctggggagacctgtggcttctcggtatgctgatggtctgtttccacagctctacagagcagaagatggcagagtatacaatgtaagtcagagttccctcaatgcgcagtcctgtgacatggtgctgacatcacatcggagagtgcagtgtggggagagacttgtgctgcttggcagggatgcagctgagccaagcccttattaggctgggggttttcttttggcattgatagggtgatgaaaatcatggccaaggaaggaagtttttgatccattagaaattagtgcagaaaactcttgatgagagatgaaaacctttgcacattaccacttcgttttgctttgaaaataaaggaaaaaaaaatatgacagagatgatctgaaagccaagagcaaactgccattatctgagagaagcattaggaataggggcagcatttgcagataggagaatgagcaccacctctgaccagaggcctttactcccagcaattcagcacctgagtctcacgtctcctacatgccaggccctgtgcagacccaggccaaccacatggagctcaaagtctgttggagacacatgtcccatcacgtccatttatggatatttgttcatgtctatgtacatccatgtaccacctggactactgtttcctaatatttagaaaatttaagttacttttattggtaaattttttttttttgagaaaatttttgtagaccctatcctcgaatatgtcttccagttgtttactctccttctctttcaagaatgccaatgagtcatgggtttggtctctttacgtaatcctatgtgtctcagaggttttgttcatttttttaaattctctttttcttttgagacactttcttgttctatcacccagtctggagtgcagtggtgtgttcatggctcactgcagccttgacctcccgggtccgagcgatcctcccacctcagccctccaagtagctgggaccacaggcgtgtgccatcacacccagctaatttttgtatttttttgcagacggggtctcgccatgttgcccaggttggtcttgaactcctaagctcaagcaatccgcctgcctgggcctcccatctgccttggcctcaacctcatgcctcagattacatgtgtaaggcatcatgcctgcccctttttctttatttttgtctgcctacattgattcaaaggagtgattcttcaactttgaagttctttcctcagcttggtctagtttgttgttaatgattctgatggtattatgatatttctgtagtgaattgttcaattccaaaagttcagtttggttctttcttaatatggctatatcatccaattcttggattattttaccattttccttggattgggtttccaccttctcctgtatctttatgagctttcttgacatccagatcctcaattcaatgtcatttcagccatttcagtctggttaagaaccactgctgaggagctagtgtgattgcttggaggtaagaggacactctggactgaagagtttacggaattcttgcactggttctttctcacctgtgaaggctgatgtttcttcatccttttaagttgccatcctttggatgggcctttttgtttttatgttctttatttcccttgagggtttgactgtggtgtgagttgggtatagctgattggcttagtttccggatgctttcagagggccaacgctcagctcagcattcctgggctgcatgctgtaaccctggggcctagaactgggctgtggctttgtcctctggccccttgaggtcgaacactggctgcgctggggcagccaatgtgctaccaggctgctggcaaaagccttccattaggggctgctggcaatgctctggtggggcagcaggggggccatgggtgaaaataccctggtggggtgttggggctgcccaggaaacagcagagagcctggagggatactgtaagagggacagccaggccattcagcccttggagaaacctccatgatgggggtggtaggttgccttcagcttgaagatgcacccactacttactttttccaaagcttaaattacctttttttttttttttttttttgatggagtttcactctgtcacccaggctggagtgcagtggtgccatctcagctcactccgcctcctgcgttcaagcgattctccagcctcggcctcccaagtagctacaggtgtgcgccaccgtatccagctactttttgtatttttagtagagatggggtttcaccatgttggccaggctggtctcgaactcctgacctcgggtgattcactcaccttggcctctcagagtcctgggattacaggcatgagccatcatgccaggtccagcttaaattcctttttaaactaagcctggtcctaagcaatactatctgtggaatcttcagtttgatgtgctaagtatattttttatctgaaccacattaaaatcaatgcaaaacttttaaaaacacctgtccctttacctttaaaatccacctccacattccctgtgatgtgcccaccctggcttctgtgttgtagcagtagctgtggatgctggtgaaggagctggtaattctgtcttaaggggccatgagaagcctccaagaagtgatgctggagcttgaggaatgaggttgacagacacatgggacagggaaggaaggagcctgagccaagccacaaaaatgtggaatgaggtgatgtggtctgaaagcacattttccaagataaagtaccgtatcttcttttaaaatgtgctctaagaatccctaagcctagctgggaaggtgaccgcatccaccttcaaacacggggcttgcaacttagctcacaccgggccaatcagatagtaaagagagctcactaaaaagctaattaggcaaaaacaggaggtaaagaaatagccaatcatctattgcctgagaacacagcgggagggacagtgatcgggatataaacccaggcatttgagccagcaacggctaccctctttgggtcccctccctttgtatgggagctctgttttcactctattaaatcttgcaactgctaaaataaaataaaataaaataaaataaaawgtgctttgtcacagaatagggcacaattttttcttgttccttgtctatgtcttctattgcctctctacctcttgaaaggccttgcacagtgtgtctgatctatgtgaaggatggtttatttgtacatacaagaaacttcctgcaagtctctgtcaccatttgggggcagctcaagggctgctggtagcagcagtgagtgatcaggtggtccaggtgcaggagagcttcacccgagagaggagggcatgaggacaaaagtcatgagcagaaggatgtgtagctgggatggcatcctttagaggaagccaggaaggtgtgctggcatgttcagtagcattttcagaaatatttttggaatgttatgtttaggaaaacgttttagtgagacattattttccatctgcctttgttggtcttttctcctacctaatttcttaagagtaccctgggctttttctgataaagataatctgtaactataaagataaaacataatctggaaagatattttttaaggactgctgtattttgaatagatcatattatcatcttttcttctgtggagaatccaagcgtttttctgttgaaagactggaaccttttctcctggattctgtagtgtttggagggtcattgacaacactgttatgagtgcacagttctcggtggcagcactgtggttcaaatgacttattttggtgttgttttattgtttttgtcttttattttcattaagctgacagctaaatcagaactgatttatcagtttgtggaacatttaacacaagctgtggagagctacaagcagcgaatggactggctcaccagcaagagccggcagatttttggtgtcatcttggaacagtgcgtcaccatagtgctggattttggcggcattctggagggggagcttgatctgtgccgagaggctctaacaatggttctccaggagcaggtggctcacataaccgagttcaatatcatayggtgagttcccataggaagggagtattttagtgaaagttcatagtaatttgtacatatttggaattaagtagcacagctgacacagttagctctctggtgagggaagaggcattatcttatactttcctagaagatgtaatttcagcagcaatcccacagtgaataaatcttaggaacttttatctgctttgcacagggtgtcttagctttcacattaaaagagatttagaaacatgcatttcttcagtgcatgggaaggttaaaatataagaatatgagttatggcaaatatatatttaaggccataaatctcttcattcattttagcttttaacttgggtaatgaattcaaatgtcactaatttcactgattttccagactgaagttgcaactcaagttgacctcccctataagttgacccctttcaccagaacaacaggtggctggctttatagaatttcccatatttcagagttttcacaaccaattatttatggattcttggattcaagagaatttggaccttagcattaacttctcatctggaaaagttattgcacctccctgacaaaaaacatctggataacggttggggaaggatctacctcattcagtttttctgtttttaatcaaatactttcagctaaatagaggacatctttggggacaatgcctaattatgttctatctagcttcctatttctgtcacaggtgtattactgaaggaatcaagtgcttaagtctgcaaagcttttgctttcttggaaacctctgtacaacacagatgccactcagccagattctctacccaggaagcacacagcagacacgagtgtgagccagccctgcttctggtggcaggccatgggggcaatcgggccagtttatttgcaattatcaagtgcaaataaattgagataattcaaatggctcttctttttttggaattgggagttctaccagtcttttataagcccaaactaaatggtttaaccaaattttctcaggatttaaaaactaatactctgttgaactcaaaacaataccagtattaatccaaaagaaggcaacctatgggaatctttcaggacaatgaaaacaatgtcatgaaagaattagaaataaaattttagagcaatagaattgctggtgatttgcaaaccttaatactgtgaattattataaatgtactattaagtgaagccagttacatataaacttgcctgtttataaaaaataacttctcttaatgttttaaaggactcattattagtgtttacctttctgtttctcatgtaaacattgtttttcctagtcagcacagcttatagaaggtagtggtgctttgggaacctgtcttaaacagcttgctggttttgttggtaacatcagagggctgggagctatgatttctttctttttcagctctagagatggatgttggcagcttgctgctcatggctgtgagacggaggtttggcatcccagtagcactgatcactgcccagtgaccactccatgtgatccttttcagggtttctcaagagcctgtgaagtggcaggaaaatgctactcctgtgaccgaacagtccatagctactgccatcagttgggttgagaaactgacggttgagctgactgtgagcgaggctggccgcctggatgctctgctggaagccgggagagacaagactgtaagtgcgtgttcatggctggccccaggccatggaggtggcttccagcttaactcttcacactcagtgactttacacggcccttcaactgatcttgggcccctcccagcaggatccgacagagatcccattgggcactgatggtgatggcatagctggaacaacccaaatgaggcccctgaatacccgtctcctgaacctggctaggctccctctgtggggtgactggggatgcagggtagacccttgtttagccagtgtcgggagagccgagtgcgactcacacccaccgagcaccgagaagggacaggagtgaggccatagttgtgcatctttgccatattaacttcactcttgctctcctaccaattagatcagtcagtctatctcttatgaggaggagagagagattggaagactcctcatagaaccctgaggatgaggaaataaggttttcccagcatccatattctgaatctttcctagttactcttcttcacagatggatctgtcatctgtcacacactttccaaggtgaagtacgcgcaagctgatgactccatccatttttggatgtcaatgtattgacatgaattttgatagggacatttttggaaataaagctttacctggaagaagtgattagatggtggtgtgttatgtctctttgagccacagggtctgtgtttctgggagtgactctagtgatgggagtgttggggcagtggcaagccagtggagacacactctgggcaggcggggtcctttggccagcctggactccctgtgggaaggtctgcttgcctttggatacagttacttaacaattatgtgcttcctccactctggaagtctggggtttctgtaggtttcagactttacccagctgcatcaagaagtccattgttggagaaagaagccacgtgttggcatcttgaaagatagcccccagtggtcaccggcctgtgtttatcaatactgagggcaatggtttgtaattggaaacacattgcttttccttccaaggccaaaagaacaaatgttttccattaaagaagaaccagatacaagctagtttgttccttggtcctttgagtttgttttaacatctgtaaaatttcaagtgtctggacaccttaataagcattcaaaaaaatggaacattcccaggctcagggtgtgtgtgcatgagcctgggcacacagctgttctctttgtctatgaacctggctattgtggtcacagctgcctgtggccccctgacctgactgcaggatccgccagtgaccctgtctttctgtttcactccttctggttcgtgcctctcctttctccggggttcattcctattccaggaagtaaggaacaattcagtgagttccagggaagtcctatggaagaaaaggaatcaagaaagaagcttccaggcactgatcatcaaatgcagcctgaaagcttttgagaagagaccgtggagcagcacatgcaagccctgcacagaccgctgtgcccctctgcccacagccttgatctgggggtggtctcaaggaaaattctagcaaatgcaactgccttgcatataaaaatgccgtgtcctatgttttatgaggagttaaaaaacacatgtgtgtgtggcaggggggagtgggttcccataagtcctgcttctctgctccacacctgtcatgcccatcccagcgagttctgaattcatccagatggctgcagtttgctctgaatagaaaagatggaaggcttaaagaattttttgagcagctaatataaacacctagactgttcctactgatgacagcctgctgcaagttagcatctccctccatgagcgggtgctgagaggagccaggaaagtgggcattgtcttgtgcccacaaattaacatgcaagtcccgtttctataccaagcccacatgaggagtagggctgaaccacgtgcttggtcatggagaaggaagatgcccagagaggctcctggccccctccaggcacaggctttgtaaccaccgcgggccaggaagactgaaacaggaagcaacgagagagagccttgaggtctaagaagagcacatgcagagtgggaggtctgttgaaatgctggctcgacacatagcactgaaagagcatgattgatagatgaattactgttgtgtctcatgaaaaggaacctggctcactgggagggcagcacgtggggtcctggggacatgtttggtggttgagggggttgacatcctcagagaccaggtgtgtggaccggcacagagtttctgctcttcagtagccctggtccaggacatgcatctttggaagttagtagcttcccaggcctcacgaggaagggtggtgtacaggatgaaagggaaggctgtttacccagagccctggttctaagctgcctaagaagaccaaggggttttgcttctctgccaggacaaggccacctacccagaagatacctgcatttctgattctgttcttagcctctcttctatccacctgctggcacacatctgtttagtttttggtttcttttaatcatatttcctgggagaccaagtgagtggattaaagacagacccacatgatttcataaagaaccttcactgctggactgaaagccgaagtcctggccacattaatccatgaccctggcagttcatttatttccttttagtggttcaggcaggcatcagatcttttcttttttgtgtctctgatgcctaacaagggctctataaatgcttgttgaacagtgaaaggttggaaaggaaataattttcatattcttgtgtttgaggggaagatgtgggtcccatttccaagctatggcatagatttgggttttgtgacttgaagtgagatggtctgtgtgggattgaacaggtgaatttgctgagtcttgtaggaccctggtggggatggcaggtggggacagagaccctgaaacctgggaggccagaaagtcggtggtggtcaaggatcctaggagggatctgagaggtgaactagatcaataccatggggacagtcactaccatggagggaatcagatgaaatgggctgagacagcagagggttcccacaggtacagggaggatttggaggtcagatccagggactggagttggccagaaatgttgcagtgttcaaaggtgtacgcagaacaagacagaattttgctggatcttttgctgctgttctggttgactttctttttgctctttgaagagtgaagatttttatacctggaagcctaggggatgagagcacaggctctggccagtggagcagagggcagtcagagtagaagcacacactcctaatctgtttctttcttcccccaaaagctgcagctaggaagatgtcaaggactctttggcggggcagaatgcatgttactgtgtgaagctgcagaatgaatggcccagatagaataaggaatttcaagkgaaaacataaaggctcctccctacttgatgtcatatgaagtggcaagagctttttactcactctaaaggagctgaatggaactcatgtattttatcaaattcggtgcaaatcagcatttagggaaatgtggtcggtgaggaagctactcctggactgaaggctgctactgagcctcaggactggactttgccttcaaggagctcaaagacactggttaagggagcagattcccatgaggataactcctttaagccaaacaatctcctggtcccaacttttggtcagtgatgttggtatctggggtaggagcctgaacccttggatggtggggtaaccacagaagtgaaaaaagtgactgtctggggccaccttctattgcttgctcttactttcagaattctggggctcacattcatctctaacaggtgaccagccttgccacaaatagcacagcgtagccgtggacagcaagggcagggcttgtggggccaggcagcctaggcttaccagcttcaaggccaactcagttttcctttccaagcctcagtttcttcatctgtaaactgggcatggtaataattcatgctccacaggactgttgtattgagtgagataattcattttagtttatcatcccaaatagccaacagtattaaagccattttgctttaagaggcattttgccagtttgatggcagacaggaataggtagcatatttatcctcctttctgtttttcttttctttctttttttttgaaaccgagtctcgctctgtcgcccaggctggagtgcagtggcacgattcggctcactgcaagctccgcctcccaggttcacgccattctcctgcctcagcctccccagtagctgggactacaggcgcctgccaccacatccggctaatttttctgtatttttagtagagacggggtttcactgtgttagccaggatggtctcgatctcccgacctcgtgatctgctcgcctcagcctcccaaagtgctgggattacaggtatgagccaccgctcccggccacctttctgtttttctaagtgtcatcacgtgagcagaaaggagaggcagaaagaccgtgtacaggagagtgggggggataggtggtctcaatgtaaagcatgtcccaggaaatctgtagcgtaacacagggagttgactgaaaatgtatgtgattaagaagccgagtaatgaacttaatgaatagtgaataatgtcataaccttagtaaaggaaaataaatcctgactcacagcaattttcagtttgatgaaatctcaagggaaaaacatttctgcacaagaacttcaggttttgggattagtgccagaggaaagaagctgagtttacatgacgtgcattggacgtgtgtggtgtcaggagtggctgacagaccacctcgagatgtgtgtcctcacctccctcttcatctgaccaaccctagaaaatactctgtgtctgctcccctgtctcaggccatgtgtcacttagatccttgcaacaggatgaacctgtccccatgctaaacttgggcactgccgcagctggaaaactcggataaataataggcctgctaagtggaagccgtttaaatgtgtctcccacaaggtcatgcatcagaccaggagaagagtgaaacagaacgcatctgctggaagagcagtattggctggctacaaggaatctggagaagatggtttcttccttccttcagggttttttctcrcttccagtttactgacttgtataaatttacaatattcctcagtcttttactgctcgatcagtactttttagaatcaggagctggcgttgaaaggcctgagagaaagaggcctgggaggggccagggctttctgtgcctcaagtggcctgatctcagctcccactctgtccttctcctaagtcccagtctgggccccacccactgcgtcccacccctatcccttccacctccttggcacagtctgctccatctgctgcaggcagagcaccccaaccaactagaaatcaaccatgaggactcccgccccccaccctcccggccaggtgcatttaaggcctcggatagatactgaggtgaggccatttgttgactatcttcagcttattgggatttgggattagagcaaggagagggtcatgaatcctaaagggatggtgacatctatttaccttctaacacaatgcatttgctggggtttcttcccccatttatgtgtggacacagtccatcgggacatttataggccaggttgagaggatatggattcctggctctccttgggttttttactttctgagatgtatagaaatgcacacatagttggaagtcatcctgtttcaatgccatcatgaataataaactgcattatctcccttttaacaagggaagacactgaagttaggtcagttgcctgaggtgacagagctcctgggtggcaggggtggggaggactgtggaagcaccgtcccgggaggagcgagggtggccgggctgcagcagagcaggaggggcggccgccctgagatagagagttctctgtctctcaattcagcagctggcacttctctgggattgtctgcttactgggggaggtgtgcatcttccagaatcactggtttaagctgtgtgtgtgtgtgtgtgtgggcgggggggggggtgtgtcctgacacaggggttgcttattcttccattcttctcatggcctggtttggcggcaagaagcagggcactgcaggcggacctggcatctgaccagctgtgcacagtcaggacagcctcaccccagctccgggcgtgtgagtccctgcttaggtgagcccagaggtggagccagctgaggatgtgccctcctttccacattctgccttagacagaggatgcatgagtttgcattgtaggattctggcactgccgcgggcaatggcagataagctccctgcctgcagtggctgtgccagtccttccttcattgcttgacttgaaaataaccactccgaacctgtgcgatatatttgtggcccagaggaagttctccaaatctgccaaccatattcttctcgtgccttacccaagacaatagccactgttgacagaccttcctggtaccaagccttgaatatctcacttcctgactggccctgatgtcctcagaaaaccctgggcagggctgctattctttctgcccattttttctaagagatcgttttgtagaatgggtattactgatgagactagtaccaagctagggcatgtgagggagataaaccgttggcaccactgttttgcagattgaatccatttactactttgtggtgggggatgttcctgaagaatccaaggagcttctcctccagagggccttggagatcccgtgtccagtctacacagtgtccttcaacgccagaggagaaggcactatagcttttctaaaggatctgagtgccaagacccacagcaggtaggcagaaaatgtgctcttgagtgacagcaagcgggttgcctgctcacacaggatcaacagtgggtcttgcattcttcgtggctttaaccaatctgttgctgtgttctcctctttccagtatattatttagtctctctgcatcttttcttctccgtcttgtattaatcatgactttctattttctgcaattcttatgctttgacctcttggtgccttgctggtccaggagaccctgtccctcccagggctagccaattcctagagatagcaaattactcactggggcacactttcatatgcaaaccaaccagagcccacactgccaatccaggctctctcacttagaaccrctgttctctaccctaatcactccagggccacacaccagaaaactcgggacagcccctacaccccagagctcagggaaattattcaaatagcctgcttacccttcctctcctgttccttcccttggartccacactaaaggtcctcacctacctttcccctcactccctctgcctcccggctgagccggtgcttccctgtgtggcctgcgtggcacgctgtgcccctctctcctcctgggaactgggctagtcagcttgggctgccataacaaattgccacaggctgggtggcttaacaagtatttatttcttacagttctagaggctgggaagtactaggtgaaggagaattcggtttctggtgaggtctctctccccgccttgtaggcagctgccttctcactctgttctcacacggtggagagagagagtgagagagagagaggagagagagagagagagagwgwgwgtgtgtgtgtgtgtgtgtgtgtgtgtgtgtgtggagagagagggaggagagagaggagagagaggagagagagaggagagagacattgtgtgtgtgtggagagagagagagcagagagacggagaaagagagagagacagagagacagagagtgagggcgcactcactggtgtctcttcctcttcctataaggtcactcatcctatagaatcagggccctgccctatgacctcatttaacctttattacctcctgttctatctccaaagacagtcacattgggaattagggcttcaacataggaatttttttggcttgggattgggggagcacaattcagtccataggggaaccatgagtaacaaactatcttttcaatggcagtaggctccttatctattggcctcacaatacccgaatagtaataaaacctgcatttaaaaacatatgcccctgcaccctgggtctgtgtgtgtgtgtgtatgtgtgtgtgtaagtttaggtctcttgtggagaaagatcagctacttctgtggttacaaggagaattataaaatcctttcctaagttctccttgaaatgggtacaacgtcttcccagagcacttgttctttaaatatttttaaattgatacatatttgtacatatttatagggcccatgaaggggtgggttgcccctccacacctgtgggtgtttctcgttaggtggaacgagagatttggaaaagaaagagacacaaagtatagagaaagaaaaaggggtcccaggggaccggcattcagcataccaaggatccacaccggcaccggcctctgagttcccttagtatttattgatcattatcgggtgtggcaggataataggataatagtggagagaaggtcagcaggtaaacacatgaacaaatgtatctgcatcataaacaagataaagaaaaaagtgctgcgcttttgatgtgcatatacataaacatctcaatgccttaaagagcagtattgctgccagcttgtcccacctccagccctaaggcggttttcccctatctcagtagatggaatatacaatcgggctttacacagagacattccattgcccagggacaagcaggagacagaagccttcctcttatctcaactgcaaagaggtattccttcctcttttactaatcctcctcagcacagaccctttacgggtgttgggctgggggacagtcaggtctttcccttcccacgaggccatatttcagactgtcacatggggagaaaccgtggacaatacctggctttcctaggcagaggtccctgcagccttccgcagtgtttgtgtccctgggtacttgagattagggagtggtgatgactcttaacgagcatgctgccttcaagcatctgtttaacaaagcatatcttgcacagcccttaatccatttaaccctgagtggacacagcacatgtttcagggagcacagggttgggggtagcgttacagattaacaacatctcaaggcagaagaatttttcttagtacagaacaaaatggagtctcttatgtctacttctttctacacagacacagtaacaatctgatctctcttttcgccacaggcccatgtgatattctgttgcatgcatagcatgtggaatgatcaagtcgggatttaggatgtgcatcaccttatttatcatttctatgtgttgggaacatcttaagtcccctcttctggctattgtgaaatataaaatacactgttgttaactatagccaccctactttaccatcggaacattagagcctactccttctatctcactgtatgaacctactccttctatctcactgtacgtttgtacccattaaccaacctatttttatcccccgatcctcacacctttcccagccactggtatttatcattctactctcatctccatgagatcaacttttccacctcctacccatgagtgagaacatgcgatatttggctttttatacctggcttatttcccgtaatataatgacctccagttccatccatgttgctgcaaatgacggcatttccttctttttgtggctgaatagtatttattaagtatataccacctttctttatccattcacccattgatggacacttaggttgattccgtatcttggctattgtgaatagtgctgtaataaacacagggtgcagatatccctttgatatgccgacttccttttctttgggtaaatacctggtagtgggattgttggattgtatggtagttctatttttagttttttgagaaatctccatagtctttcctataatggctgtactaatttacattcccaccaacaatttataagacttcccttttctctgcctcctcagcagcatctgtcattttttctttttgataacagccctcctaacagggtaagatggcatcttgttcttaagtgtaggtgctcatcacagtcactggggagcttgttaatgatacagaggccaggcttcaccttgccggctcattccacgtcatagagagagcccgggaatatgaatttttcccatcactttgcataatacctgcccagagagcttgattgagatgcaaattttatagccgcagccccaggaattctaattttcaagatctgtgaagggctagaaattttcattgttaacaagactttgggactctaaggaccattgctgtggctgctcttacggcactttgaaatcttttaacatcaagtatgtggctcccattctgggttcctgagcccctaagtacagaagggggctccctcctgtgacctcgctagttgaaagagaagaggcaactggccagtcacctctcttgctgttctctgattagctcatctggggcatgctagagcccagggaataatttcctgtgagagaagctgtggttcagctacctaacgaggccatgcagccatggaggtgggtcttgcagaaaaggatgaggtattgatgtatcctcctgtccatgctctgggcctttgcaggcaagcgtaacccatcacgagtagtgcccctgccttctccactccctgcctggacaccccatggcttctggttggtcttggtgcacctttggccatggggccccagctggagggcagttattctccagctgcaagtggcatgtcctgagtgtctcaggttgcaggaggctgcctggtctggtgaccctccaactggactccggcttcccctgtgccagaggctgtgtctgggtagaaccaccagtccaagcacagcgctgtgctctaaggctcaaacagcctgtcataatgctgagttgcttctgcacaagcgagactatatcagccagaggaaatttctgccctgctcccttttctaatctagaaaacagatcagagagtggaaggtcctgggtgccaaaggccttgacactcagggcatggggcctgctggggcaaacctcacccatctcccctccttgccctacagggcaagggagctggacatttctgctctggatgaagctcctgcaggagttgggaatgaccaggctaagagttcattggctttaggaagggcaccagaatgaggctgacattttaattgccgtcaagtcattattccagtctcgcctgaaaccctttgggaagagactgaggatttccatagccrcggtgggttccctagacttctcccaacatttccatcctgagcggtgcttgggatttctctgagttgagtgtgtggtgctaggcagagacggaactcctgcgtggctggwggagcattacttgtgacttcctctgtccacctgaaagaaatgtcctgctatttatggactttttggattccagttaagtggctttgagggtgtgacttagcccatcaccctgtgcactacatcagtgctttcaaactttcatgtgtctgtcagccccctggggaccctgttaaatggatatttggactccacagggctgggtgggggcctgggagtgtgtattcctaacctgctgctccttggaccatgctttgaaaagacaggtcctaaaaacttgtctacacaggaatgcttctcattcgtgcttaagcctggctcctggggaagtgtgtgtttgctgagttaaagttgactgatgcccatcagcagcaggcaaattaggcaaatgctgtctgtgtcatgagctgtcctcactgaacytacagagctgatgggtgctactggggcccctcattagacccctggcttggctaagctgtgttgacatgacggaaccctgggaacaagagaaagaatataagcatagagtgtcattttcccaggaccaagaaataccatttggttgagctaatttaccctctaatgaaaggatgagttgtcggttaaaatcccacatcattcacaattctctgtgctattctgcctccctgtcttttgcttgtggaattgacaaggtgcaggaagaagcagtgaccatggctaagaagatgaagatgcccagtgctgccgaagagcacgttcagtcccaggagaaggaacaagcatgcacggacacctgcgtactgccttcctaatgagcatctcttcacgtttcagattccacgcatttgccgagagaacagagtgtgtagaatttcctgcattctccacaaaggatggtgacaatgtgatgacttggaattcaaggaaactgaaaggaaaactccctccaggtacctggaatccaaaagaagtggtgtagcttatgtcccgaatagcctcagacgacgtggatcattaggaagtaaagtacgagggagagactccccatgtcttttgtataatgttattaatgtagtgcaagagcagagttaatggatattagtggtgagtttgtcagcgtagcaaccaggcataagtttacaatccagggaaatggcctaagcgatgtgtgtttactaacttgagaacctgctggagatgtggccctgggcctgtcaatgccggagttagttcttggcaaggcagagccactctgctgtgtggattagttgggaggctgcagagagggtgcctgcggttcttgagggggtttctgctgtcctccctgtgatgaaagcagggcctgcggatgcagcttgagggagtggcctgccccttgtgagggcggaggccgcacaggaacctttacggaggcggaatgaacttcccctttcattcaatgaatgtgatcagagaacttaatgagcacagagaatgaggtcaccaaatcagcgggaaataggctgtgattcagaaaaacagtggaaggttactcagaaagccaggagatgggagtttcttttaagctgatgaaattgcaaagtgctgaagactgaataaaycccactgagaaaaggagggaaggaagcccctgttcgattgttggatgaaggtacctggtgggttgttagaagtctaagaaagctcacccccactctccctctttttaaattatcaaacagatttctagcttcattataaggcagagaggctactctttagggataagagagaagctgtagcaacagctgcttgaaagatttacgtaacggtgctgcaaaggctcccaggagaaggttaggttttcagatggagataaaagtgaagatgagtcatgagcctgttcctgacacacactttgtagattcagattcttggtgtccaagcagaggaggggagaygttcccatagagttcactggaggcactacttcacgtaatggaaacctttgttccaatcatgaaggggacatctccagagaattcgagaaaatgccaacatataggcaagatcgatgctaatctaagaagaaattaattcaggatatatgtcatgcctattgaaagtaatttacaagattaagcctagtgggcaatgatttaatcacggcaaagaatgtgagatgttactagcaaaccaaggtgggccaattactggaaatggggtttagtcttggtctctggattccttggcaacttagttataaagggaaatacaaactgcatagcttacattttcagcaactaccatcttaccaaccctttgaagcatgcaaattacatacaaaaacatttttcttttttttttttttttttttttttttttgagacagagtctcgctctgtcgcccaggctggagtgcagtggcgggatctcggctcactgcaagctccgcctcccgggttcacgccattctcctgcctcagcctcccgagtagctgggactacaggcgcccgccactaygccyggctaattttttgtatttttagtagagacggggtttcaccgttttagccgggatggtctcgatctcctgacctcgtgatccgcccgcctcggcctcccaaagtgctgggattacaggcgtgagccaccgcgcccggccaaaaacatttttcttagaataaaatgcttggcatggatcgttgttctcaatccatttcagtgatcacatctgaatttggagggagaatctcaaatcctaaatacgtgatcttgtctcctctgtccatcacaatgtcccagaaatgccaacatttcaaagcctacctctcccaaactgcccagaaaccttgacagactgtttttatttggaaaatgtgtgatttcccacctcacctgggcctcagaggcaggtttcttccctttacctgatcacatctctctccgttgccacatcagccgtttcacgcattttccacatcactttcctcaggccaccctctcgtttggtgggggagtgacttcttacattatttccccctccattgtatagaaaatagagactctcaagtaaggggttggagaagcatagctcagaggacttttctggcaatgtgaaggaatttcctgctattattgactttttggataccagataataggctttcagggtatgacttaccatgaccccatgctctgtaccaatacaaaaaaactctgcagttaagataaaaaatgttttttaaaaaattatagtaaattatatatgccataaatttactatcttaaccactcttaagctgacagttcactagtgttaagtacattcccattgttgtacacccatcaccacccttttcatcttcccaaactgaaaccctgtgcccattaaacagtaacttcctatgtctatgtctgttcatgctgctatagcaaaatacccaagactgggtaatttataaagagaaacttattgctcacagttctggaggctggggaatcgaagatcaaggcactagccgatttggtgtctggtgaaggctcactctgcttccaagacggtgccttgctgctgtatctttgggaggggaggaatgctgcaccctcacgggcagaagagatgaaagggccaaaaaaaaaaaaaaggcaaactggacactcccttcagcctcttttataagagcactaatcttattcaggaggactccatcctcatgacttaatcacttcccaaaaggccccactctcaatactgtgacattgggtattaggttccaatgtatgaattttggagggacacatatattcaaatcactgcaccccatttgtcccaccctcacccctagcaaccgccattctactttctttctgtctcctttctgaatttgactactctaggtagtatctcataaataggtgcaattatacagtatttgtccttctgccactggcttatttcacttagcgtaatgtcctcaagcttcatctatgttgtaatatgtcagaatttccatcctttctaaggttgataatagtccattatatggatataccacatcttgtttactgattcatccacccatggacttttgggttgcttctaccttttgtctgttgggaacaatgttatgaatatgggtgtacaaaatagctctttgagattctgcttttcattcttttggatatatactcagaatggaagttctgaatcatatatggggattctatttttaatgttttttccagaaaccttcatactgttttccatagtggctgtaccattttacattcctaccaacagtgcacaaagttcccacatcctggccaacacttgttattttccctgtttttgatagtagccatcctaatgggtgtgaggcaatatctcattgtggtttttatttggatttccctaatgattcattattttgagcatcttttcatgtgcttgttgaaattttgacataatattttaaaaagtcaaagttaatgccacaaaaatccatgatgatgaaaatatcacaatttcaaataaagacaggctccaacaagactctgtgaggccatattggagcctgaggcaagaggagaaatgtgtacctctctatatatatatgtttttatttattatttgtaatgataatttgtttctaggttattaagtttaaagatattgaacaattaaaaagtgtattaatacattaagtttattttgggagtatatttatatctctcactaaagtttttattcatcacacatactttcaaagttactttctcacatttcttataatttacaactctgaattgaaaatgaaataaatagacttagaacatacttgttaattgatgaatttgtttccatcaagattaggagtgtaaaataataacaaattctgttttggtacaaataaaataatgtaaattatttaaattaaaaacattcctactttttaattttctagtattttttcaactactttagtgttctgggaaaaaattacccattgcaaatccatgccatcatgtgtgcaggggtacacatcgcattgctcccctttgcctctgcctccaacatggctccatgtggccctgctcagcaggcccctccccaccttctaacaccatccactttcctcttccacatgcacctcgttttcaacctctgtctgaatgtctgccatctcttgggccatgtgaacttgctctcatgtaagctctggaagatgctcctttgcttccctgcttccttccatgtaaacattacctttctgggaagccttccgtggccagtgtctcccgtctgcccttttaggctgcttgttgaggcatctgctgcagcatacaagccatagacaggacagtaccttttaatggtaatttgggaaggtccagaaaccagagcaggcaagaagttctgttcacaaactcctgtatgctagagagatccattaaaaattccataattgtattttttcatgagctcgcccgtattttcttacacactgggggaaaacttgcagaattcctgtttttccctgctgcgtatgccccctgagcccaggaagcacagagtgatgacaaatatgtgtggggcgggggcgcggatctcataatattcatgacatggtctccaccatctgcacctcctgaagcaaatctcgatgtttccagaaaggaataattactcacctgcgtgagggtggggctaggttgctggcctgcgctgggctcccaggcccttggtgcagctacttggctgggtggtcagaatcccagggccccaaaagctgagtgcctgaacctgggtacgtggckgttgtctcagcttttacttccagggatgactgtgagaggtgacagcgtgctggcagtcctcacagcctcgctcactctcagtgcctcctctgcctgggctcccactttggcggcacttgaggagtccttcagtccgccgctgcactgtgggagcccmtttctgggctgaccaaggccggagtcggctccctcagcttgcagggaggtgtggagggagaggcacgagcgggagccggggctgcgcgtggagcttgcaggccagctggagttccgggtggctgtgggcttggcaggccccgcactcggagcagccggccggccctgccggccccaggcaatgaggggcttagcacccaggccagcagctgcggagggtgtactgggtcccccagcagtgccggcccaccggagytgctctcgatttctcgccaggccttagctgccttcccgcggggcaggcctcgggactgcagcccgccatacctgagccttcccccgcctccgtgggctcctgtgcagcccaagcctccccgacgagcgccaccccctgctccacggtgcccagtcccatcgaccacccaagcgctgaggagtgcgggcgcacggtgcaggactggcaggcagctccacctgaagcccctgtgtgggatccactgggtgaagccagcggggctcctgagtctggtggggacgtggagaacctttatgtctagctcagggattgtaaatacaccaatcggcactctgtgtctagctcaaggtttgtaaacacaccaatcagaaccctgtgtctagctcagggtttgtgaatgcaccaatygacactctgtatctagctactctggtggggccttggagaacctttgtgtggacactctgtatctagttaatctagtggggacgtggagaacctttgtgtctagctcagggattgtaaacgcaccaatcagcgccctgtcaaaacagaccactcggctctaccaatcagcagaatgtgggtggggccagataagagaataaaagcaggctgcccgagccagcagtggtaaccccctcaggtcccctcaggctgtggaagctttgttctttcgctctttgcaataaatcttgctactgctcactctttgggtccatactgttttcatgagctgtaacactcaccgcaaaggtctgcagcttcactcctgaagccagcgagaccacaagcccaccgggaggaacgaacaactccagaagcgccgccttaagagctgtaacactcaccgtgaaggtctgcggcttcactcctgagccagcgagaccacgaacccaccagaaggaagaaactccgaacacatccgaacatcagaaggaacaaactccagatgctccaccttaagagctgtaacacgcaccgcgaaggtccgtggcttcattcttgaagtcagtgagaccaagaacccaccaattccggacacaaccgcatgccttagagattctccttcctcccagcactgacccatcccatccaggaatgctcaccagcctcagatgagttcccctccctgggcagagcaggatctttggcttggatttacagagtgcaggagatttagtctggcagatgctgctgaccggaagctgccactcatcttctaagcctctcctcctcgtagctgtccttccccttggctttcagcccagcattggctggatccctgcccctgttaccactcctggggcactgaatgggggaggtgggtgttccgttaaggaggcagcaccttccctcccatacttctctgtgtgaaggtattcctgcctctttctctctttatgatgggcttggctgtctgctggagagggtaaggggcaccaatgggacatagattattatgggaccagagcgatgctcccttttggtgctcctctgaaccacccagcccccagcagcttgtcttcccttctctgttaataagcgtggattttcttcatggcctgtgtctaccatgaaatattaatattcatcttacccataagcaaaataagacagagtcacattgagcttccctgaactctaggaattttccttggaaaagatccctttccaagactgggcagcattttccccattcttgccttggggtctcagtttcccctgtccacagtcttgtggcatgtgccccaggccccctcaccaatggccagttaagaggtgagcctgatgggcaggtarcagggtcacattgccttggcacctggctctcagggaatctgttggacagtcctcctacccaacttccggaagccttttaaacatggcagccgcccattgactgtggtgacacttttcatctgctctggttggcagggtttcatgtggtgctgctgaaggagacctttttgcttcagaatctgaaacagaggcctgaaaaatcatcttctatgcctctctgtttctgtgtgtatgcgtctgttttgcactgcgataaaggaacacctgaggctgggtaatttataaagaaaagaggtttattaggctcagcgttctgcaggctgtgcaagcagggcaccagcatctgctcagcttctggtaaggcctcaggaaacttccgaaagccttttaaatatggcagaaggcaaagggggagccagtgcattacgtggagagagagggagtgagaagggggaggactcagactcttcttaactatcacatctcatggaaactcattaccacagagagggagggcaccaagtcattcaggagggatctgcccttgtcacccacacaccttccaccaggccccatctctgatactgggaatcacatgtcaacatgagatgtggagaggacagacatccaaactcttatcactgggcattcttgggagtcagggaaactcatcttttaagcaaactctcaagtggccttcctgctggccacttcacacctgaccagggcttaaaagtattctgtgatattctttgaaccttaatcttaccatgatgttctccaagtcagcagtgacttccaggaggccacacccctctctgcccaccagttagtcatggtcttagctgtcccctcyggaagaactggctccagtgcattggttgtgtaggtgacactgcctgaggtcctggcagacccaagtgaggccccctaagtggcagatttgaatttctggtcaccaaaacaaggccgattacttactttgatttctagaattcagtttaattttttattccagtctcctctcctctggttggrtgggaaataaagctcagtccttgtccccatcccgagctttacccacagtttggagaccctaggcagtgtttatgcatcaggaggtggggtctagtcgttggatatctgttctggaaaatcacaccataaataccccttgtccctgccttattgccgcttcaggctgaacagctctctgctgctcccgtgctgggctgtggatgtgaaaatcttttgtagaccctgccccgcctccctggattccccccatgcaggcttcctcccagggtgctgcaaagaactgaggccagttcctgtcttctcttggggcctgtctcctgttctcccccaagccaaaggcaggctcccttttatctgagaaaaagcctggctccttccagcttcttcaaagctacctgctttgtaaaccgtaatacctctcctaggggttcaggcttaaaaaagcctgaatgtcttgcagcctacttcatctttctacactgccataggcctccctgggggcaagtttgcaatgagcctggtatctgctcaagtgtggaggaggagatagagaggggaaaacagatgatcctcgcagaatatgatccatccatgtgcataaatgtgaccttctgtaagtgccagaggcatgatgttaaaccctaacagatggctcttctgtggaggtggagaccactgagataacttaattagttactctgttttttgatgttctaaaacaacacttcaagaatagatgttggagaatggtaaatgaagagctggcagtctcttgagtgaggcatgcagctctagagtacgattgggaagccactggccatacgtggctggagagcactcggaatggagcgagtccaaattgagacgtgctgtgaaagtacaatacacactagattccaaggacttagtgtaaaacatatcaattatcacgttaacaattttaaatttagaggataaatcaaaacgataatacgtatatgttgagttatatcaaatatatatatatttgtttgttttgagagggagtctctctgtcacccaggctggagtgcagtggcatgatcttggctcactgcaacctccatctcctgggttcaagtgattctcctgcctcagtctcctcagtagctgggattacatgcgcctgccatcacgccaggctaacttttggattttagtggagacgaggtttcaccatgttgggcaggctggtcatgaactcctgacctcaagtgatccaccagcctcggcctcccaaagtgttgggattacaggcgtgagccaccatgcctggccaagttatatcaagtatattaataaaattaagttcacctgtttctttttactttctaaactgtagctactagaaaatttaaagttatatatgtggttcacatcgtatgtctattgggtagcactgctctagctgtgtacccctgagcatcttatttaagttttctgccttattttcttcatctgtaaaatgggaataatatgttgtttctattatgctatattagctgtgttacatggtggggaggcagagaggaatgaggcactgtcctatattcagggaactcaaatatagtaaaataaaaaaaacctgggctttggagtcagacctgtatgaatttgtcacttattagctgtgtgatttcaaggtacttagcttaactaactggagctttagctttcttttcttttcttttctttttttttttttttttgagacatggtttgctgtgtcacccagactggagtgcagtggcaccattatagctcactgcagcctcaacctcctttgctcaagcaatcctcccctctcagcctcccgagtagctgggactacaggtgtgcaccactatgcctggctacatttttttaaattttttgtagagactggggtcactatgttgtccaggctggtctcaaactcctggcctcaagcaatccccccaccttggcctcttgaagtgctgggatggcaggctgctttctcctttatgaatggggtaataatgttaataatgtttaccttataggttgttasgaatatatctctatataagaatatatattaatacatgtatgtatgcatatatatgtatggatggatggatatatatgtatgtatgcatggttatatgtgtatacatgcatatatatgaaaaatgttttctatggtctctagcacacagttaaccaatcaataaattatagttgtcattattgtcataaccatcatcatttgcagttaccctgttaatgttattatcactaggtaaacaacttaaaaactaagtcttattatctttacttctcttctgtaatcctaattcctactttttttttttagttctatcactaaatatattgtactcagttcccaattcgagtccattccatttactttggtttcctgagttctctcttggttggctgaagttcctcttctagtcattccttcgagaagggcttccttccattcaaggaataatggtgcccatagggttttctttctttctttttttttttttaattgaaatggagtcttgctctgtggcccaggctgtagtgcagtggtgtgatctcgactcactgcgacctcctgctcccaggctcaagctattctcctgcctcagcctcccaaatagctgggcttacaggtggctgccaccacgcctaggtaatttttgtatttttagtagagacggggttttgccatgttgactagtctggtcttgaactcctgacctcaggtgattcacccacctcggcctcccaagtgctgggattacaggcatgagccaccgcgttatccccagagttttcgaatgtccttttctgcagtctttacacactgaaaggacagcctggctgctacaatgcccttggctcacttttctcccttgagtggctcaggagctgtgctcccacatcctctctgctgcatgctgctgaggagaaatctgaggccagctcgattagtttttcttttgtgagtgactttatctttttgcctggttgcccccaaaattcttttttgatctttaaagtccattaagtgttaggatttgtctcaatgctggctgctgtggtcgattttccctggcctacagtgtaccctttccgtctgtatactccagacttctattttagacaagattccttggattgtatctttaaatatttgtcctgttccattttattcttattttaaattggacaaatatattacatgttgctttgtatgtgccaggcactcttccagcctcttaccaaattccagctcactcaatcttcataacatacccccatggagtaggtactattattattttcattttagtgatggagaaaccgaaacagaaggtggttgagaaacttgtccaaattcacataactattaatagcacatggcagagtcaggattcaaactcaagactgttctcataaccattgcattatgctggttttcttcagagactcattttatctgtctggtgtatctcctttaacagtcttctacatctattattttctctctgacatttttaagcactttatttctgcctgcgttcaccctctgtggtttctcacagtgagttccatagcactttttttcattgagcttacatcaatttcatcttaactgctgtgattttttttcctctttcctgagtgttttttttttgagacaggttctcactctgttgcctaggctggaatgcagtgacgtgatcaaagatcactgcaaccttaaactcctgggttcaagggatcttcctgcctcagccttctaaagccctgggactacaggcacgtgccactatgcccagataattttttatttttgcagagattagggttgggttttggggggatctcgctatgttttccaggctggtctcaaactcctggcctcaagtgatcttcctgccttggcctctcaaactgctgggattacaggtatgagccactgcacctrgccctttcctaatttttttttatatttcatcttttcttgttgcctttccgtgtcatttttgagttcttgaatttctgctttgtgttctttcctcagggagatgatggcttcatatagatatttaattcacagaaaaaatgttggatcgtaattgtaaggactccttggtaacatttttagtgagtgttcttcttctcttggtagttttactgctcttttccgcataagtttcttatagtatccttgtttggatgctatgtatcagcttccatttattgatcaccatggaatggacacaagctatctgcaggcatgtcctaggggaggaaaggtagggaaggggctaagatagccatctatgcttcacaactcaggggctctctgcttttttgctgctgcagggacagagtggttcctgcatataagtttgttctgggtgatgctttgcgaagccctacctctttgcctctcttaaccaagtaggcagattttgctgtcagcacttgtcattgaggttctagcatccaggttgccaacaaggctcacctttgactgtgggtgaggcaccccccacttcctcagagctgccacagcccttttgaccactctgggtacacattctctgtgctttcttctgcattgcttctgtcccatctcagctgttctccatagcccttatcagtatgttatttttgtctcctagtttagaggaaaaaaggtgtttgtgttttcttttccactctcatttaccctcataatttctagaaaagggaaacagtattgacttatatagcttcgttcatcctggaagtaaaggctaagtataaacgttccaagatgtatgaaggcgtgggctctaagagcaaatgtggaacctgatgtcttcatcaactgtgtggagtggacagtgtcagccactttttttggtcatagggttatgtggcatacattatgttgccactcatttaaataaaattgataaagtatcatttgaatacttagcccatctattcttaatttcgcaaattccaaaataacttttgaaagcatgatatacaattgtggtgttttaaaagagaatgtaatttgtaatattagaaaataactttcatcctttgttttgttctcttactactacatcagatatctcctgatgtaattaattagaaaccatgatgtttctaattattggaccagggaagtgttgcttggtgcatgcatacattatctcattagtatgaggctgggggtctgaatccaggctgtcaggagcacctgactatattgcactctccagacataatatagacgatttggaaaatatggagaagagaggaaaagaaacattcttgccatccagatatttacaccgttggatattttggtatatttcctacaggtcttctcactatatacttaaaaataattaaggcataaatatattattgtacaaattgaatattgaattttctacttaatatagaatcaagtattttcccacattactataaaatttttgtagttgacattaaaaatatcaaatacttcattaaagttctatattagagttttgtcgatcatttcctattagatatttgggtaatttcaattttcttttgctatcagagatcatactgcacttatcttttttggggtgtattttttttctttttttaattattattatactttaagttctagggtacatgtgcacaaygtgcaggtttgttacatatgtatacatgtgccatgttggtgtgctgcacccattaactcgtcatttacattaggtatatctcctaatgctatcactcccccctccccccaccccacgacaggcccctgtgtgtgatgttccccttcctgtgtccaagtgttctcattgttcaattccctattcagttccctatgagtgagaacatgcggtgtttggtttttagtccttgcaatagtttgctgggaatgatggtttccagcttcatccatgtccctacaaaggacaggaactcatccttttttatggctgcatagtattccatggtgtatatgtgttgtgtggtgtatttactcctgtagtttagattttttaaaacataaatttctgatagtgaaaatactgaatcaaaatgtttgaacattgtggggtaatctctcatgttgaattgctttccaaaaaatactttaagacaatataattcacacccatttcacagaacctgaattagcataaaaatagtatctcattgtttccatctgaatttctttgatgaagaaattcgtgtcaattagtattaaacagtagtgaagttgaacatttttggatttgttaacttcttttgtaaactgcctgtttgtctattacccttttacttgcgggggtcttgtgtttcttatcacattgtgtgaacagtctttggtgtattacatayggataatttatgttggtcattgtgttccttttcattttggctgttttttataggcaaccataaaatttgcacagtaactgtaatctataaatcctgcagttccttcgtaactgtatttcttctccttttggttctttattgcctgagtttaaaacaaaagcaaaaattgttttggtccttctagatttattttgaagtatggtgtgatgtgggaatataaatggattttccctaaaatatgtaacaactgccttcacaccactcatgcaccctttctccactgacctctgtgctaccctttgtaatatattatattcttctatatgacacttgctcctggaccatctgctgtgcttcagggctctttctctttctagtctgaggttggtcatgaccatttgaccatgatttgtttttccacctacccttatatttatcatagatgtgaagaatgggcttcacgttatccaaataaacgttcatcttgaatgttgcttgctggactgactcttctaaggggagtgcacatgtgtgcttggtttctgtgctgtctcattcaaggcacactatttttctcatagtatttactgacattctaagctttttgggttttgctccaaatacatttttcttctctcttctttggtttattgacataatttggttagctccagtgatatactttgaaagaaaaaagattgagctgtatcagcagtttgcttactgcagctttgctttttggtgtattaaagccttaaacattttgaaacaataatattattgttactggtggagggcgtccaggtccttggcattttgaagaaagaattggacaaaactcacaaacaaagcaagggaaaaatgaagcaacaaaagcagggatttattgaaaacgaaagtaccctccacaggatgtgagctggctgagcataggggctccagagcccagttacagaattttctggtgtttaaacaccctctagaggtttctcattggccgcttgatgtacaccccatgcaaatgaagtagtggcctgcagtcagtctgattggttgtggaaagaaaccagtcagaagctgacatgaagttgcaaagtttacaccttatgcaaacgtttgattgattgtggaaagcaaccagtcagaagtactttcaattttccatccgccaggcaaaaaaggtgtgtgagggtggggtttgcaaagggagtacctctggttcttctgttacttaggtttggaaagttggggtttccttttgatttagttctaggaagtcactgtgaatcggccttaggttccctgcctccagaccctattcccccgcctcattatcaattatcaactggagatttaaaaagctataattgtttttgaaagttttcaaagtactttggactgctctaacctaaattactaaagcctagataaacagatagatgcattgctacaagttctgatttcatttaattttgatgtttgatactcattggtaagtagatatttgtatgaatcttcatttcttataatgagtttgataaataaattgtaagggtgtctgcaaataaattagttatatatgaattattatcaacttttaggcctcatattttaggatagttccttrtatcaatgcttcttctgaggaaaacaaaaagtagttgtaggctgagagcaattttatctcctttgttgcttcattgtaaaggcaaaaatagatgtatcatcatgtaaaagtatttatttattctgtgcttgctttagattcctataggtacattaattccttggagggatttctcccgaaagttttttctgtgtttgtttttccaggactgctctttccaggtgatggaaagcttttccagtgttttgactctgacaacgtgagccgcttaggtggtgcattaggtagtgcattacattttacgtttttcttatattgtccttcaggagttcgtggtcattcttctttgactataaagaatatgaaggcagaggacaggaagcagactcaggttcayagcacctgctgagtcaggagccctctgagcacttgtgcagaggtggctctgatgtgatggtggtgcctgcccactagggatcaagtgaaattgcctcgaaccttgattctgtggcttggtggtgtctaaagacccttttgcccaatttctgtgaacttctagagcaggaggcatactcttctattcccatcaccctctgggatcctgtgcctgcctacatggtgtctggtttccccacattagtctggaagaaaattctattctagactgtctattctaaaattcgattcatctccrcaccatcctctgacagtctgtaggtgtgattttaacagatgccactgactctctggagggtgaggaaggactgacatatatcctccctggttcctcccttctatttccgtttgccttctgaagcttctcaccttttcaagagcaaaacatgccactgagtcttctcgccacctgatggcatatatcttgcacttgaggtttgctgagcttcttgtacctgttggtttacagttttcatcaaatgtggaaatatgtcagccattatttcttgatcacaggtctacatgtcacctgcagtttgattaacatggaatggactctcctttaactagtgctaatttttttttttttttgagatggagtctctgttgcccaggctggagttcagtggtacgatctctgctcactgcaacctccacctcctgggttcaagcgattgtcctgcctcagcctcccgagtagctgggattacaggcatccgccatgatgcccagctaattttgtatttttagtagagatggagtttcatcattttgaccaggctggtctcttacctttagtgatccgcctgcctcggcctcccaaagtgctgggatcacaggtgtgagccaccgcttccagcaatccagggtatattcgtattgtggtgaatgcatgagcttgagctgaggcccgctatgtgccacatttaaggcccccactcatgtcatatccagttggccagagccagtcacatgwtcatgtcctacagcaatgggtggggaggtctactccactcacacggaggtggggaggaaagtgaacgtttgatgaacagttgtgattccttttttggcttggagacagtgtttgctggaaggtgaatcaactttgggatcagacctggattcaaatctgagttttgccactaaatacttgtgtgaccttgggcaagttacctaatctttctgagctatgtttcctcatttataaaaatcggaataataacatctactttgtacagtttctgggagaattaaagcatacgacacacatggaaatgtctagcacaaaattgacattccattaatggtagtttcctttttttcttcttgggattccaagtgggttttgttgtagatattggttctggaaagtgaaataatccaaaaggatttggcagcctgtgtcacaaagagcatttttctaatggtcatggtagtaaccagtttatttgcatgcataacgatggatgaattgtaatttggaacaagggagtgaatactgtactgttaaactttgttcttatgggaaatgagtccatctgtcaaggtggatcctaggagtaggccgcaggggcctttctagaggaaatcaggagtgcctgtccttcctctaccacaactagaatctgactcagtggtaagtagggttatgccatggggcctgttctgggtgtgaatttcacctacttctctgttgtcagactgagctcagtaagaagtgtaaatggtgcaataatatttataaattgaacatggtaattttcaattctcagaagctttcatggaggcatggattgtcccacatgtgggctgggcttgatgctgttttggggaaggaactttaactgctggttaaagctctccagggactgtgtctttaaggcagacagtcccaatcttctgagcagctgctttttaggttgtgaaggtcctgtcggcacaggaggagggagtctatttagtggtttggggactccttctcagtaaggaaaaagacttctgatctcttgggtttggagaaggcttcatcttttattttggttctcttcctgtatatccttgaaaatttacttaaactgaaatagtaagtatggattagtaaaattacattagagtaaacatcttccctgaggtcctggcatcaggctaaaagaggtaaacaattttggcattgatgcatctagctcaggatctagactcagcagtggaacgaacagtggacttttctgagatggtgtgatgtcaggcttctcagacttggtggtgggatgagcacccaggctgaaagccatggtcagaactctatgctgtcacttcaagccagagctttgtactttatacacaagggagaagaggaggcacattgcaaatggtgcatattttcaactttaaggtggtttcatgtatacaacccaaagtaccaacaacacagaaccctctcacagtttggtagaccagcgttggacgacatggcatacctttcaccctttcacttctaggcctaccccacccacgacaggcgtcactaatctgtccatcattgctctcgtctctagcctgtactcacctggcttcatctcctctcagctcagccctctggccagcccctgctcattgtttagaactatcaaatagcactcgctctgctcactatcatattttgcttatgggacaagagaaaggctgcaatgaatgaatcaaaagaataaatattaggtaatagcaaaaggtaatgtttttctgagagtagttttgtttgtgtccagtactcctggcaaatgtccttagaacagctactatactctaccagtattattcttaagtccaaaaatattgtagctgtaaaaatgtgggtgattctaccttcagaaactgtgctttttgtgttggtggagaaaaatgcatgaactaagactaaatattatgaaactgagttttatttacataaggacacattcaggctgctatgcttaaagggaaaaaataaccaagtcatgttcctggcagacacctgtgatctctaattaggtatttagagtgtattggcccatcacttaggcttggcattgcttctttgtttctaatctccaatttaatttagaagcactgattggtgcctgtttatggcttactggcagcgggagattctttcagaagtctccttccttccagctaaaattcagttgaattcagcggatggagccggagcggctgtgcatccaaaattgttgccacgttgcaactgacaaggctgagagactttaattcccttcaaagtcctgccccttgtaacagtgggctgccttggatttcttttctatttttttaaatctcttgagacagtctcgctctgtcacccaggctggagtgcaatggcgcaatctcggctcactgcaacctctgcttccagggctcaagcgattctcctgcctcagcctccggagtagctgggattacaggcgcctgtcaccacgcccagctaatttttgtatttttagtagagacggggtttcaccatgttggccaggctggtctcaaactcctgacctcaggtgatccaccagcctcggcctcccaaagtgctggggttacaggtgtgagccaccgcgcccagcaggatttctttctactgctctgacatagccctctggttagttaacaagcatttattaaacatctcctgtgtgctttagaaacttactagggttgaggaggaggagattcaaaaggaataaaagacaaggttcccagtcggcggggagccccagattytcagaatgtcatttttgcttctgccttatgacttaggggttgttccttccctccattactgcaggatcccaattagcttaagaactgtccacctgcaccttgccctcttcccttagcgcacacatttatctgaggtgtttgcagatctcgttttcccaactaaggagagtaagcccctaagcccagggaacccctctgttcccactcccgtcttgggcttatgtctggcatacctatttttattctaggctcctggctgcactacgtcttgtttaaagtagccctcttgacactgggcaggggtgggctcagcccagggcttgggtcagccagtgcaatcagctccttagaattgtactgaaataatcaagggaatccgggcatcctgcatcacctaacacacggggcagagagaaaccctcaaaactcttaaacatgaaattgaattgccagggaaaagagccagtgcagatttccgactgcatttgaatttctgattttagggtgatggctctgattccagggtgacagatccgtttcacatttactattgcaaagttgggtgctgtgctgggctctggggatacaatgatgaaaaaaggaggtccctctcttcaagggacctgtgttctggaatagcctatttggaagtctcgaccaggtgtcaggaaggtaccagggagagtggttacaaaaacagataaacatagttctgtcctcaaggaagtcacggtttaatgaagaagacaaacttacagatagtggaagcccagcaagagctctcagccttgataacctggtgggccatccccgtgggtgacagccgattccaatacaggcagatcgctgtggagccagcaggtgtgtcactgctcactggaatgtcactggagcccctgaccttggggacacagctcacccaccatcaccacctgcatcagaattacaaactgggtggtttcagacgtaggaagaggtaagtctataagccccttgaaggaaaacgaaaagtgatcaacacacaacagatgggtttgctcacgtagatcttgtatcatgagaattttccaggatacccaaggccagcgttccagtgtggcggtggggagctttggagactaacagcctgaagctgaatcctgacctcaccacttattagttgtgtggccttgggcaaatttctctgagcctcggtgtgctcatctgtaaaacggggatgatgatctggactcaggcaattgttgcaagtcaatgtggtaacgtgtttaagttcccagcacggtggcacatagtagatacctggtaaattttcatttcccctctttctcctccatttatcagcaggaagcagccattataacatacatctaaaataggtgacacttagaaccagtagaatgttatgaagatatggatgacaggtggcctggaatgggtgttggaagatggtgtcgggggttcccagcactgtgcaggggaaagggagtgctgccttctcttgtgagcatttctgtagggcagacacagggacatccaggcatgagaatattgctcctggaaatcacccaactttttttttctccaagaatattttggagagtgatcatgtatttacatgcctctctcacgtcttagactaaagctttgtgaacttttgttgcaaagaatcactgggacgctttaagaatatagctccctggggttccaccctcagaatgagtctggggtggggcctaggaatctgcactgacaagcatttcaggggcgtctgccacaggttctgaggaccacactctgggaagaccgcactggagtgagggcctcctcagagctgggatggtttcctgttcattttgtatttccagtgtccggatataatcggcaatgatggggtgttgttgaataaatgagtgaatgatgattctccaagtagattgtcctactgagaaggggatattttaaagcattggcttcctagttcctaagtcagtgtcttctgaatttgaagaagataattagcctcctagaacttgctcattcctgaatgatctggcagagctgggagcagatccatctacgtgagtgatatccagtccccagtagcccacgcacacaaccatcctcacagagatagggccgttgctgaggacagaggctgagcagatgccggtgcggggttgctccccagtaacaatagtcctagccctgctctttgtggttcagagttggttgatgggaaatcaaggagcagccctgccaccgtctttgttatttttatgcgctatagatcccttagaacagaaagaggttcaggccttttcttggatggaaaaactgaaaaaaactcagttgtttttttttttttttttgtaaatttgctctaaaggaaactcataaagttcttctgaatttacatgtcaataaaacatttacccctgagttgatgccttataaatggtatcacttatcctaagtagaatagatttattcagctaaactttgttgatgagcatctttgcatctgttccttagatattatttctctgtctccttccctgggtctttatggtctactagccccrtagcatcctggagtctgcggtcatttttctcaccaagtttgggggagcacctaccctttaccatggggagaatggtgatggttcatttttgggttttctaaacgaattttggacaattagactgcattacatttgcattttatagtgtgccatttaaatgaattttggacaattagactgcattacatttgcattttatagtgtgccatttagaagagacggagagggcccagaggacggtgccacattcacgtattagacgatagctcaagttgcccattcttcatattgaaattgcttctaagataacataatggctcttgtgaaacatatctattcattgccccaataaaacattagatggttatccagatggtgaaatgactctatattcactttaaattaatgaatggttaatttccatagggtgggactgagagcagccccacactgtgcctctgtggttagggcagtggggctggatcaagctagcaggtgtttaattacttctcaacaacaaaacatcttaacatataatataatagaaataactgggaatttttttattatgacaaaaaccactgattttcctgctttcattccctttatggatgcaatgtggcccttttaccagatcctcatggtaattttaggtctctgggaatgtttagcacctcacagtgtattatattttttaatgttatatcgctttctgaaaatagaagtatgtgctactttttcctgaaaatactgccttttcatagttatattcaagtctttcaaatctgcatgactgaataggagtttgggggtcaggcagactgcaagctcgccacctggcgggaccagttcttcaccggagagtcctggggttgggcagggccacaaacaatgagccacagtaggaccgaggggatggtctgggactcaagggtccccgagggtggttttgtttctgggctgccctctcccagggcaacattgaactgtaccttggatcagcaccgcacctgcctatctttctaattgcttttctcctcctgtcctggaaacgatagtacttcagatacttgggggaagtcttgcttactgtggcatgaacctagaaggaaatgacttcgtgttttaagggatgtcattgtcagtgtctggaatacctcgggcatagccatgtgctcagatgatctgagtctcttgcacacccctctgaagagtttcttgtaatcatgaggaatgaatgtattaggtgctccagaactgtttctatgtaataaggaaaaataaaaaaggaggacagaaattcttgcagaaaatactagatagaacctgggctgagtgctgtggaggatacaaagaaagaaaagacactgtccctatgcttaagacatttaccatccagttggcaaagtcagccggtgcrcacacacacagcaagtgcccgagcactgcaggagagccgcagaccccagcccacaacagctggcaggctggggacatgttgctgagtgctgagctgtgttgtaggcagctgcctactaaaaataagcactgggttcatggaaggctgacttaaattagactggactcaaggtcatgcacagaatgatgtcaccatcacaggcttctagttctttgtgttcttgggaattggaggttgagtgacaggcagccaggaactgaaatgcacacatggacaggttcactaatggtgcggcccgagcgtgtcctggcagcaagaggatggagtctagtggtgccctggttcattccacgggactgagaagggggagtaggaggcagctcaccgtttcctggggtggtggagtcaagactatgtcttcagtgaagggtgggacggggtgggtgcagcggagggctcagtcctctgatacagaggacagggctgagaggacagtgctctgaccgggttcatggtrcagagtgttagaggagtgtcatgggagctttgaaccctgacctcaatgccagcccagggagctgggccctggtcactgcatccccagcaccaataggacccacccactacagaggagatgctcaacacatacttgccaaatgaccgtattaatgaactggactctggcaactgggttttatcctgtaggtgagatgtggaagattggacagggaaatggcatttggcagcaggtatcctgtggacttttctccttgacatcaaaacttcctgtcctgagtctcattttatttgtcaaactagccagtctgagaagtcaatactaggtgctaatgaaaaacagcagcagactgtgacattgctcccaggtatgttagcattttaacacgagcctgcaaattgtttttttgttttgttttggtttggtttttttgtttgtttttgagatgcagtctttctctgtcacccaggctggagtgcaatggctctctgcaacctctgcttcccaggttcaagagattctcctgcctcagcctcctgagtagctgggattacaggcacctgccaccacacccggctcatttttgtatttttagtagagacggagtttcaccatgttagccaggctggtctcaaacaccagacctcaggtgatcctcctgcctaggcctcccaaagtgctgagattacagatgtgagccactgcgcccggccttcaaattgttaccaggtgtctgggagggcagcagtcatgcaaggcgggggattgggcaggcatgcattctggttggagaatccactaggtctcctgaatgactccattaggaaccgtatccagcttctgttgtcaggcagaccttagttggcttccaccttgacagtcaagatacatacagctttggttgggcacggtggctcatgcctgtaatctcagcactttgggaggctgaggcgggtggatcacctgaggtcagggagttcaagaccagcctgtccaacatggtgaaaccccatctctactaaaaaaatacaaaaattagccaggtgtggtggtgatcccagctattcgggaggctgaggcacaagaatcgctttaacctgggaggcagaggttgcagtgagcctagatcgtgctactgcactccagcctgggcgacagagcaagaatccattaaaaaaaaaaaaaaaagatacataaagatacatacagcttcctgctgtttcatctcctccctggtgtagcctggagaatttcaaattcacggaggtctgaacagcggggtttcctgtgcccccatcgtcttccatccccaatggggctctgtccctcggctgtggctatctgagatcccaactaagtccttaaaagtgaccttgataaaactggcagtgcttccttactgtgtgaggaataacttgaaataaaacctgtgcattgtcatgatgcttttactgttctgtagctttctttttcactgtttttttgttttgttttgttttcttttcttttgtttttaagcaaagcaaatcagatggacttgtgttgctctctgatcaccgacatagcagtctgtagctgcttcatcacgatcactagactggggtagtgataatcctagatactgcctgcacagggagcacgtcccggtcactgctgtcccagagacacatttccctgtccctggatgaccaagagccgactgggtttcctcggaactttctcctttgaccctgccctgtggtgtactccctcttaagatattattgacaagtctagaggaaagccttgactcatttgaaacttttaagagactcctgctacttaacacctccaggctgaagcaagcagctggcagtctgtcttgattttacagcgttcagagggcctgtgggcttaaggttcgcatttggcagcagcctgtgttatttttggattttcaacatggagctcaggacacatcagatttcacttcctaggctgttgatggccacagagccatggtagccgtccgtctctgtcagggcttgtcacttgcccctttaggaacatagctattaatactctctcacttgatttgtcccacttcaagaggctagaactttgatgtcccttttttctgccctacccttcttgactatattttaaaattcagaaacatcaactctggtctgccctagtctgccttgttggcttaggatcagtcctttggccccgggtggatgagtctcctggggtgccccgtagactggagggtggtctctcatcatctgtgattgtgggatattgggcatcagttaattatcatgcagacttgggaagtgggaggaaggggcttttcggtgtatttggtgacagaacatgtctcagccaagggrcagggactgccagttgccacccagatacactcccttgctccttaggctgtagccccaattttacttagggttgcagtatacccagcctaaaagcatttctcaatttcccttgctgccagatggggctgcgtgatgccattctggcagtggctaagtaatgaagctgtggggtgggccttctgggcagggtgcctcgaaggaactgactccatcagggggtgtgcttctgtgtcctcccagtggccctgctgctcaggacgtgctgcttggcactaaggacaccatgttgaatcataaggtggctgaagacagaaggatgtgctgagatgaccgaggagcaggatagaaagagtgtggatctgttttcaagattttaaaaattaacctttttattttgagataattgtagattcacaggcagtggtaataagtgatacagggagatgcccatctattatttatctatttatctatttatttatttatttcaagatggagtctcattctgtctcctgggctggagtctcactctgtctcctgagctggagtgcagtggtgtgatctcagctcactgcagcctccgcctccccagttcaagtgattctcctgtctcagcctcctgagtagctgggattacaggcacgggccaccacgctcagctaatttttgtatttttagtagagacggggtttcaccatgttggccagcctggtctcgaactcctgacctccattgatctgcccgcctcggcctcccaaagttttacaggattacaggcgtatgccaccgtgcccagcctgcccatctattctttacccactttcccccatagtaacatagtaccacagcatggctgggaccttgactttgatacagttaaggtagcaggacaggacctctcaccgtgcacctctgcatggcacaccacagagtgcacatccatttccccccggcccacccgccccaacatctagaaactgctgatctgttagagcctggatctcgatgaaggcagagcctgtatcccagccctaaaccactctccttggcatgaacttcgattgattgaaagacataaatatctaaattaatggtgccatgtcattttaaaaaagtgttatagagtcaaacctatcccttaactgagacagtagaggtccagaaaaggagaccaggcaatcactattacattgggggaaatattatacctgtggtttcaaagaagcaggacaccttggctacatggcgaaaggattaggggttgttgctttcacaacattccattgcatttcccctcctcgcagcggtgaccctggcttgtgtgaggtgcttttgaatgtttttattcctatcttatttgggtattatcaataattcattttaaatattctggctgctacaaacatttactttagaaggatttattgtatcctaaagtctgcatttatgatttcttgagatgatatcacttccttggggatttcagttctgattctcagaaagagattagtgggggaagcggaatttgatgttcagaaatgttccagaaacttggctgcaatgcgtcaggcctgctaggcgggctgccacattcctgggcctgtctcagccggccgctcatgctgtgtctccccttttaggagctggagtcagagaggacgtgtttctcgtttggcaagagatggaggaagcctgcagcacgctggcccagatccagaggctggtggccgagcctcccaagcccgacgtggccactgtggactgcggttggtgctatttctggtcactggtgtaaaagattcataaatgttactagctggggaccaggggctgcttccatgttcctgaccagagaagctccagagcccagctgcgaggggctgctgaggagagcagccagagctgtgtggggtgaggggtggggagggggctgaacacacatgcatggacatgtgtgtgtgtgtgtgcccacgtgctcacatgtgtgcatatgtggagattgtcagtacccagagctggacagtaaagtggtaaaaacagatgcttgggccgggcgcggtggctcacacctgttaccccagcactttgggaggccgaggcgggtggatcacgaggtcaggagatcgagaccatcctggccaacatggtgaaaccccgtctctactgaaaatacaaaaattagctgggtgtggtggcccgtgcctgtaatcccagctactcaggaggctgaggcaggagaatggcttgaacccgggaggcagagatcgcagtgagccgagatcgtgccactgcactccagcctagcaatggagagagactctgtctcaraaacaacaacaacaacaacaataacaataacaaaacagattcttgacaaactcttgtatactaaggaaaaccagacctctgtataaaactgggctcaattctgagtacaacatggacaagtggggattcatagccaaggtcagggggacgccagtggatggaaaattattaagaggagatgttaagggcaggggggcttctcgctaaaccaacttgacaggattctttcaggagagaggccagtgtgatcagatgtcgcctgggggacggtgggaacgaggatgtggatcagatagcaaagcgatcagatactgagggtggggcattctggctacactgacttaggctttttgctaaaatcaggcgatgcagagatgagcatagaagtgcaaaggttgaggcctcgctgagaagagcattcagaggagcctggctgaaggctgggcaaggggagactgtcgagttgccggtgctcttccagggaggaggagcaggagagctcagtgatcggctcggccagccttgacccttgcctgcagacaaaatcccatccacgctgtctgtgtctgtgcaggcaaccatctgacttgctctcagatgcctacaggaaggcctaaatcagttttctttgagcagggtccaggaccttgcggcagaaggggacacaggctggggaaaaagtgtggaatgtttacttggaaggagtagtgtgaatgggggtttgagttattaatattaaaaagaaattattaaaatccagttgcatttctgatattcacctaacactcttctatctaatttggaatagccacttgaaactttggagtttggaagactgatttgcattccctaaatggtagtaacagcaatatgaccactgaatgggcacatactatgtgtcaggtgctgccctgaggggtaggcctatatttagctcatttaagcctcataactctatgagggagtttcttattatctccaactgacaggtgaggaaactgaattacagagcgattaagtcattggccatggtcacatagctagcaaacgtagtctgattttgaacccaaaatgcagaacagcaactttcctgcctaaacttttacaaaaaaatattagcagtgaggctgtactcatcttgatgttggtttccatgatttaattagcacctaccctattctgagtaaatgaaagcacttcttggtgtttgatgggttccagccccacaactgcaccatacaaacaacctcactgcatttttactagtgaaagacattgagactacasaaaatattttctccctttttttcttataaaccaaagcatttttcataacaatggacatgagtttgggggtgagaaagacctggttataaatcccagctccatcactagacccacctgagtttgtctcttttagccttattcttctgcacaacgactatcataatcttgatgctgaggaaccactgtacagacaaaatacaatgatgcatgctccacaccaagcagggacttgatgtcagcgcattctttgccctttcacaattaggggagttggtacacggattctcctgcatggcctttcctctgtaaggtgctggtttcctttggggcacacctggtggacgcacataccttacacatcaggcactgtttaaggctccttatgagcgttagctcatttcatatttgctacaatcttaagagacaggtgctactgctagtattatctccgttttggcttcagtaacttgcccaaggctacacagctaatgagatgatgaagcctagattcaaaacctagtccaccagtaaaaatactgatatctgcttcccacccacyggacatgtaatcaggatgtctgattaaatcatcctgatttaatccctatgggatgacattgggacttttgaaagctccccgggtgatcctagtgtgcagctaattttggaaccactgccaggctgcagtgcctcctgggttacagaggtgcagagggcagagggcagggaggtcaggccggctgggaaagggatgcagttagaggagaaatggggatggggacttgtgtagagggagagagaggttgaggcatgggcaagcctgctgtgtgacttgataaattcctggtgactgtggctttttcctgtgactgggtgtcctgacctgggcttagggcactggttgctgtggttgcattgccagggttggctccctgggtgttcctgagagggacctaataggcttgtctggaggagctgctcacatgtagtgacacccactcgaaaacccagatggtcccctgtcatcctgcagatgaacaaaatgaacaccaagcaggggacccaggccaaacccagcacctccgcccggcaaagagaatggggagcctgctgctaaggcatttgtttcggggagtgtgtggcctgaattgtgcccccccagttcatacaatgaagcccccatcatgagactgtatttggagacagggtctttaaaaaggtaattaagggaccaggtatggtggctcacgcctgtaatcccagcactttgggaggccaaggagggtggatcacctgaggtcggcagttcgagaccagcctggtcaacatggcaaaaccccatctctaccaaaaatacaaaaattagccaggtgtggtggcgcatgcctttaatcccagccactcaggaggctgagacaccagaatcacttgaacccaggaggtggaggtggcagtgagcagagattgccccattgcactccggtctgggcaacagagcgagactctgtctcaaaacaaacaaacaaacaaacaacaaaatggtaattaaggttaaatgaggtcataaaaggagggccctaatctgataggattggtgtctttataagaatagggagagacacctgcgagccctctccccagaagcacatggaggaaaggtcgtgtgcagcacagagagaaggtggccgtctcctagccgggaagaacagcctcatcagaaaccagcgttgctggcaccttcatcctggacttccaacctcagagagaaaataaatgtctgtcctttaagccccccagcctctggtgttttgtgatggcagcccaagctgactaatacaaggcgtatttaagtttggtgtggttagtcttaagagttaacagaaggtcttggatgttattcctaaaggaaacagatgagttataagcctcagatactgggcaatgatgtatcagttccctttgttttaatctaatacacacacacacacacacacacacacacacacacacactcaaactaaaacccaaaataactctatgcagaaattttcaaaaaattctttgaatgtaccatctctattgaaaaaggaaagtttggctgggacctttcatcactggctagccatctcagctttcgtagcttcaatctggccctctataccacgtgtccgacctgctctcattcccaccgcagcccagagttactgaggcaaaggctgggtcagttcaagactggcttggaaggcctcctaggaaggcagcagctgttcccctaagctggctgctcagggcctgcagaccccaggagagatggtggccagcgggacagggaaggggcggattggaggagatctagcaagctgccattccgcacactggttcgaggtcacctggcacatacaggtccatagtaccaggagggcagtttctgggagaaatgtctcatgagtctggtgcctgggatgaaaagaaggtgagaagaaggtgaggccactgatagtttttttttaacctcttttaattaccaagagcaggacgtgagagttccctggaaaaaaaaaactgacaaaaatgtatgaatcaatggtttgtaggatgctgaacactaagaatgaaggccagtgatttctgacatacagggccaaagaaaggtgagctctagctttccctcgcttactgccttgagagagtttccaggccctggcgcacagaggaggaacgtaggtggagcccagaaaacatcctgagtttgggagactgagctgagggtctggagggaccaaggcagctacaattcacaggacaaagtaccagagaggagacagatgcacagagagagaagtccagacatctgcaaagggtccccctcaagaattcatttgaatactgatccgctcatgcctgtgagaaggttatctgagtctggggaaagggccattggaaagaattagaagaaacggggcttggaattcacacaggaccaagaacagtgcctgttytcatcagcctgaaagctttagaatccatgggtccctgggtagactacttggaaaggtcttgcctcagtcatggggaataattagctttaaattgagcactgctctgggccctcctaagaaatcattaaagcaagacatgaaaagaacaaactatttctaggtaacataactgcatctctgaacaaagctcaagaaaatttgtaagaacaaaagcatccagtacccaacaaggtcaaactcaaaatgattggcatctaatcaaagattacaaggcatgaaaagaagcagaaaaatgtcatccgtgataagtagaaacatcaatcaatcaaaactgactgagaactaacacagacattagaaatggcagaagagtcactcagagttataactgtattccatatgttcaaaagctaatacgaggcatatttaagtttggtgtagttagtcttaagagttaacagaaggtcttggatgttattcctaaaggaaacagatgagttatgagcctcagatattggacaattatgtatcagttccctttgtttcaatctaatacacacacatacacacacacacacacacacacacacacacacacaaactaaaacccaaaataactctaagcagaaattttcaaaaaattctttgaatgtcctatctctatttaaaaaggaaagtttggccgggacctttcatcattggctagccattcagctttcttaacttcaagaaagatatttaaaaagacgcatactgaacttttagagacaagaaagatatttaaaaagacacatactgaacttttagagacaagaaagatatttaaaaagacacatactgaacttttagagatgaaaacttaagagaagaaaatatgttagctggaaagcttactgaatggaatcaatagcagattagacatcgcaggaaaagagatgagtggacttgaagacagcaatagaaactatccaaaatgagacagacatatgaaaaaaagatttaaaaaaacccgaaagaagatctgtgaactgtgggacaatttcaagtggccaaatagacattagatgggattcctgcggggaggaagtagaagggacagggaacagaaaaatatttaaagaaatgtgttgacaagtttccaaatttgatgaaaactatagacccagagatccaagaagttcagtgaatgctaagcacaagaaaatgaggaaaactacacccagagacattttaattggtttgcttaaaatcagtaatacagaggaaatcttaaaagcagccagaacaacaacaaaaaagatatgtgcaaagccacaaagacgaggatgacagcagatttctcactcaaatgaaaagacggtggggcagcattttttctttcagtacatgaaacattcagcctggaattctatacaaagcaaaaatgtctttcaaaaacaaagacaaaataaaaacattttcagacatacaaaagctgaaataatttatcattggcacatattatacatgaagtgatgtaatagtacttgaagttagactatgataaattgaagatgtgtagtataaacctaagataaccactaaaataacaagacaagctgacaaaggaaataaaatggaattaaaaatacccaatccaaaacctgtcagaaaaaaaaaagaagaacaaagaacagatagggccaatagaaaacaaatagcaagatgataaacataaatctaaccatacgtatgtcaaaacttaccagtgtgtacactttaaaggtgtatgagatattatatgtcaattgtagctcaatacaactgttggtaaagtgaaagaagaggacaaagtagaagagaaggagagtcactcctctggcgctgagctgttcagagacgtgggtgggacacacctgggcattctgtgtgtgtgtgtgtgtgtgtgtgtgtgtgtgtgtgtgtgtgtgtgtcggtgtgcctgttctgggcatgaccctcaaacatgaagatggcttttctcacaaaacgttaaaggatttgtccaggctgggcatggtggctcacacctgtaatcccagcactttaggaggctgaggtaggcagatcacttcagcccaggagtttgagaccatcctgggcgacatggcaaaaccccgcctcaacaaaaaaaatgtgaaaattagccaggcatgatggtgcgcacctgtagtcccaactacttgggaggctgaggtgagagaatcgcttgagttgagaagtggggagtcgaggtggcagtgagtggtgatcgcaccactgcattccagcctgggtgacagagcgagactctgtctcaaaatgaatgaatggatgaatgaatcaatcaatcaatgaatagaatttgtccaaagcttgacccttctttgatgatgctgcctctcaaagcatttcaggaactcctcatttggaataaccttcacagccattttgtgactcagtagaaatcattagtcgaatcacattgtgtagtcatgctttaatcatgaacaaagacagtccaaaagattaccatctgagactcaagatttggctccaaatacttgcttgtttcaaaataccaaattcagtttcaaaagacaaggaaatggctgaaggttcattcaggctctgcaggcagttgcaacctacagtaggtctacaggagtttagagcacatattttttgaacaaatggagagggggatggtgcttattttcattagtattgtattaaataatcagcaagatgtctttatagtcctgggtggtgatgaagtacacagactcagagttaggaagattttttttttttttgagatggagtatatcgctctgtcaccaggctggagtgcagtgatgccacctcggctcactgcaacctctgcctcatgggttcaagtgattgtcctgcctcagcctcctgagtagctgggactacaggtgtgcgccaccatgcccaactaatttttgtattttcagtagagacgggatttcactgtgttggccaggatggtctctatctcttgccctcatgatccgcctgcctcagcctcccaaagtgctgggattacaggcgtgagccaccgtgcccgaccagaacaatattaaacctggctctgcccactcctgttgtgtgatgctgggcaagacacttattatctgtgcttcagtttccgtatttgcaaaatgtgaatgataatgataatacctactccacggactgttaggaaagttacatcagaaaacacatgtaaaacacctagaaatgtgctgtcacatagttagaatgtaatgatggcttaagaaaagtttaatccactcgtctattctttcctttatttagtgcttactcaatgtagcactatggtaggtgatgatgtaatggtaaataagagacatggaacgggccctcataaagcaggacctacatgaaccatctcttgctccgtgaaggtagaaaatcggatgaacacaaatggggtatttacgattgaggaaaagtgggagcttctgagctattcccagggtcaaggaaaggtttcctgaggaaataactttggagcgtgtatctgagggttgaagaggtaagttaatgaggtgaaaagatgggagagagccgggagtgtatgccaggaagaagaatagcatatgcaaaggccccgaggcagaaaggagaacggcactttagaagaactgaaaagaggagtgtggctggagtgcagtgtccagtgatgagtctggagagggaagcagggacccgattgtgctggctctggaggccgcggtacaggggttcaccctcaatttcataccaatggccaactgctagaggattgtaagcaggggaatgctaagatcagatttacatttagaaaaaaaaaagatcactttggctacagggtgggaaacaagttggagatgaggggacaaacaggatgagggaagagaataaagatgttagtacagtgatggtggcatcctggacaagagtaggaggagcctgtgaaggtgataaatgggcaggtatgagggagactttgggtgctgaatcgacagtgaaagaggaaaagttcccttgtccccttgcaggatgtgtgatgggggagtggctcgcttctttagtgccctgctgctcaaacttctaggggagcatacagatgggcaggctgtggggtgccaaccccgtgccaatgtctaggagtgaatgtttacagctcctgcagccccaatgggcgtgtgttacagggtgctcttttagtttgctatctataggcagcttgtgttaaccagctcaatttgaccctctaccttgtcgcaaggacagaggctttctgtatcctgggttcttgccttggtgtaccagaagaatcggatcacacgtgggcttggagaatgagtgccaggttttattgagtggaattagctttcagcagataggggagctagaagggtgatggttttcccctggagtcaggcggcttggcagcctgggctctcctctgactgccccagccaaactctgcgtcattctgctggtcaggggcctgctggcatgccggtgcgttcctcccgacatccagccacctgtgtgttcctcctccgatatgctcctctcgatgtccagctgcttctgtctctgcacagaatgggggcgtgacaggccaggttggtcttgggaaatgcaacatttgggcaggaaaacagaaacgcatgtccccacctaggtccatgggggtggaaccctagccagggtccacacccttcctgtacccagcactttccttccccacttccatatcgtttaaagggaccagctcttcccttcccagcacttccgcatcaataggacttgggggtgggggagatggaggtgtcaaaagtaagctcctagatggatatggtgtcgtccactacactgagagaatgctggaggagaactgggtcagggtggggaatgacacattttgtttgaacctattgagactgaagaatccttgagagcccggtagagaaataaaggacgcaattgactatgtaggtggagaattcagatacactattggggtgaagtgaacattcttggtataaagataaatatagacatatcaagcaggaaccccatgtttctgaatctttgacccctagttttttggactctgatagccacagaggtgaacatatcatctgagttttctgttctgcaccaatgctagatgtttaataagtgtactagatgaagactattttaccaacaggatgacttgcaatttgagagcagaacaagctaatttacagagtacttgtacatgtttatcttttcaagagtgtcttccctttttgctcaaagaaggctgcagaagagatctggggcagggcgcagctggtttcttatgcaaccagaagcgaatgacacacttgtcaaagtgttcacacttcaggcaaggcaaaggataaaataatatttcttcccagaactcacattttcttcagaatgcctttatatatgtagagctctgtgtagagtcaagtgaactttgacaaggttgattgataagcaacaagtgagaatgccagaaaggaccaagactgtgcttactcaaatatgtattttccaatgggcactgagcttcgcattttccagacaaaaagcacacatggcaaacatttgcagaaaaataccatgtaattctcccatgattcaagattaattgctgaaaattttctccccaaatttgggagaattggtcgattagcattttgtagatgctatacatataacttgggaaagatactggaatgcgatacaggtatggtgaaatgtcaatgttaaaaatcatgttgttaaaaaatgactgtggagggctgggcgccagtggctcacgcctgtaatcccagtactttgggaggccgaggtgggtggatcacgaggtcaagagatggagaccattctggccaacactgtgaaatcccatctttactaaaaatacaaaaattagctgggtgtagtggcgggcgcctgtagtcccagctactcgggaggctgaggaaaggagaattgcttgaacttgggaggcggaggctgcagtgagcccagatcgcaccactgcactccagcctgggcgacagagcgagactctgtctcaaaagaaaaaaaaaaatgactgtggaaaagcacaacaaatctattgaggaattatatttcgtgtatttggacccctaattatggaaacaccaaaaatacctgggcaaaaatggcagagttaaggaccttcaaaacttctccttcatagaaggcataaggaccttatcagaatcaacctttttcataactctagaaattaacccaaggtgtgcagcaatctgggaagtgtttattcaagaaaaataattaaatctcagtaagaatagtgagctggtggcattttagctagtcctattcacattccccagctccagctcctcactaaccttaaaaacgaacagtttgtgatcacagtggaaaccacaggctcacagccactggagggggcaggatggggttggagttccttcaaagcttcatttccagataattctcattatgtgacctgttcactggctctctggaagaccccagttacaaagctttctttatttgacttcactcagttcttcctcagtgggaaaagccttttccctgggaaccgttgtcaaaaacaatgagaggtgattgattaattttgtggctgactaaggttgtagataacagtcaggacaaacaagaggtaaaccaaaacacttaagatgaaaaactggggaatgggatgtccattggtctttccaaagctctgaggtattcctgggaatctatcatgcatagcccaggcaggcacatgcacagggctgtgggcatgcccaggctatgcatatgttcaaaaaaagactcaggagggccctaagctctcatcttgggctgaccctgaggctctgcacaagcaggaagtaaaggctgagggagagttgttaactgctacagcatggaaagtgtggcctgatacacacacagctcctcagcaaggaatagtccaaaagatttaaggaaatctctgttcaattattagctgaccactgagttaactgagcagagactccagtggctacaaatgayaaagaatgcagattttacagaattcaggagtgataaacaaacaaccaccaaatcacaacaaactctgggcaggtgggagaatctgatttccagagttgctgcattttattatttaaaatgtccagttgtcaacaacaacaaaaatgaggcatgcaaagaaataaagtatggaccatacaaaggaaaaaaagcaatccataggaactgtccatgagggaattgtccatgaggaaactgtccatgtccaggaggaagcccagacattgaccttactagataaagatattaaataagcgattttaaatatgtcaaagaactacaggaaactatgtctaaagaacataggaagtataagaacactgtcttaccaattagagatatcaataatgagagaaattttatttaagaagcaaatagaaattctgtagttgaaaaaagttctggagtacaaagtattgaaatgaggaactgactagaggggttcaacaccccgatttgagaaagcagaacaaaccaatgaatttttagatagctcaattgaggttacccagtctgaagaacaaaaggaataaagaatgaaaaaaaccaaacagagtcttagagaccaatggcataccataaacataacaacatgtgaacaatgggagtccccaaaggatgggggagagagagaaagaatatttgaagatgtaagggctggaaactccctacatttgatgaaaacattaatttacccatccaagaagcaaaatggattccatgtaggataaaagacacccacacctagacacattataatcaagctgttgaaagcccgtggggtgctccagagaacatttacctgatctccacaatgaatccgtttggtagaatgttggtgggttaccatcctccatctccttcattccctcctccccatttcttggctcccctgcagtgccaggcagatatgcttattgcatggtactttagcaagtgtaggttgacagcaggtttagttagcaactgcagcaaagggcttgactgctcagagacgagcttctctctcacaccacactgtcgccacctggctcccggatctcagattgggatgggcttcatcttaccttcagagaacccacagcccttgcagctgctccatgctgaaccggctcacagggctgaaacctcactcatctcaccagcaggcgagaccacatttcttttcctgacagttgttatgtttctccctcctttcccagctgtcctcaattctggtttccttccttcttttctcccctcccttccttccttcctttcttctgtcctcccttccctccctccctcccttctatctttccctcctttcctccctccctccctcatcatcaccacttaacatgtgaatttcaggtcactcagtctaaatttccttaactccatcaatcctgtctcacttcctaatctcaattgttccatattataccaaacatctccctccctccctccctccttccttccttccttcccttcttcggtcttcccctccctcccttctttctcttcctccctccttccttctttccttctgccttccttttcagctaattcacagcattcttttcctgtaccactccccatgtggtggccaagagtttgttcattgtctcatggcacccatgatcacaggggttatggtctctcaaatacaagccctctaaaatgttctatgcagaaagactctggggctaaatagctttgggaatcttgcttgtggtaagccccactgcccattcccctaagaaagtcttacagaagtcctgtgatcaagaatcctttgaaactttcctttcaagctccccaaactttttgtctaaggagccctcttcctgagtagaagccactgacatgcagtggaagcagtttctgtgggacccactcttggaaacatcagacttggtctagagttccagtttattcatacgctgacagcccccctgaaaggcatgtggggctagcgtggcaggaatgaggtgccaggcaagtaacattcagtggaggaggctgggagaagagagttatggtggtgagaaatccctgatggctgtgagcccctctggagctgaacctggagggtgggtggatgagggacaggaagaggagtgggcactgatacctatgcccaatttatctatttgtgtgtggccctggctatagcagggatggttttcaaaagcattttcccagtaggtctttttcattgaaaaatgttctgagattgacaagtgggatggggaggacagggctggtcaattctgtggcatagatgtgctcccttctcataacagaaagaacatctttagcaatctgtcctgtggaataggaaagccatgtaatcaggattagctgtgagctcatacttctataataaatgaattctctgtgggtgagaattcatgtaacatttttaattaagataactgcagggaaaaggaaaggaccccttagtaagtgacgctagtgaatggatgatgcccttccctgcccctcccaggaaaatgagactcagccactaattggtgtaattagcactggaagttaaaagatttccctcctttttttttttctcctttctttagctttagagtgcctgggttctttggttttgattgcttggtcatcctttctttcctctatgaaagttcaggtggctctggcggcttgcctgaacccccttttcagatggtaattgggagcctgaatcctgccctcaggactgcaccgcctggtccactgtgaagttggagtcagaagttagtctctgactctttcaaaacccttgcgaggattggttcgaatgtgtttttaggaagttctgtggtacacttgaatttatacttgatagagggctcttaacttttttaaaagaaggcagcccaaaacagagcagaagggtataataaggtgtgtgttgctatggaaataattgaatgaaaatttaatttcctactgcacctattgatcaggaaaaaaaagggagaggagaaaaggaaaggtcttcctaagcagaaacacaatgaatgggaatataattaataataattgaagaaaatgtcaccccaagggtttctccaaggaggctgatctccctgacagaaatggcggcatcctctttttgctgcttctttgtgatgggagagagtgtgcaggcgaaccccagggactcggagctctgagaagcctctggcttgagctcccggagaagcgtgaaaaaatgttttgtgattcatggaaaagccagctccaggtgtcggggatgctgctctgaggggcttttgatgcaaggttggtttaaagttcaaaatccagaacaagcttctttgagaagtccccactctagtaggtttcagagtgaattctttcaatggtgttctattaaaattcaaggacatgggtctcatgaagcattaatgggcaggtcctttacacattatacagaaggaattggctctaacatgatttatgtcttcccatcttatcctaattctatatccccttaaatatagtaataggaaagcctgggtcatatttttgtttccctaacagtgagtgctactttttaattaatagtacttcacttgcatgtgtgtctgatggaagcatcagctgatggggttaccaagtcataactgagaagccctttccaccttaagccagtggcaaagcttggctgcacaatacagttgcctggggagctttgtaaaatcccaatgtccaggccacactcccaaaccagttaaaatagaatctagtggatgggactcaggcatcagtattttttttaaagctcctcaggggatgccactgtgaaaggttgagagccattaatgtaagtggagttaaacaaaactctatagcgctggtggacatcctacgtgatagttcatgttagaaaaaaacatttccctgccaggaaccccttctgcgtcttcgtagggctcccgtggtcccagtggggccaaaatctcagggtcctttctgccttccttccagtggtgtgcaaatgtttaacaacccactcccgggaatgaaaaaagccccgatgtgtagyatgtgctgatttccagattccataaatactcccaccatggtctctttcatcctaccaagcggccatcgcccagcatggagttgggagatgtgcacagccagctccagacaccagtgcctcctcagcttcacagttcctcacccctcctttgtgtccacccctgagtagctcattctcccttaggtgctgttccaagtttcgagtcatctggaaaaatagttttctgcttgtgtgatatgctggcttgtcccgctcaggtaacataacagagtcttctcagtgtagattacctctggaaaacaccacgagaatgtgcctgaggctggagatgtttaggcaattggcattgtgggttattcttttccctgtgaagctaaggtgagttgtcctagatagggcacatgaggtttctgagcctgcagggtggaaagccaggctgtgagtcaggacacactcaccaaggtaacaaaggggcttcaggggaggcagcctcctagccttcgcgagttgatcgcctccacctcatcacttctctttccaccacattacagagcattttcacgtgacctaccttccttcctttcttcctttctttctcttttttctctttcttttctttctttctttctcttcctttctttttctttctttcttctttctttttcttctctctctctctccttcctcccttcctccctccttcctttctctctttctttctctttcttttctttctttctttctttctttctttctttctttctttctttttctttctttctttctctctttttctttctttcttctctctccttcctccctccctctctctctttctttctctttcttctctctctctccttcctcccttcctccctccctcctttctctctttctctttctttccttcatctatctccttcctcccttcctccttccctccctttctattttctttctttttctttcttctctctctccttcctccctccctccttttctctctttctctctttctttctttctctctttctttctttcttttctttctttcttctgtctctctcctccctccctccctccctttctctctttctttcttttcttctctctctctctttctttctgtctttctttcattctttcctcttttttgatggagtcttgctctcttgcccaggctggagcgcagtggtgcattctcggctcaccgcaacctccgcctcccaggttgaagcagttctgcctcagcctcccaagtagttgggattacagacacctgccaccacacctggctaatttttgtatttttggtagagatgcggtttcrccatgttggccaggctggtgttaaactcctgacctcaggtgatccacctgccttggcctcccaaagtgttgggattattggcgtgagccaccatgcctggcctcacataacttttctcactggattgctgcagtttacctaggaaggccaagcaaatactgtcttccagctgcaggtgaagaatcctgcctaagctcagagaggtcaagtggagtgactcacccaagtttgagcaacttgctagaaggtgatggagccaggccttgaagccagagcttctgactccatccttacacatacatggctcctgacacacagccttggtctactggtcaccttcacccaggcatggggccagtcaactttggtagaggaggaagtgaaataaaaagtaaccctgctttgcagtcttttgaattattaggttggtgcaaaagtagtcgtggtttttgccattaaaagcctaataattctttgccagtcctgctttggaaagctgttttctgaaatgaaacatgggctttgtgtctaataaagaacacgttccaagttggtcaatattaagttgggggtgtaatatgaatggctcatgcwgtatgaatggctgacaagctgtgattctacagagtcagaaacaacctctgttgagattgcatcgaatccagaagacacctgggactctaagacatggctgcagaaatatggcttgaaggcccagaagctatccttgtatgatgtgcttgccgactgctctttccgccacgctgatggggttgtggatataaaagccaaaccggagaatgagtccgtgcagaccagtgcggtaggtgaagtgcactcctgggaggggctggggcctcccctcaagtcctgggtgggtgaggcctccatygggtcagaaggcaggggaaggggcagcagggagagaaaccagcttgggtttctgtgaagaacagggttcctctgtttccctcctcacccttctccaaagggcatctgtgggagtggagatcaaggctgggaatgagttctagacatcagtgagttgtacataagccaggggctgggtttggagaaatcaggcattatgagtttcagaattattcaacattatgcaaatagagaagccctttgttcccccatattgaatggaaaagagaaattgctggtgagtatgcccagcgcagcaggcgtttctgtggtcctcttgtattttccctcattattccagtgactagcagccagcatacagcgcaatcccagcaaataaggagtcagatcctccaaagggctataaccattaaaaactttgaaagctgcagttctattgtgggttttgtaggaatacagcttctcctagtgcctgactctggctcccaatgaaggacagtgctcgacagcagtgctgccttaactccagcatcatgcatatgagtcagtaggtccgaaatgtggctcaagaatttgcatccataacaacccccagatgatgctaacactgctggtccaggggccacaccttgagaagcagagaggtgtagaacaggaaccagaagacaaggtgtcaaaggtttagaagcatggaaagactaagaagtgtcccaatgtgaaatagaaatcaggataaaatgaacatggcagatttgcaaaaccaaaggcaggctctttcaggaggtggcaaagttccaggtacatgctgtgaagtgaacctaaaatgcaagcccagggcagacaggcaggtgacaggcgggtgaccgcagcccagaggagacacctgggaaagaaaatcaaggcccccccctcaaatgcagtgtcacctcatgtattcttgaaggctccgattcaaagtcagggtcattactgagatgttgtaactccagcagagggggaactccagtcctgttgccacttgttattaggctggccggccactgagccctacatgccctccatggaaagggcactgtccgtcggggctatgtgagccacaccatgttatgttcttgccccctcactgctgtgcatttatgacaaactgcaaggaagaaaatataaaaactgaattagaaaaatgcagaattgatgcacgacttgtttcctggcttaccctaggatgcagggtaattgctacagcgcagggaaaatctcatttgtgggtttcctcccccagcacagttttctggttttgtagacattattctgtaatgttcaggaaatcacacataactaaattttcattttaaaaataggccaggcatggtggcttacgtctgtaatcccagcactttgggaggccaaggcgggcagatcacttgaggtcaggagttcgtgaccagcctggccaacatggtgaaaccccatctctactaaaaatacaaaaattagccaggcatggtggcacgtgcctgtaatcccagctacttgggaggctgaggcagaacccgagaggtggagcttgcagtgagccaagattgcgccattgcactccagcctgggcggcagagggagactttgtctcaaaataaaataaaataaaaaatacattagattctggatatttcaaaatattaatccccatcaatttgaacatagcttactgcaaactgacaacaatgtagtatattcaagctagctctaatactgatcatctcctaactcattcttgtcaattttaaatgaaattttacaggatcactttgaataatttggcttacaagagggaattttacctcaatttttttgtgctagtcaactgtattatggtaaagattgagaattattaatatatagtacagctccctttttttttttttttttttttacaaatactgatgagaaagggacagttttatttttagtctttgggactacatactgaaactggattcacacctaaaattgtgatgtgtataaagtaggaagaaactaaggctgtgaaataggtagattatttagggttcccccagactcccactgggcaagaccccctaaatatttaacaataaaaactagtttataggaacagacccaggaaactcgttaacacagaaatgaatggctaaaaaggccttattatgtagcagttcaaagatgatgaacaactgggaggaggagacaaacatgcatttctaataagggaatttcaggccaagcctaagaacttgatatttcaggcatccctgaaatcacactgcatgcacggttgcttgagctcatgcacaaaaccaggcctgatgttcaaaaacccattcttgtctctttgtctatttttcaaacaaatatttatggagcccctgctatgtaccagttcatgtgatatggcggaaggcacactggatacggaacgagaagttctaggtataaatgctgcttctagtagttactgatgatgagatgttgaacaaatcatgtgacttctttgagcttcacccttcatatttgtgaaatgggtagtgtaaagtgcaaatttacaaatgcatgtctgagcacagtgcccggcacataggagatgccccacagatgttgccttcctttttttctgcactacaaacattgtgagtcagaattgagcatttatggaacgcttctatgctttatattcaaggtaaacatttgtgctctcagtttacacaggagaaaacagtcgcgggacctgtgagaggttaggtaactcgcttgagattgatcttgtggcagttggaggcagggtttgaacttgggtccactgggctttcacactgtgcttttcccattctgacacgctgctgcctgacacagaacctgcctctctgtggtgtatggtctggtggttttccatttggctgtgcatgaggcacactcgggaaatgccctttgatggggatgtggtgagcatgagagacaagacacctttctccttccatccttgcagggcagcggaggtgtccacctctgcctgccttgggagcataggacagatctcatcatgcccttcaacctctttccgccttttctggcttatctccatgcagttaactgtactggcagaaactggaggaaaacagccacaatgcaatgcctggtttcactgtaaattcatgcccgctcatgtcagtggatcttttgagctgcccagtagtctactgagtccactcgttctcaccagtcaccactggactcaggaattctcattgccatgcggctctgaacatcccttttctgaccccactccaccctctctgactcctaaaatccccccaccccgccctctgggcgcatcatcagcaaaccctgattgcttccaggcctctgaaacgttcccattggatgcttaccggggctcctctctgagaagccctccctgcagccctctggagtgggggctggtttctctcccattccctttggacctgtggacctggggtgggtggtggcctccttgctcctgttttctggttcttgaccttctctctccttcttcccacgtcatcagactgtgtcactgaagacatctcttgtggttgtcacttactaagctcaccctcgtcagtcctcgaagattatggggcttctctcttgctttcattggctccaacacctgctttagttcatagtgacttcagtcccatatggaggacccttccaataccccaacctctcatttcttttaccttctctttcccagtgacttcctccccaactccatctctaccactcctgccttaggcatgccctcagccttgtcattacaaataactgtgtaatcataagccacatcctcagttccaaactgtctgaccagcccccctgtctgaccaagtcatctgtaggttgtttattctcttgcgctattcccacccatctgtctcctccaccaggatataaaagttactgtttctaccacctcctctctgtcctctctatcctcccatgcatcctcaaccatttttcccttctcttaaactattgcactcacctggcaaaaccccagatttaaccctggctaatgccaactttccgtcttttctggcttatctccgtgcagttaactgtactggcagaaactggagaaaaacagccacgatatataatgcctggtttcactgtaaattcacgcccactaatgtcagtggatattttgtgctgcctagcagtccactcagcccctcactggctgtcctctcctcctgaaacacctagcaccttccgctccacgctcactccactcactctctgcaggtgagcttgcttcctgtgttgtgaacatcgacgggaatgtcatgagcttctgcctccacatctcagcccccagtgtctgccatctacctttatttctcccaggccgaattgtccttgtcctgtctaaggccattcactgcacagatacatggctgtctctccactcgtttattcactctccctttctacatcacagcctcctgttgcccttgtttccagataattcgcatcagcacacacacattctgccatttctcccatcttaaaaagttttttgatcccatatgtacctctggctgtgcccccacgcctctgctcctcttagaattcaattcctcagtcgagttgtatacgtttcctttctctgcttcttcaattctcctcccatgctcctgggagctgctgtcatcaggcagaaactcccccacttccacctctccaccaaaacccacgttttgcagggatctctgaattgctaaatccagggatccattctcagtctctttcttacttgacctttagtaagttgatctagttggtcacttccttgaatttttttttttttttttttgcagaatatacactgctggttatcctcccacctcgctggctgttcctctctcagtcttctttgtgacttctccttgtccttaacctgtcaatgccgaagcacctcgaggtgcagtgctctgatcgcttctctgtctacactcatttcctgggtggtctcctccagtcccatggcttttaatcccctgtgcatgccggccggcgccttcaaaatgtacccctccagccccgcggcctaccctgatctcccgactactgccgtgctacctggatgtctaataggcaccttgaacctgatacatcagatggtaaatctcgatctttcccattcaaagctgctcttccacaaccttcctcctatcaattgattgcaactccaccctttcmcgtcccggcctgaaaacctcagggtcattcctgactcctctcttttctcacatacacacatctgatctctcggtgaacgctgtcggttctgttttcagaaygtgcctgtcattcaggatctggccacttcttaccatggtcttggctgcccggggccatgcaactccatgaccttctggctctttgcttctgcccttggtcctcggccgtccagtctgctttacagagtaaccactgtaaagctgtgaaaccctaaatcagacatgttgctgctctcgtgaaagccctgggaagagtcctttttcactcagagcaaaagccagctcatttccgacagctgtcaggctttacgggacctgctcctggccctcctcttcgtgtgtcccggcttctctcactctctcttccctctctctctttcctttggcaatattggccttcctaaaattcgacaagcatgccaggtggactcccagctcaggcctttgctctcgctgcatcctctgacctcctcccagcctcgctatggccacactctgttccgccaggccttctctcctagctcactgtctctgggaggctttccctgcgaggttctaacttgtccggtctctcccctctttctctgctctctgctcttcctccttgccttcctccacgtgtcatcctctgacctgatgtgtcatgatttgcttattactgggctcccctcctgcactgtgagctccatgaaggcaggggtttggtcattgtgtgtgtttgtattcctggtgtcttagaaggtctcctaagaggaggagcgccggttgagtgcctgtgggccaagtcatggaggtccactgaggagggctcgctccgtctgtctcagtggagggcgctagatgtgcagtggggttcttggtgggaaaagaggattcatgagaatctcagtcctgcctcctccagaatggtctcgctggccgtctagtccactgtcgctctctcttctttaccaggactttccaggtccttactgtctcaacccagtgccagggactgagtatctaattctccacattgctatgtctctctctctctccctctccctctccgtctctgtgtctgtgtgtgtgtgtgtgtgtgtgtgtgtgtgtgtgtcggttgggggtgtctctatgctggaatcattagcttttctggggcacacatgtgatctcctgtatctttctggcctatgttcatgacatctagtgcagggctccataggaagcgggcagcggaacatatttggttgaactaacaaagraatgattgacggtagagtggagtgctaggagccacttgaatacgacagagcttaaggtgccatctggaggctcttctctttggacagtttctgagtggcttctgtcctttgtcatctccttaggagacgaacaagaagacagtccatgcaaaatattgcagcaggtttgtccatgctccctggaaggatgggagcttggtccacgtcaacattaccaaagagaagtgcaagtggtacagtgagagaatccacacagccctggcccggatccgaaggaggttggtgttatttgcaggaagttacaagtggtctcctcgctctggacattctcatctgcttgatcttttttcctcccttttatttttagttgacacataatgattgtacctatttatgtgatacagagtgatatttaggtgtgtgtatacaatgtacaaagatcaaatcagggtaactcacatatccatcacctcaaacacacgtcgtttctgtatgttgtgaacattcaaaattctctcatttagctttttaaaaatatacataaattatagctgaccatattgaccctccagagctgcagaataccagagcttgttcctcctatctagctaaacttttgtattcgctaaccaacctccctatcctctctccctacctttctcagtctctaatacagttctactcactacctctatctgctcagatatttttagctcccacatatgaatgagaacatgtggtatttatctttctgtgtctgacttaatttgcttaacataatgtcctgtaggctcatccatgctgctgcgaatgacagaattttattcttttgtatggtttagtagtactccatggtgtatatataccagtaaaagctcaactgagacaaagggccaacaaaacattgttaagtcaaggttgccatctgatggtttgctgatagccttgttaaaaaaaaggtgggggttgtttggattcagatcccagctgccttgatgccagtgcagtttattgaaaacagcaagccaacgtgtggctatcacactggtcacaccttgtggtaggaggctaaggaatgcttctgtttcatacctcacattcttttctaggccacacgtgtattgcccaatgtgttatacctttcttctgtactctttagctgcctctcacagattttgatatattgtatttcattttcaatcatttcagaatattttctaattttccccatcatttcttctttgactaaagggttatttagaaatgtgctgtttaggctgggcgcagtgattcacgcctgtaatcccagcaccttgggaggccaagggggtggatcatgaggtcaggagttcgagaccagcctggccaacatagtgaaaccctgtctctactaaagattcaaaaaattagctaggcatggtggcgggcacctgtagtcccagccgttcgggaggctgaggcaggagaatcgcttgaacccgggaggcggagcttgcagatcgcactactgcactccagcctaggtgacagtgcgattgtgttgtttacttcccaaatatttgtggattttcctgatagcttttgttactgatttctgttttaatttcactgtaaacagagaaatactgtgtgattcaattcttataattttattgggacctgttttgtagtacagattttggaaaaaaaaaatatggttttgttgggtggagtatactacaggtatcaattagctcaagttggttgagagtgtcattcaagtctttcatattattactgattttctctagttgttctataaattattgagaaaagagtgttgaaatctccaactgtagtctttaattctcatttcagttctgttttttcttcatgtattttgaggctctattaatagttgcatgtacatttaagattgttatgttctctcgatgaaccaacttttttgtaattatgaaatgtcccttttatatgtctggtaatattccttgctctgaaatttactttgatagcagtttaaccgccctacattatttttattattctttttttctatcatttcatctttacttgtctgcatcctgtatttaaatggatttcttacagacacaagatatataattatatatgagcattgttttattaatccaacctaacaatctttggcttttaattggagtgttaaaatcatttacatttaatgtgattattgatttgattggatttaaatctaagattttgctatttgttttctgttccctttttactggttttttgccttcttttgtttgagtattttttattattacattttatctccactattgtcttattagctctacctctttgttgtgttttgatgtgtgtgtgtggctatttaggatttacaatatttatcttatcagtcaccctacaaataatattatatcacttcatgtatattacaggaatcttacaactttcactcccacttacgccctttctattgttgtgcacttctgtgcatgcattacacaatacattctaaacagtcaattgtcttgtaactagattagaaactagagtagatgtattttatatttaaccacatacttgatatctctgttgctttttattcctttgtatgcatccacatttccatttggtatcattttttttccacctgaagaagtttcattcatatttctggtagtgcaggtctattggtgatgaatgrgctgtttcagtctgaaaaactctttaatttacctttattttcgaatgatgtgttggctaagcatagaattctggttttacagttctgtctttcagtactttgaaaatccttctccattgtctcctggtttgcatgatttatgataagaagtctcctgtcatatttttgtttgctcctctacacataatgwctttgatgctttttaaaatttctctgtttctagattttatcaattttattgtgatatacctgggtgtagttttctttatttttcttcttcttgggttctttgagcttcttggatctgtaggtgcactgtttcaatcaaaattaaaacattgtggtcatattttctcaaatattttttctgcctccccctctcttctccttcttctactttgattacacatatgttagactccttgatattgttccatgggccactaattatctctgatgaaaatgcttttgtcttttttctctctgagttaactttaaattgtttcctttgctttgtcttttgttccctaatcttttcttctcctaatgtctaatgtactattaataccatgcagtgtattttaaatttcagatattgtatctctctacaagttttatttgggtctatttaaatatcttccatttctctcctcattctgtttatactttacctttttgaccatatgggttatatttgcaatagctgtgtaacatccttttccrctaattctatcatctgtgtcattttgggatctgtttctgttgatcagtttttcttctggtttggatcgtattttcctgcttctttgtatgcctggtaattttttactggatgccaggcattttaactttacattatcaggtactagatttcattgtatttttatatatgttcttgatacagtcaagttacttgaaaccagtttgatctctctaggaattgcttttcagttatgttagaatagatctagggtcgcctttagcccagggctaatttggtcctgctaccgaggcaatactctttcaagaacgctacttgttgccccatatattaaggagattttcctactctggctggtagatgaactactcctagccatgtgtgagccctgaggggttgatcagcctactcctttggtgatttcttccttggcttcagtagtttcttcacatgcatgccttgatcattatttagccaaaatttcgaggacacccttctgcagatctctggagcatgctctctctccctttctcctgtgcagtagtgtcctttcaatattttgccattcaaattttagtttcttaggctttgctgaactctgagctcaattcaaatattttttccatactctttccttacctccaccccccaggctttgcttgcagctacgaatttcatttatttatatcctgtgatgggaacctgatcatggaccacagacgcagtccttctcacacagccaccagggccttggttattacagagctctggggctgcttgatgctgtccataagtttcattgaagcttcaggaatgtgctggcttcactagcttgacggcagtcagccagattagaagaacaaatagtctgaartcatagctgaggtcctcaaaatatcagatgactagaagtaatttatttttgactttggcacctttcatgtgcgtccgtgtgaagagaccaccaaacaggctttgtgtgagcaataaagcttttaatcacctgggtgcaggcgggctgagtctgaaaagagagtcagcaaagggagataaggttgggggcgttttataggatttgggtagataaaggaaaattacagtcaaagggggttgttctctggcgggcagagtgggggtcacaaggtgctcagtaggggagcttttgagccaggatgagccaggagaagaaatttcacaagacaacgtcatcagttaaggcaggaacaggccattttcacttcttttgtggtggaatgtcatcagttaaggcaggaaccagccatctggatgtgtatgtgtaggtcacaggggatatgatggcttagcttgggcccagaggcctgacagcacccacaatggatttatttttctgtcatactgattttcttagttttgttttacttggcttgatggtgggtagtgcatcctacagcccaaatgtaggattttytacagaaaaacctcaaagcgaatgatctactcacagaagattgggtataaacaacatagcgcagctctgtcctctgcagatgcatcgttaagttcttgggaagatgctcttgttgcctgcaggctctcaccattcactttcaacctacttcctgcctaggattaaatggctacaggatgggagtcaaagcctctttggaagattgcataatgattgcatctacattctcattgacacgtctcactcaatgaagagcaaactggacttggtgaaggacaagatcattcagttcatacaggttagatggaactgtcggttcatgcatttggggctttgtgtatcagatggttatgagcagtggataggggcttgttgctctaaaaaattcctaagaaagccaaattcagagaagtactcccttttgttagttaaagaatcatcagttctcttttgcaaatagaccctttctctggtggattctttctgtcacacatgagttgcttaagggagttgctatgttcattgtttcagattttctctgtcctgaaatctttggtatacacacacttccattgtcttccagaaactcctcatcttagcatttttaatttcaaatgtttattggggatgctgtgtaccctggtgcatgggaggcgtgcaggctggtgtttagaagctcccagttcttattctgcctgtgctgcctctgagctgtgtgaactgaagcaggttgcccaagtgccctaaatcctagtgtccacacctgtcaaatgacatcacagtaatgtgagtttgtagtattgatgtattattaaccatagaaataatagcggggagtgtttgagaaatacaaaatgcactttttttttttttttgagatggagtctcactgtgtcgtccagtctggagtgcagtggtgccaacccggctcactgcaagctccgcctcccgggttcacgccattctcctgtctcccaagtagctgggactacaggcgcctgccaccacgcccggctaatttttgtatttttagtagagacggggtttcaccgtgttagccaagatggtctcgatctcctgacctcgtgatccgcccgcctcggcctcccaaagtgctgggactacaggcgtgagccaccgtgcccagccaaaatgcactttttaatttaacaaagctctactggagaaatatgaacaagtgtataaagttgtaactgaataatggctttacctaaaagagaatgactgaaatgatgttgttttagatttcttttcttccagcatattgtatttggtgtgcttatttggtatatccttaatgttagtattaaaatcaatatttaatgtcacattatatatataaacttttacatatacgtgacatatataatgtatattcatataatcatatatacatttgtaaaggtcttaacacacaaactggataaattttatttaaatatcctttatactagataggatattctctattgaatataattttttgcttcttgaactgaaaatagagaccatcatgattaaaatatatcaaactgtggcctacccaaaccctttctaacatctgagtggttttatggttaaataatcattgtctcttttaggaacagctgaaatataaaagtaagtttaactttgtgaagtttgatggtcaagcagttgcttggcgggaacaacttgctgaagtcaatgaagataatttggaacaggctcagtcctggattagagacataaaggtaagttggagactaagctgggagaagcatcctaggagtctctcacctgtgtactgagttcattcacaggacagacattcctgagaggtgttttgcactctcaggatggaagtggcttagcatgtagacttttgttttgcttgcagtggtcacgttaatccaatctcattttgtcaatatcataaggtttagatgagcctcttattcttatctactcacagttctctatttccagctctgcccttggctcaggttgaagcccccttatgaaaacacatttcaaaacagagttttttttttgtactcagacattcagatttttttcttctgaaatttcattattgttgcaaacggtatattgcagccattcttatcaatgggctttgttcaaaagtaaggagcatgtggaaatacacagtacaatctgagtgtttaggactgaatgcaagaagagagctagggcaggagaatgtagtaagaaggtgaaatcatttcctcagaagtgactgcccttggcatttacacagactcctgggaaggattttccttgccctaaattttcttatcttgagcttatcttaattttttatagcatatagcattgcgaacttccaaatatttgagatatactacaattgagaccaagagttgttcttaaaaagtcaaatataggagctggacatcgtggtgcacacctgtagtcccagctccttgggaggctgaggtaggaggatcgtttgagcccagcaacttgagaccagcctgggcaacagagcaagtctccgtatcttttcttaaaaaggcaaatatgtatcagaaacatctttaaagtagtttagtgtctagtttagagtcttagatttgacagaaagtcacaaatagacattagcagatcattgagatgcaccagggctcccttgtgacttgtttttaaaactgggaggcgaaaatctgttctataagaaataataatgcctgtaagattttaatttaactgggcaccttatcctgggaaatagtgttgaattcatacccaacttgttaaatttccaggattaaccaatgaagttacttgtgacatacgttctgtccttttttttttctgtccttttatgacacaataataggaaataccttgttaactcagagcctactaatttagggtttatgataacaagatattatatatataatctcattgcataaaaacatcattgggttctgctttatataaaaatcactaatgaatagagtcagccatctattcagattttagccatttggctaaaaacacatattcctataaagcataattctgttctctttacaaattttcactgatgctcccttgctggcttgttgaatgtccaaaattcattttcaaaaggaccaaggataaagaaaatgtggcatatatacacaatggaatactacacagcttagaaaagaaggaaatcctgtcatttgcaaccaaataaatgaacctggaggacattatattaagtaaaataaaccaggcagagaaagaaaaaacaccacatgatctcacttatatgtagaatctaaaaatgttgaactcacagaagcagagagtagaatggtggttaccagagactaggagcagggtgctgggtggggatggggagatgttggtcaaagggtacgtagtttcagttagacaggaggaataagttctggagctctattgtacaacatggtaactatagttaataacaatgtattgtatacttgaaaattgtcaagagagtaaattttaagtgttctcaccactcaaaaatatgtcaggtgacagatttgttaattagcttggtttactcattccacaacatatacatatatcaaaacattacattgtataccatatatacaattttatttgtcaattaaaagtaaattaattttaaaaagataataaagaaagccaaattctattattctttcggctgatttggtccagtagtcaacccggtagcactcagggtggtctgagcctgctttgtgctgttgtcatgcagcagtaggtccccaaacaagcataggcgttcctaaggccagggagcacaagctgtggccgcgcctgcccagtagttgagcgggggagatggagggagcaggtgcaaaacaggtgccacccccagaccatgtttccccgggctctctctgtctgcctcttccccagctttgccaccatcttttcagcagtaggcttttcaacaaaagactattgagaatgggctcagagggaagagttgttctgtttaccatctggaatacacatttctgctgcccaaatcctgcaagagggttttgttttgcttttaacttttaaatttgcaataattttagacttacaaaaaagttgcaaaagtagtacggagcgttcacatttacccttcacctagctttctccaatgttcacctctaacatagccatggtataattataaaactaagacattcacatggctactatgagctaaattgcagactttattcagccttcatcagttttccactaatgttccttttatgttycaagatccagccaaggatctcacatgacatttagttgcaatgcctccttagtctcttccaatctgtgacagttcttcaatctcgccttgtcttttgtgaccttgacacttttgaagagtactattcagatcttctgtagaatgtccttaagtttgattttgtctaatgttttctcattattagattgggttatggatttgggggagggaatactcttcccagtggatcacctgaaggcacacatgatgctgatatgctctatgaccagcagtgtttactttgatcatttggttaaggtgacatctgccaggtttctcctccaaaagttaccatttttttccctttgtaaataataaaagttttggaggaggtgctctgaagctatgcaaatatcatttgttccttaagcttttgcccacaattttagccctcaatgtggatcatccttacaacaattattactgagctgaggtgattttatatttcctctattccttttacatttctatattggaattattctataaggaaaagatttccctytcccccttttacttattcatttatatatttatttcaatgtggactcatggaaatttattttattcttggagttataatctaatactatcattatttattttgttactttggccattgggaattcttttatgctgcctctaaatatttaaatatgcatccacctttttttccccctttagcatttcttgattttctgtcactataagatgttctatgatcatcttatattttcccagcctcagccctgaaatccaccactactccaaggaaccttggtttcttttgttacagaatggtatttagaaaccaagatctggacacctggttgtggttattgctaccggattgtatcactgcttttacgccctctcagtggacagagatagaaatatatatacatagaaaatatctatattatatattgatatatatgataatatctattaaatgtatatttctatagctactccatgtatccataaacatctatatttatttatctgtatatcagtctgtatttatattaaataagcaaacaaatcatgcgttcatactgatacctctaattccaacacagagcccagggttcatttgtaatgaacttatttgcaacttcttcaacaaggagaaacctgattctcattacctataacatatttacttatattttcaaccctactgtacatatagtttcgatattgctagttcatactctacaagaaacaaatttatcagctatagtgtttgtatacagctttttttttctgctttaactttacagtatccattcaaaaaactgtcttccaaagctgtgaagtcaggtaactttcttacccaatctctttagcgtgcttatgtcattcattagtgacacagttagactcattggttacagtctgcatttcaccttggtttcctccacatcctagttgaatcttattttaatttgcatgcagtaaaaaaaaaacactctttttggtgatagttcatggattttgataaatgcatagagtcatgtatctccaccacagtaccaaagggaccaattctatcactcccaaaatgtcctcatatgcccctttgtcaccaactccccctccctcctggtaaacactgctctgtttctctgtccttatagcttttccttttccagaatgtcatataaacaaaatcatacaatagaacttttgggttctagcttctttcacttaccaaaataacacttgacccctgcctgtaatcccagcactttgggaggccgaggcaggcggatcatgaggtcaggagatcaagaccatcctggctaacatggtgaaaccccgtctctactaaaaatacaaaaaaattagccaggtgtggtggtgtgcgcctgtagtaccagctactcgggaggctgaggcaggagaatggcgtgaatccaggaggcagagcttccagtgagccgagatggcgccactgcactccatcctgggcgacagcgcgagactccgtctcaaaaaaaaaaaaaaaattgagtttctggatataagaactttgtcagttcttataagttcgtccaacttatttcatgaatcaagagtttattcccttttattgataagtagtgtttttattaatgagtagtgctttattgatgagtatggaagcaaaactgtttacccattccttgttgaaggctatctgtgttatttcctgttttgggttttatacataaagctgcagtaaacatttgcctacagatttttgtgtgaaaaggtgttgagaactgtgaagggcctgagattttacctttcttgcaaactaatgtggatgccggcagaacaccaaggcttttgggtcagagacaaatgactttattacccacagcaaaagcagtaaccagagcatcagcattttcttgtactagctccctgagccccaatttccgcagggtgaaacaatgaggaccaggcgacacttgctcatgcattaggttgtgttaaaggagggggccctgaacttaagaaaaccaaatcttctataatggactgtgagcatgctggtccttcgctccagagttaggtattatctttatattggacaataagcatgcctactctttgctttgaagacagacagtatttctgttttccaaggctgttccctatatatacatcttgaaaagataaaccagagcagacagcacgtctgttgcaagatatgtagaaatacatgagacccatgggaaatggtttccaacaataagttttcacttcatttgaatataaataaatatctagaagtgagattgctggccagtatgctaagtgtatgtttaactttataagaaactgccaaactgtttcccaatgtggctgtaccgttttgcattcccgtcagtgatatatgagagttaccattactttacatcttctccagcttttgatgttgtcaggttgttttattttagacattctaatatggctgaaagatgtctcgtagtatcctattgtacttttaattgcatttacttaacactcgtcttttcatgcttattaggcatctgtatgtatgtcttctttggtgaaatatctgttcagatattttgcccattttttaattgagttgtttgttttcttaagattgagtttcttcaggctgggcgcggatatggataatagctggagtcaggccaggcacggtggctcacgcctgtaatcccagcactttgtgaggccgaggcaggcagatcatgaggtcaggagttcaagaccagcctggccaacatggtgaaaccccgtctctactaaaactacaaaaaataagccaggcgtggtggyaggtgcctatagtcccagctactcaggaggctgaggcaagagaatggcatgaacccaggaggctggagattgcagtgagctgagacgacgccactgcactccagcctaggtgatacagcaagactccatctcaaaaaaaaaaaaaaaaaaagactgactttcttcatgtattctgcacataaactttatcagacttacaatttgcaagtattttctcccaatctatggcttttcattcccttaatagggtttttcactgtgtataagtttttaattttgataaagtcgaagttgccaagttttctttacggattgtgcttttagacccatagctaaacacattgcagtcatgcaggttttctcatgttttcatcctcaaatgtaatggttttacattctgtgtttaagaatagggttcattttgagttcatttttgtataaggtgtgaggcaggatccagcactgtttgtctaagtaactattcctctctccgtggaattactattgcttcttgtcaaaaatcatttgactatatccgtgtgggtctatttttgtttcattgaactattaataggtgtctgttctttcaccaacatcacattgtctttattattgtgactttacactgagtcttgaaatcagccaacctgaatcctctagctttgtatttccttccaaatttttttggctgttatatagttcctttgacctgccttgtacatttcagaatcagttgttgaaatctacaaaacagtacactaggattttgattaagattcccttaagtctatagatcagattcaagagaattgacgtctaacactgtgtacctctaaatttatttgggtcttttttgttactattgtaaatagtactttttaaattataaattttaattctttattacaattgatttttgtatactgaccttatttcttttgaccttgctaatcttacttacctgctctaggaactttgttgtagattacttgggatttccaatgatgtcatgtatgaatagagatgattttattttttcctatccaacccgtatagtgtttatttctttctcttgccttaatgcactggctaagactttcagtatgatgtttaacaggagtggtgagagagaacatacttgccttggtcctgatattagaggggaaacattcaatctttcactattaaatactttgctagctgtgaggttttttgttttttttgtagatgtgctttatcttgttaaccaatttcccttctattcttggttttttgaggattgttaccataaacaaatattggattttgtaaatgtgttttctgcatctgttgagcttttgattttgatgaagccaagttgccaagttgtacttggcagatctgttgtctgttaatatggtgcactacgttgatttgtttttgaatattaaattggctttgcattctgggataatctccacttgttcaagatgtattatagattgaatatattctgcattaaatttgttaacctatcttgttgaggtttttttgtctatattcatgaggaatattggtttgcagattcttttcttagaaattgttgtctaattttggtatcaggaaatgctgacctcataatatgggttagaaaatattccatattctttttttctaaaaaaggttgtacagaattgatatgatttttccttaactgtttggtagaatttaccaatgaaaccatctgggcctctttttttgttagaagttttaaaactatgaattcaatttctttaacagatttaggactattcagattatctgtacctctgtgagttagttttggtcatttgtttcttagaaggaagcagcccatttcttccatagggttgaatttatgagcatagaattgctcacagcattcccttatcatttccttaatgtttgtgggatctgtagtgatgtttgatattggtaatttttgtctactgcctttttttcttggttagtttgaagagctttttttatttttcttttaattttgttaattttttcaagaaaccaactttttgtttctttgattttctaatttttaacaaatgttttaaattgtgttgattcctgctatctttattatttttctcctcctacttgctttgtttttttaaattaaatctccatttcttagatctaagaatttaatgatataaatgccacccccagctactgctttagctgttcccacaaattacgttttataactatttttgttcagttcgagatgtcatttctaaagacttggcctaatcttagatcctgaagatgttttccccgtgtccttttttctagaagttttataattttgtttgacatttaagtctatgatctgtttggaattaacgtttgcataaggtgtgagatctaggttgaggtttatttatttatttatttatttattttgagatggagtttcgctcttgtcgcccaggctggactgcagtggcatgatctcggctcactgcaacctccacctcccaggttcaagcgattctcctgcctcagcctccagagtagctaggcctacaggcatgtaccaccatgcctggctaatttttgtgtttttagtagagacggggtttctccatgttggccaggatgttctcgatttcctgactttgtgatctgcccgccttggcctcccaaagtgctgggattacaggcgtgagccaccacacccggccggtttatttatttttcgcctatgaatgtgcaattcttgtgacaccatttattgaaaaggctattcctcctctattgaattgtttttgctcatttgccaaaaatcagttgaatatgtctgcaggtctttgtatgggttccctgttctgttctattgttatatgtgttaatgtctccattaggaccacactttcttgatagctatagctgtatagtgagctttaagatcaagaacagctactcctactttacatttctttttttgaattgttttggctattcttgggcctttattttccatacaaaaattgaaaacaaacttctttatgcctattgaaaaccttgctgacatttggatagaaattgcattaaacctatagatctaattaggaagaattggcatctttattgtgttaattcatctattccatgaatacartatgtctctctgagtatttaggtctttgatttatttcatcagaattttataatttcagcatgcagctcttgtacctgtttaagtatatactaagtattgtaattttttggagcaattgtaagtggtattgcactttttattttggttttcacctatttgttgtcagtgtgtagaaacgcagttggttttcatgtgtggactttgcatcttttgaccttagtaggcttacgtactatttcgctttttgttttttgtgtatggtaagccctccatatctgcaagttctgtgtctgtggattcaaccaactatggattgaaaatatttgggaaaaataaatggtaaaaatcataacaatacaacaataaaatataatacaaaacttaaaagatataacaactacttatgtagaatttacattttgttagatatcataggtaatctggagattatttaaagtatacatgaggattgtataggttatgtgcaaatactatgccattttatacgatacttgagcatcctcagattttggtgtccatggggttgggagtggatcctggaaccagtcccccacagatactaagggacaactgtagttctcaggattttctatgtagataattgggtagtctgcaaatagacagtagtatttgtttgtttgttttttccaacctctatgacttattcctttgccttattgcagcggatagaacttccagtactacattgaataggtatgttgagagcagacatacttgcctttttcccaatcataaagggcaagaattcagtcttctcccattaagtatgatgttagctgcaagctttttgtacatgctctttatgagattgagaaagtttcattctattcctaatgtactgaatttttatactgaatgaaggttgcatttgccaaatccttttctgtgcaaattgatatgctcatatgattttttttccaaattttgaaccaactctgaatacatagaatgccacttggtcatgatgtattattcattttatacattgttggattaaatttgctaatatttgttgagaacttttgtgtctaggttcatgagagatgttggtctgtaggctttttgtgtgtgtgctgtctttgtctgctttgcgtatcagtgtaatactggcctcatagagtgagttgggaagtattccctccccttctatcttctggagtggattgtgtaaaacttgtgttaattctcctttgaatgtttgataaaattctctagtgcggccaggcacggtaggtcacatctgtaatcccagcactttgggaggccaaggcaggcaggatcacctgaagtcaggagttcaagaccagccaggccaacatgggaaaaccccgtctctacttaacatacaaaaactagccgggcatggtgacagatgcctgtaatcccagctacttgggaggctggggcaggagaatcacttgaacccagaagcagaggctgcagtgagctgagatggcgtcactgcactccagcctgggtgacagagagagactctgcctcaataaataaataaattaatgaattaattctctagtgcaaccatatggacacagatacttcttttcaggggctttttaattacaaattcaatttctttaataaccatagaactattcaggttgtcagtttcatcttggtagagttttggtagtttgtggtttttgaaaaagtgttcaattttttctaaactgtagaatttatgagcataaagtttttcataatattctcttattgtcctgtcagtgactgcaagagatgttgtaataggccctgttttgtacttgatgttggtaatatgtgtctttttaccttgcaaatcttgctagaagtttgtcaattttattgattctttttaacaaccagccttttgttttatcaattttctctattgttttactatttgaattttattaatttctgttctttattatttacttctttctgcctgctttgagtttattttgctcttgagtttatttttctaggttcttgaggtaggaacataaattatagttttggcatatttttattttattgtaagtaagcttttagtaccataaattttcctgccagaattatgttggtacatcccacaaattttaaacaaaacagcttaattttcattcagtactatttaatttttaattttctttgtgatttcacttttgggccatgaattattcaaagcatgttttaaaatttccaagtgtttgtggaaattttcatgttgtctttctgttattaatttctattttgattccactatagtcagagggcatactctgtatgatttcaaatcttttaaatttgttaaatgttgttctgtgactcaagatatggtctatttatgcacattttcaatgtttgtttgaaaagcatatgcagtcttttgttgggtggagtattctataaatctcaattagatctggttagttgatggtattgttcaattcctctccgtccttgctgattggttagttgttctgtcaatcattaagagcgggatattgggcaacactcagtctccacccaaactctaccatgttgagttctgtgggtcatgtctgctgcctcagcctccagggccttgcaggaactcagcccgtcagtgttgctactccaagctcaggtcttgccatgggccactctggcagcaatccaatctaccaggaaatatgggcacaaacatcacctttgctgaagacaggcaccaccactgggtgtattgtggtggtcattgatgcagtagtggatatccagtttgatgacggactaccatctattttaaatgcccagcaagtacaaggcagggagaccaggctggtttttgtggtgacccagcatttgggtgagagcacagtaaggattatgctatgaatggtacagaaggcttgtttagaggccagaaagtcctggattctggtgcaccaatcgaaagtcctgttggtcctgagactttgagcagaatcatgaacatcattggagagcctattgatgaaagcggtcccatcaaaatgaaacagtttgctcccatttatgttgaggctcctgagttcatggaaattagcgttgagcaagaaattctggtggctagtatcaaagttgtggatttcctcactccctagccaagagtggcaaaattgggctttttagtggtgttggagttgacaagattgtacccatcatggwgttaatcaataatgttgccaaagcccatggtgcttaatctgggtttgctggtgtttttgagaggacctgtaagggcaatgacttatattatgaaatgactgagtctggtgttgtcaacttaaaaaatgttacctccaaggtaatgctgatgtaaggtcagatgaatgaaccacatgctactcatgcccaggtagctctgactggactgactgtggctgaatacttcagagaccaagaagttcaagatgtactcctgtttattgataatatctttcacttcacccatgctggctcaagggtgtctgccttattgggcagaatcccttctgctgtgggctatcagcctaccctggccactgacatggtgggtatgatgtggggaaagaattgccactaccaagaggagatctatcacctctgtacaggctatgtacctgctgatgactcgactgcctctgctacttcctttgctcatttggatgccaccactgtgctgccccatgctgtcactgagctgggcatctatctacatgtggatcctctggactccatctctcacatcatggatcccaacattgttggcaatgagcataatgatgttgcccgtggggtgcaaaagattctgcatggctacaaatccctccatacgttattgtcataatccatattgggtatggattaactttctgaggaagacaagttgactgtgtcttgaatgtggataatacaacgtttcttgtctcagccattccaggctgctgaggtcatcacaggtcatatggggaagtcagtactcctgaaggagaccattaaaggatttcagcagattttgataggtgaacatgaccatctctcagaacgggccttcagtgatggaacccattgaagaaggtttggcagaagctgatacrctggctgaagagcacttattgtgaggggtctttttggcaaactaagcactcatctgctgtactgtccctctccttcccctaatccaaacagcttcaggtttcggtgtaagccacatgagaaccttgattgaaaacatgttctatctgaagagtatttaaggtttccaatacaatgtacacccctcagaaaaaaaagaatggtgtactgaagaccccaaccataagactctacctattttatctattacaactctattataaagtagataaaaatagatttatctatttttcttttcatctccatcaaattttgcttcatgtgttttgaagctctgttgtttgatgtatacacatttagggtcattgtcttcttggtggatagagaattttatcatcctaatgtccctttttgtccttagtaaattttctttgtgttaaagtctactttatataatattaatatacttatttttgctttttaaaawtaaatatttgcgtaatacgttttttccatccttttacctttaacctatctacgttgttatgcctgaagtgagtttcctgtagacagcataaatcgggtcatgtttttgttcactcttcaatctctgtcatgtaattggtatatgtaggtgatttatatgtaaagtaattattcatatttaaggattaagtgtctcattttatttatttattatttttgtgtgtctcctctgtttctcatttttctcttttgtcttgccttcctatgggttatttgagcatattttggtgtttcattttgatttatttacactgtttttgagtgtattgctttgtatacttttcttaatagttctatgtatttccttatacatatatgtaacttatcacagcctattgtgatgtaacttatcacagcctattggtggtttgctacttcaagttaagtgtagcaaccttacttctatttaggtccctttacactcaccatttaaaatatataattgtctgaagtatttcctttgcatgcattatatgccatcttagatggtgctaaacttctgcttcaatcataaaatgtaactaaagaaatccatggtgttaaggattatctattatgcttacttttatatttactcattccattgttcttttttctgaaagtccaggcttttttcttttctcgttctctttctatatggaaagctttcatgaatgcttctttaagggtaggtctccctgtaataaattcacatagttttccttctccttcaaccctggaggatattttccccagatagatgattcatggctggcagttattttctctcagcacttgaaaatgtggcgcctcttcctctggtctctatagtttcagatgagaaactgctgtcatttgaattggtgctcttttataggtaacgtgttatttctcttcagcttttttaggatttttctttgtttttagtttcagaaatttaaatacaatgtgtcttggtgtggctttctttggttttatcctgtttgggatttgcttagcttcttgaattgtagtttctgtatctttaaccaaatttgtttttttgtttgtttgtttgtttgtttttgagatggagtcttgtactgtcgcccaggctagagtgtggtggcgcgatctcggctcactgcaagctccacctcccaggttcatgccattctcctgcctcagcctcctgagtagctgggactacaggcacccaccaccacgccaggctaattttttgtatttttagtagagacagtgtttcaccatgttagccaggatgctctcgatctcctgacctcatgatctgctcgcctcagcctcccaaagtgctgggattacaggcgtgagccaccgcgcccaggcaaaatttggggtttttttcagtcattactttttaaatgctttttaagccccatactctttcccctcttttttctgaaactctagtggtatgaatagtattagctcttcctcattgttccagagatttctgaggctctgttggtattggcatcagtgggtttcttttctcattcgaatgtgatatttctggttcttggtataatgagtgatttttaaattatatcttagaccattcggttatcatgttagaagactttatttccacttatgtctgtttattcggcgcagtcgctgtgtttgggtgtagcatgtttgctctggcttacttctgtgggctttcgttccagtggcagtctcgttccctgagccatcttgtgctgctggggcccctcaattcctgtttggtgctgtctgcaggggtggaaggcatgtccctgggctgcctgctgttgctgggtgaccttctgggatggggagcagaccacagattaaaaatacaggaaatataagcccttagcctagtaagtactcaatagttgttgttttatgattaacattactcccatcgttttcctggcccctctcctcctatgggctttacagttatggaattacttgctgaatcctgaacaagaaaggagtctggagcgtgcagcatccttctgtggtttcctgcctatcctactcatcctttaagagtcttccctgctgtctcccctagaagatgtatttagcaactcactcagctagagtaagatgcatcctacgctgggcatgaacttttacagcttttggcacagtgttaggtcgtcatattctaggcatccaacaccatcctatgaacccccttcaaggcacagaattttgtctggttttgtaggttatgtctcagatctatcaaaatgtctggcacgtggtacttatgtgcttactaagtatctattgaaatgaaagggagtaaagctgatgaaggagccttaggtgagagcagctggatgggtcaggtcatggggttccccatcatggctgagtctgagaaagtcttaatgggagagtgcccatggtatatggtgaggcctgagatgccttgggtggggtgggggctggatgtgtgctggatctttgtcattccttaggctgtcagtctctgctcccttcttatcctgattcttgggatgggggcagagtctgttcacctgtggaagttgaagggtctggcctcgctttagctagggtgtgggtaatgtgacccaggcaccgtcagtcagaataacctcctaggctttgacttgagagattgtgactccagatggcaggtccagcagagacaaacttggcagtagtggcagatgcacaccgatgcagctcctggggtggcagtggcagtgagctctggtccatctcttgtcaatactcccagtgccagcgaggaaagccacagcatccagcgctctgcagtggaactgcagcggggcccccaccaggcagccctgcagcaggattgggggtctcgttcctgatgagaggtcccaacccaggttatcctgtccattggtgatgctgtgagccatsccaatgtcctttatcataaattccttcctgtttgaatcaaccacagttggttttcttgcttacaactgaagctggagtgatacaacggaactgagatgagggggatgttgaaggaggcttttggacagttcaaagtcctgtatctctactgatggtcccttggtaaggatcatttttgcatattaaggagagtacattccataaattaatatgtatctaaaaatccattcctttctatattgatgaagtatttaagagattttctaagtgtttactacgatttgagagattgctaaaaacagaacttgtcaggtaatgttagatatgcccacatgtacattgttagattgctaaggataccacactcacgtttaccaaatattgggtatcatgaataaatcctggtttgaaaccattatgatgccacagtgtatttaggctgcatgtttaagctctgttgacagacgagtgagcagtaactgagttagcatctcatgtagaaacacaaaaaaataaaattgcattaagagctctgtcaagacaggaaatccacagtcctgacttctagcagtccttggactgcccggaaagagacttttaggcataccctgcgatatgtttcttggaatcactggggttaaactattatctcaatgtaattatttatctttcatctcataggtactttttcttcttttttggaagcagaaaataaatacttgtttgtgaattcttttttgggattcaagtgtgtccttggtgtctcttttttccgtagattggaagctccacaaacaccctgagtgccctgaaaactgcttttgctgataaagaaacacaggcaatctaccttctgaccgatgggagacctgatcaggtacttaccagagctgggaacaaagagggcctcactgatgctctgaaagcaaatgctggaaatgggtctgggggaccttttcagctgccaccaaaaatctgtggacatatacttccttggcttagggactcagatctgaggtgagaaaatacactgaaagattcttttgtctctggaaactctgaggagaatttatgagacagtgaatgttgcctggtgagtgtgacacacacccctagcctggagaccagccccacaaaaggagacgtctgctgtccactgaagactggtttgcattttattacaaatgaaaagtgaggagattctttttgattttttttcctctagagactctgaatctaacatgtcactgcataatgtccttggctttacctctaaggcttagtactcatttaaacaaaaacatgcctttctagcgaaatgtcctttgttttgtttagcccgactggaaaatatttgaaaagctgtagaggagtctgttcatcttcttttgagctttgtgaatgaaagaggagtactccaggcattaaataaatagaaggattttcaggccagcgtaatgtaaattaacagctaaagtgaattagtgtcaactcgcgtccttccttgtgagatggtttgcatatgcagactgctaggcaaatattctaaaatatcctgtggcaaaaagttcagggcttaaagagagtaagcatctggattttactgcagctttagatttatgrcagaacgggagtgtgtaaagtgaaaatttatttaaaattttttttcctatcaacttcactgtgttttctctttggaagcagttcatcgtgtctctcttctgttccatgtgtggtgccagggtctgaggctataaagatgagtaacagctcatccctgcctttgggaagtttgtgctttggggaatgtgctagatgtatacagtttaatacaacacgggaacagggttgcctgtgctatgtctaggggcacagagtgatggattttgctgtacagatggagggaaggtcagggcaggttccagcgaggcggggacatttgagctgtgtctggaaagacaagaaggaatttttggaacagaagacactgttgatgtcctgggcagaagggacacagaggtgtggaaatatgtggggggctcagagaaaaaagctgaggacaggggcaacggaagaagatcagggtggaggtgaaaaacgttgggttgaggaagactgtggaagtcctcgaatgccatattagaagggtggtgtcaccacagagaggaactctcggaggagccgcccaccctacccatctgcatctcagaaacatgcctcagttgtgccaagraaaggctggcgctgccatggcctgctgctgggtccttgatgaaagctgggaaggacctagccttgggtgggagcagcaggaatgggaggaggggactgcctccagacgtgagccgcaggaagcagcatcaacaggacctcatggccagtttggaaacagtgagtgagaggtgaggagaaggtaggagcaaggcagaaaggagtcaggatgactgattcctggtttacaatgattttgatattaacggattgaaatgcagatttcaagaagaggcaagtaggcttgggggtggctggtggaggaagctgtgtttgcgaacctctagggagtgcatgggtgtctagaagtccctagaaatatggagctggagttaggggacagtgtgggctgaagattccgacttgagagacatctaggcaagtcaaggtgtatttttctttttaatatactcttactgatttttaaaattgtttacactatggacaacttggaaaacacagataagcattaaaaaggagaaaatgtggttgggtggggaggcccactcctgtaatctcaacactttggtaggctgaggcaggaggattgcttgagcccaggagttcaagaccagcctggacaacatattgagaccctgtctctacaaaaaactttaaaattagctcagtgtggtggtgtgcacctgtagtcctagctactcagaaggctgaagtagggggatcatttgaaaccaggagttcaaggatgcagtgagctatgatcgtgctactgcactccagcctgggcaacagagcgagtccctgtctctaagaaaaaaacaaaaaaaaaagcaaaacacaaaaaaaacaaaaaaaagaggaaaaaatttgaatcactcataattgaattttgtgggtttttttcccatctaacatatcacatgcattgttccaagtcatcaaaaattcttcaggagcatccttctcaatgactgcatcacattctgttatatgaatttaataaaacttgtaccttaaagctatttttgtttaaattttgaatagtaatgtgttctaatgcattcttttctaccttcgtagaaaagcataggtagagaaaattctccctctcacccctttcaccagctaggaggcaactgatggaactagtttttttgtatctcctttcagagatggtttctgttatacagcaaaaatgtattcatatatatttcatcttttttaaaaaaacaactgttagcctattatacacatgattctgcacctttattcgtcaaacagtataccttggagatggcttcatatcatttcataaagagcgtcctcattctcttctaggttccatcacatggctatcccatcacttatttagctagtcccctgcagatacgcagtcggattgtttttgagctttctgatttacacaatcttgccaaaggaactctgtgcatatattggtttgcctgtgagtgagtatatctgtacgtgtaaattctgagaagtggactcagctgcaaggtccatgttttgattgatactgccgaatagcagcccccaaagaggatgtcacaagcaacattcccgcaagcagggtattgacaagaattcttgatctacagtccagtacggacttctgaggctctggaatctcccaataatatgtataaaaatacactcaaaatttttgttttcttgagagaagatcgatatattttaccakattctgaaggtctactcaaagatggagaatcaaggatatggataatagctggagttaggccaggcgcggtggctcatgcctgtaatcccagcactttgggaggccgaggtgagttggatcacaaggtcaggagatcaagaccatcccggctaacacggtgaaaccccgtctctactaaaaatacaaaaattagctgggcctggtggcgtgcgcctgtagtcccagctgctggggaggctgaggcagaagaatggtgtgaacccgggagttgaagcttgcagtgagccgagatcgcgccactgcactctagcccgggcgacagagcgagactccatctaaaaaaaaaaacaaaaaacaaaaaacaaaaaagatggagtcagaaatgtgcaaattaccccaaacataatttcgaaactctttttttcttttctttgagacagagtctggctctgtcgcccaggctagagtgtagtggcgcaatctcggctcactgcaagctccacctcccgggttcacgccattctcctgcctcagcctccccagcagctgggactacaggctcacgccgccacacccggctaatttttgtatttttggtaaagacggggtttcaccgtgttagccagaatggtcttgatctcctgaccttgtgatctgcccacctcggcctctcaaagtgctgggattaaaggtgtgagccaccgcgcccagccaatttagaaactcttgaggacttccgaattcaacacctgcaaaaagactgccctttcgacacacgtggtctatttttttttcattattccttggattctctcaaaaaggcaaattgatatttgatattcatgttctatgtagaagatatggagatgtaccactcaatttccattttttgcttttgaattttcactggctttataggaactgaatgtgtaaggcccgtgttattattccaaatattcagcagaattttctttgtggaagaatagacacagatgctgttctggatcagttacatggacactagcttcctgcctgattattaaatgtccgagggagcattataaggtgacacagtctttaaaattaagcaggtcaaaaaattaagtgggttctagaaatattagtcttcgttaaaagggaatcatatacacattggataagtgtcctttggtgggcatccatagtgtaagctggcagggtctttgctgggaacagccccatgcagctttggctgcggtcattttgggaattctttaaagttatgggctggtctggactggaatcaagaaaatggacatgataaaggcatgtgcaccatcctaaataaaactaatggctaaagccttagcatagggtatgtgagggcaggaggttggggaaggtgcagggtgatcaacctgcacatgcacaaacagacctccttcccggcagggaggagatggaatctcggcctttcttgccactccagctgatgtgtgtggaggaaggctgcacagctgatgtgtgtggagccctggctgcacagctgtttagactcagagcagagggaatggggaaagtggctcaggtgtgctgcttggccttatcctaggctgacagcagctcctggcaaataaaatgtactcaacaaatatttgtggaatgccttccagggaacatcatctcatttactcctcacagcagccgtttaaggagggagtatcagttctgagccacagatgaggaaactcacattagacaggacatgccctaggccattcagatgggcagtgctggatgagcttcaagcccaagtctctcgctctggagctgtttccttcattccatacagctgaagacagcatgagtgggagagactgtcatgtgtatcattgtaagcaccccccccccccgcacccagtctcaggtggtcccttcatgctaaactggcatgatgttcaagtgccccaggatggtgctggggagctgggcagagggtgggggttcccctcaatggcagagggagctccatccctgcaatgggaaacagccattcctgtcctcctgccccctccctgctgaggagtccttttgctggtttgtatcctcagagctttgaagagcacaatcagaaagttgaagcaaacctctcaccaccgcagactgactaaccgtacccctttctgtcactcattccagcagcttctctgggctgtggagtgtgggcccactccctgtctagctcctgtgtacagtgaagaagcctctctcagctctggggctccttaatccatttctcacagaccctgcctgctttcttcagtttctaagatgaatgcccagcacatgggaagacctttaataaacatctcttccttcactctctgtgggaagcggttgaccatagcatgttggaagctggaaattgctcttttgtagcccagcactttaaatgcatggactgtaagttcaggcacacctaaagttgagtgacttggttggccgaatctttctcctagcttctttgtcccacccaactgagagacctcagagccaaggcccatgtcttgtggatcattgtactctcaccatctggcagtcttttctttatttactgaattgaatcgacatgtttttaagaagccactcaccactgtatacagaattactatttgagtatctgtagtaaatactaaggattttcatattcttttctttctcttctctttccatctcccttcccccatccccaaaacttatcgtttcagccacctgaaacagttatagaccaggtcaaacgttttcaggaaattcctatttataccatctccttcaattacaatgatgagattgcaaacaggtttttgaaagaggttgctgctttgactggaggagagttccatttttataattttggttgcaaggatcccactcccccagaggctgttcaggtaagagcttggtgggctaagaagggagtgttcatttgtttgagcattacaggctggcggtccctgggtaataccttcgttgggaaaatagcaaccatagagataactaagtcaaaaaaatgagtcgcttaacaatgagtgtaccagtgtttctcagaatgtagcccaaggaccacctgagctagggcacctgagcagattcctgcatcccatttcagagatgctaaagcaggttgtaggcatagaggcccaggaattataaattaatatatatattttgtttttcttctaaactttttattacagaaagtttcaaatattacacaaaatagaagcatatatagacctccatgtacctataatttaaattcaacaattatcaatattttgacaaactttaggaatctgtgtttttaacagggatacccagggagctatatgtgaagtttgttaatcactgctatacacagatatttgtagaaaatgaaacaatgtcagatgtaggtggttagttgcttgctgacctctcagactatataaccatttgaccacctgataaagcaatttattctaataggctaatgggagaaagcaaataaaattctgttctctcatcctccagacttggcctgtgcatatgcatttcaaggatgcccttctagggtgtgtgttttttgttttatgttctgaggagtgactttaaatccagattcagtgggtagcaggacaagtcagaatactgatcagtgcttcatgtgagtgaactacctgagactagggaatgaatcatccaaaaaacattggagggaccagtgctttaagctcacagagggctgggaagagtgctcccactagtgaggattggaaacttcataatcctttgggcactgggtaaagtacacaggagggtcttgccttggtagtgggagcaaccaaacactctgcttccacctaggaaatcttaaatgcaaggcctgaaaggatcaaactgtttccaactaacttaactgcatcccagaacaaaccccaagaataattacaagaaaacaaaaatattcaccacttaacaaagtaaactcagcaatgcctagcacacaaccgaatattactaggcatgcgaaaaagtaggaaaatacagacccataatgaggaggaaaaacaaactgaagacttaaaatgtacccagaactcaatgttactattagagcattaaaactgttcttgtaactgtgggggagacatgaaaggtacaagtaagacacaaattaaactagcaatgaaaaatatatagaatgggatgaacagcagatcagacattgcgtaacacaaaactagtgaattggaaggcagcaatagaaactatccaaaatgtaacacagaagaaagagaattcaaataaaaaaaacaaaaacaaaaacaaagaaacaaaccaaaacaaaaaacagagcatcaatgagtcgtggaaaaatccgatcagtctaataaacacataactgaagcaacagtggccaaaaattttccaaattggattatggctataaacacacagatccaaaagaacctcaatgaatcccaagcacgagaaacatgaagaaaaccagactaaggcagaatcaaactttccagaagcaatgacaaagagaacatcttaaaataatagaaagaagacacattgtgcacagaggaacagtagtaaagatgacagcagatgtctcatcagaaataatgcaagtgaggagacagtggagaaacatgtttaaaatactgagagrctgtccacatagagcctatgcggactgaaaatatctttcaaagcaggatataaaatagactttttaagatatataaaaacggtcaggtgcagtggctcacacctgtaatcctagcactttgggaggttgaggtgggcagattgcttgagctcaggaattcaagaccagcctgagcgacacggcaagaccccacctctacaaaaaatataaaaagtagctgggcatggtggtttgcacctgtagttctagctactttggggggctaaagcgggaggatcacttgaacccgggaggcagaggctgcagtgagccgagatcacaccactgtactccagcctgggtgacagagtgagaacctgtctcataaaaaaaaaaaaaaaaaaaaagatacgaaaaaactaaaagaattcatcaccaacaagcctgcggtaccagaaacattaaaggggagtactttagacagaaggaaaaccttaccagatagaaatatgagtctatgctaaggaataaaaaacattggtaaagatgatgctaactgcataggtaaatatgtaaaaaaaaattcttattgcacaattataagaaaaagtgcaggatagacttccagttccagcaaagatagagtagtgccatcccttgtaggtccaccatctcaaaaccagaaagccctggttatatctccaaaagaggacaaaggactcattgtcccatcattcttcaaccattgtggaagacagtgtggcgattcctcaagaatctagaaccagaaataccatttgacccagcaatcccattactcggtatatacccaaaggaatttaaatcattctactataaagacacatgcacacatatgtttattgcggcacaataaacaatatgcaaacaattcacaatagcaaagacatggaaccaacccaaatgcccatcaatgatagactggataaagaaaatgtggtacatatacaccatggaatactatgcagccataaaaaggaatgagatcgtgtccttttcagggacatggatgaagctggaagccatcatcctcagcaaactaatacaggaacagaaaaccacacaccgcatgttctcacttataagtgggagccgaacaatgagaacacatggacacagggaggggaacatcacacacctggggcctgtcgggggcggggcagagggagggagagcatcaggacaaatagctaatgcatgtggggcttaatacctaggtgacaggttgataggtgctgcaaaccactgtggcatatgtttacctatgtaacaaacctgcgtgttctgcacatatatcctggaacttaaagtaaaaaaaaaaaaatgacactcattgtcgtgtcattctccaagttctgaggtcccttggcaatgagtccttgggactttatttctattcgtatatcccagacagggcactgcagaagcctctccaacctgggatctccaacaagcactgacaaagaaagctccacgaaaagcctgttccccaccacccctgcccgagccaaatgactgggaagagcacggcttaataacagaaaacctttttggcaatatctgtcctgctccagtcatataccatggaaaaaactgcatcccctcccctgggatttcagtggtgccaaacagggagttaatctttcacccactctcttgcttcatggaagcaagtgactgtgctctgatccccctgccgagtggaatagtagagctgaccagggagctaaacttccatccctacgtggtggaagcaggcagcaatgctctgatttatttccctgctgaggctgtgtcagtgaggcttagtggaaagctcattctccttctggaagcaggtggtgcttacattctcctactagagtaatatcagagggactgagtgggaagctgatctctcatccctgagtgggcaggagcagcagtgctctgagtccctcaccagggtagcgtccatggtgcccagtgtcgagccaaccctccactcctctcaggcagcaccacaacctaaccaggcagtgtgaggccagtctagtcactgttgtgcttcaccagagtcctcatgtcagcaggactcagcacgaagctgagcctctacaaagacccattatcaatgaaagtgaaaaaagaagcaagctggggaaaggccacgctctgctttcccccatccgtggtgttagtaatgggaagcctcacctccacactcacacaacagcatgagaccaaaggagaaagtgtgaaacaggactagcccccacggtggtcctccccataatgtcagcagggcccagtggaggactgaggctccacttccgttcagcatcgacgagactgaaggaggtagtgctaggtgggctactcataccctatcaacttcctacccttaagagaaaactgtcccacaaaagaaaactgtcccacagaaagacagttgaactcttaatcccaccactctgacagctcaccttgacaaaaatagctgggagagctcaccagatacatagttatgcccaagtgaaagtgaaattgatctgtaacagtccccacacatataagaagtacaccagaggaggatgtttacttggataggtgggcagagcttgctaaagggacacagctgccagtggcccatctgggaagcctcgttgtctctgcaggcctgagactctcctctccttcagagacacatcagagtgcgttggaagaacaggcaggagaggcccagctagaactagtggccccttgcagaagattctttgtccctgtgggccaagggctctcmtaccctacccagtgacacaggaacacctggaggacagcaggggaggtaccaagagacacctggaagcctgacggagggaaacgcctcctgtctcttcaggcagcaccagcaaggaccagtggggtccagaatggcaccagattcacaaagaagaccaagataataccaaaagcttctgaacatcaaactgccgttggagcaaagacccacagaagtaggacaaatctcacatgctaaatttaagcagggcaactaccaagtaaaataaaagattttaaataggacccagaatcttctcacacaataggaaatacctaggatccagtaaaaaaagtgcccatcacacaaagagccaagaaagccccaatttgaatgagaaatgacaaacaaatgatgccaacactgagatgaatcgtatgttggaatgacctgcaaggattttaaagaagctgtcataaagatgcttcaacaatcaattacaaatcctcttgaaacaaatgaacaaataggcaatctcagaatataagtaggaattataaaaaaaattccaagtggaactttgagaactgaaaaatacaagagcagaaatttttaaaacctcagtagataggttcaatagtgaagtggagatgacaggataatgtcagtgaacttaaggtcagaacaacaaaattcagtcactctaaacaacagagagaaaatagaccaaaaaaaaaaaaaaaaggtagagccacgaggacctgtgagacaatgacaaaatatccagcattagtatcatcggagtccaccaaagagacaagaaggaaaaatgggactgaaaaaaaagtgacaaaataatagctgaaaacttcccaaagttggtgaaatatacaaatatacagattcaagaatctgagtaaactccaaacaggataagcccaaagaaatccaggccaagacatgtcatagttaaacgtttgaaaattaaagacaaagaaaaaaatgagaaaaatgacaccaattcaattgcagatttgacagcagacttcctgttcaagaccaaagaagccagggggaaaatggcacgatagttttcaagtatgaaaggaaagaaccattaaccatgaattttattattttacttttattttattttattttagttttagagacaagggttttactccatcacccaggctggagtgcagtgacacaatcttggctcactgaagccttaaactgttgggctcctgtgattctcctgcctcagccttccaagtagctaggactacaggcgtgtgccaccatgcgtggctaatttttttatttgtagagatagggtcacactatgtcgcccaggctggtcttgaactcctggcctcaagcagtcctcctgcctcagcctctcaaagtgctgagattacaggtattagcaaccccaaactttatatttcacaaaactatccttcaaggatgaaggggaaataaaaatattctcagataaataaaaactaaaagaacttattgttagaaaacttatttttattgattgtttacaggagggttttcaagctaaaggaaattataaaagaaataattggagcatcagaaagaaaagaagagattataaaagaaataattggagcatcagaaagaaattataaaagaaataattggagcaccagaaagaaaagaagaaagagcagaaatatggggagatataatagatctatccttttcttcatgagatttacaaatcatatttttaatgattgaaacaaaagttgtaacatcacctaacactgaagacaataatatttaaagctggagaaggtaaagggacctgaatggaagtgatgtttacatattttcattgaaggagtaaaatgttgatgctgggactgttataagtcacatatatatgctgtcatactgacaagattcattacaaaagcaatacaaagggctacgttcaaaaactctgtaaataaatcaaaatagaattgtaagaaaaaaaaagtttaaataacctgaaggaaggcaaggaaagacaaacagaggaatgagaaaacaaaccataaaatactggaagtaagtgctaacatgtcaataatactttttaaattaatggtctaatcacaccaatcaaaagacagatactggcagtgtgaattaaaaaaaaaaaaaagaacacaaccaaactatgtgctgcttttgagaatctcactttaattctacataggtaggttcaactaaaaggattttttgaaatacatcatgcaaaaatcctcaacaaaatattagtaaaatgaatccagcaatgtattaaaaattatacactatgatcaagggggacttactccatatatacaagaatatttgttctttttttttacccaggctggagcgcagtggtgcaatcttggctcactgcaatctccacctctatggttcaagcaattcttctgcctcagcctcccaagtagctgggattatgtaggcactggccaccatgcccagctaatttgtatttttaatagagacggggtttccccatgttggccaggctgatctcgaactcctgacttcatgtgatccacctgccttggcttcccaatgtgctggggttacaggcatgagccgccccacctggctacttgtttttgtatattggaaatatttgttcatttgtttcaagaaatttgtaattgattgtttcaacattagaaaatctattagtataatccagcatatcaacaggctaaagaagaaaaatcatatggttttatcaattgatrcagaaaaagccttgaccaaattccacaccattcataataaaaactctcagcaaaatagaaatagaagagaacttcctcaacttaataagaacatcaatacctacagctaaagtcatacttagtagtgaaaggctgaatgatttccccttaagattagaagagtcaaagacatctattctcaccgctgtgattcaacatactactggaagttctaaccatgggaacaaggcaagaaaagaaataaaaggcatacagattgagaaggaagaaataaaactttttatgtgyaggtaatgtattatctacatagaaaaccccaggagatctacaaaaaaaaaaaaaactggaacttttacgagatttcagcaaagtcacaaaattaatacacacacttcaatcatattttgataaagtaacagtgagcatgtggaagtgaaaattaaatacccaataccacttacaattgagtttcaaataagatgaaatatttatgcacctaaaaaagtatgtacagcagttttatgttgaaaattacaaaatgctgaagatatcaaagaagatctaaataaatggaaagatatgtcctgttcacggattgaacgacttaacatattagagacgtcagttctccccagcttgatctataggtttatcaaaatttctataaaaaccccagaaaagttttttacagacatagttaagcctatctgaaatttatatgacaagtcacaggctctaaaaatgtttaaacaatcttgaaaaagaaaaataaaatgggaagaatcattatacctagtattaaggcttactatgtagctgcattcatcaagatgtatttgctctggtggagaaacagacacgtagaccaatggaacagttatagaaatacacccacacaacatgctcgactgatttttgacaaagatgcaaaagcaatccagcggaggaaggatagccatctcaataaatggttggagcaattggatatccaaaggcaaaataataaaccccaacctaaacctcatacctcatggacatcttaactcaaaatggagtgtggacttaaatctaaaacataaaactgtaaaacttctagaaagaaatgtgggaaaaattatggggatgttgggctaccaaaggatttttagtcttgattccaaaagcattatccataaaaggaaggattaatagattggacctcatcaaaattaaaagctttcactctgtgggagaccctgttaagaacataaaaagatgagctgcagacttagagaaagtatctgcaaatgacatgtcagacaaaggtcttagtatctagaatatatgaagaactcttaaaacttaacagtagaaaacaaaccatctaatcagaaaataggcaaaatgtatgcacagacatttcactgaagagaatctacagatggcaaagaagcacatgaaaagagggtcaacatcgtaaaattcaacatcccttcaggttaaaaactctccataaactaggtactgatggaacatatcttaaaataataagagccatttatgacaaacccatagccaatatcatactgaatgggcaaaagccagaagcattccctttgaaaaccagyacaagataaggatgccctctctcaccactcctattcaacatagtattggatttctggccagggcaatcgggcaagagaaagaaataaagggtgttcaaataggaagagaagaagtcaaattgtctctgtttgcagatgacatcattgtatatttagaaaaccccatcgtctcagcccaaaaactccttcagctgataagcaactttagcaaagtctcagaatataaattsaatgtgcaaaaatcacaagcattcctgtactccaacaacagacaagcagagagccaaatcatgaatgaactcccattcacaattgctataaagagaataaaatgcctaggaatacagcttacaagggacgtgaaggaccttaacatcacaaaccacatggtccaatcattctactcctagatatttattcaggaggaatgaaagccgacgtccatgcaaagacttgtatgcaaatgtgtgtagctttatttataacagcccaaacctgaaaacaacatcaacaggtgaatggataaataaattgtggtatttaataaatagtatacaatagaatacagctcagcaataagaaatgaatgaagtattgattcatgctacaacatgggtgaatcttaaaataattatataaatgaagaaagtcaggaaaaaagagtaatttctgtgtgattccatttgtataaaattctagaaaactgaaactaatgtgtagtgacagaaagccaatgagtagttcctggagaattgagggagagggcttgtaggagggtgtgcagatttacaatggggcacaaggaaatttggagggtgacgaatatgttcattattttgactgtaagaatgattttgcaggtgggaatgtcaaacttttcaaatggtacattttacagatgttcagcttgttgtatgtgaattacacatcaataaagctggctaaaaatgggataatataagaacaacataaaattctttagattcttcttttcctgatacagttggctttctgttagaaatgtttgacattttctggccgtgtgctgtagtcccaggtacttgggaggccaagatgagaggatcacttgagcccaggagctcaagaccagcgtgggcaacatagtgagcctcttgtctctaaaaagaaaagaaacatgtttggaatttgagctctttttatctagtcttatagcatattcacttctcattttggcagaatgaagatgtgactcttttagttaaggaaatggaacagggtcacagtgatctggagaagatgcaagacctttattctgagtccttgatcatggactggtggtacaatgcagaaaaggatggagacagcaagtgagcacctctgcccgcctgtctccctgcgctgaggcctcttgagagctgggcttgccccctgggcccttgtcctttctgaaatgctctgtgaaatttcttttagtgaaaagaatcacgtagtgtgattaagttaggatttttttaagcaaagagaattaacaatttaataacaatttaatttaattgtgggcttgaggaggccacatattcccctttatgttctccacgctgtgtggacgggcccccagacccaagcaatgagagggcggagaggagcactgtgtggggaaggagctctgactcagggatcaggaggccgaggcctggacttccctctatgtgactgtggcgaggcccgaacttctctccacgcctctccattgcgtgggtctctgtttcctcatctttaaaatggtggccgtggtggtgggtttgggacagatgacttctcctgtctgcccccatcctatattcttatatgtttctaatttgtggtttttaaacaaaatcaaaaccaccgccaaacactcaggaaattggtcaaatcttgttaaaatgatttaatattttccagatattcaagtatcacagcctaccctgccaggagatgtcttttttatttcaaagaatgatagaaaattgggggaaaaaaagaaaatacatttattaatgagaatttattgttcaacaaaatgcactgtcttcctgttagcaaattaagcatttgtatgggcttaaggtagggcatgactgtggaatcagtaaaaagaggtaaatgttataatggccatcttacaataagattttatggcattattttttaagtatttgggaaagcacagatacagcttctaaatttcaaaaatttgaacaaataaactaagaatcaagtaaatgagaagccatttattgagtacaaaccatgcagtaagagaatcggggtgcacagatgaatgtcagtctggttccttctgctgtggggggcacagtgcgggcacagacccacagagggccatggaacccggggcaggtgctccacggaggcgtcgaggggcagtggtgcaggagggagggcacacgtcacagtgttggagcagaaattgctctggaagttttcctttgtatggctgctgtcttcagcgcttcagagaaggtcatatctgggaaaacatgcaagcgtttctgggatcgctccattctccagaatggttccctgggatctggtgctggcatgggaggtccaaggcaggagttcctttctctagcttttataagtgcttgctggtagacactggttagagaatgggtttctgcagtgcttacttgtttataaccggctttcactcctacgaatcctcccatcagccccatgtagtcactatataggtgtgcaggtgacgtttcctgcagttgatggatgaggaaagtgaagaattttagagaggattgagtgacttgactgaggtcacagagccaggagggaccagacctgtgaagtgagccgtatcttctgactccaaggctgggcccctctccactcttctgcatcagtcagggataaatgactatttttatattaacccagatgggggaaggcttacttttttaagtttgcagtgttcaacatgaatgtattgacttaactctgccttcttgatggaaattttcttttctctctctttttttgctcgactttttatctaaatcaaaacaggcatcaaaaggaaatctgttctatgatttcaaccccagaaaagtgtgcaaagcctcaatctgatgtcgattcaacacaaacttcatctctgaatatgttgaagggaccatggggcctttcagatcaaaaggttcagaaaaagaaagtccttcacgcaggtatcagtgaacaaaatggcttgactctttgctggtttctcttcaaggcaagaagatagaataaaactaaacccacataatatttttaagaagcactaaacttgtgggttttttaaattaaaatttttattaaaataattgtacattcacatgatcttatatatacctacgcttcatcctgtttccccaatggtaacatcttgcaaaataatagtccaatattaaaaccaggatattgatattgatgcaatccacaggtcttattcaaatcgtccagttttacttgtacccrtgtgagtgtgtgtgtgtatgtgtgtgtgtgtgtctgacagtgtgtgtttaggtctacacggtttgatcacgtgtataggtttgtgtttccaccactacagtcaagatacagaagagtcccatcacctagggaatccttcatgctgcccttttataaccacacccacctcccttgcacacccttcctacagctaaaatcaaactaaaaggtgaaagactgaattatttccccctaaaattgggggaaaggatgcctactcttaccacccttattcagcatagcacgggaagttctagccactgtaacaaggcaagaagaaaaaataaagccagaaagattggaaaggaagaaataaaactgtccctatttgcagatattgtattgtctatgtagaaaacagcaagggatgtaccaaaaatacaagtcctagagctactgagttcagcaaggtctctggctacgggacgcacaaaaccaattgcattttgatatactaacagtgaacatacagcaacctatattaaagtcattcataattgctccaaataaaataaaataattaggtgaacatgtaacgaagtatgtgcagaatctgtttgctgaaaattataaaattctgctgtaagacactaaagaagatctaaataaattgagacaccatgttcataggttgaatgaattggtgtgatagatgacaattctcagctcatttatctataggtttaatgaaattcctaatagaatcccaaaaatgtttttataaacatatacaagcatattctaaaatatatgcagaaacatcaggttctacaatagctaaaataattttgaaaaagagactaaagttggagaaatcactgtactggacattaaggcttaccacataaccacattaatcaagacggtgtggtattagcagagggataggtggaataggacctagatttaatccacacaaatatacccaaatgatttgacaaaggtgcaaaattaactcaatggagggagtatagccctttcaacaaagatgctgaagcaatatctacagtcaaaaaaggaaaagaaacttgaccttaacctcacatgtaccgtggatttaaatgtaaaacagaaaactataacacttctagaaaaaaattaaagaaaacctctatccagttaaggaagttccacacatttctagctttctgagagtttttatcatgaatggatgctggattttatcaaatgctttttctgtgtcaactgatataggctttttcttctttagtctattgaaatggtggatgacatcaattgattttcaaatgtggaagcagccttgtatatcttggaatatttcccacttagtctcagtgtataattattttaacacattgctggattccgtttgctagtattttgttgaggattttggtatcaaagttcatgaaagctattgatctatagtttttttaatttttcttttttaacactgacttcatccagctttggtatcaagctaatagtgtcctcaccaagtgggttggaaaattgtccctcctcttctattcctgggagaaattcatgtaattcttctttgaatgtttggtagagttatcatggagccatttcggcctagggatttcttttccagatttttcatgatgaatgcaatttctgtaatggttttaaggatattgtccatttcagcttggtcgagttttggcactttgtggtttttcagtaattggtctattgtttctaatttatcagatttatgagggcaaagttgtttattatatccctttgttagctttttaatggctgcaagatctttagcaatgaactcttgatattagtgctttgatctgtcttctctctttttgccttttttctatctagctagaggctttcttgcttttctttctatttgttcatttgtttccagagaatgtataattaattgttgaagcacttttatgggtagcctctttaaaatccttgtcagataattccagctcctgattcttcttggtgttggcatcatgcatttgctttttctgattgaaggtgtgattgtttttctagttactgatatgatgggtgatttttgatagtatcttggacattttgtctattatgttaggaactctgcatctcatttaagtattttattttatgaagtagtcaccctgtttaaatttagcatgtgggccttgacctacttttgtgggctgtggttctgatggcgatttaattttcacaggctctgtggtattgttaatattttggtgcttgtttttatggtgtttctggggctcctactggtccctgctggtgctacctgaggtggcagcagggatcccctcagaccaggatgttagatgtctctgaggggagagttgcagcagcttcccccagtgttgtctctgaggtgtccccacattgctggcagggaggagggccttgaacccacagggaccaagaggcgtcccggaaagggccgctaactggagattggccctcttgctcctgctatctctgtacaagggagcagcatcgtacatgggaacaaacagccttcccacactggccacttgtgtggctgcatccctttttccagtcctgcctgcctgttccagtgaacctgagttttgccagagttgctacttgtcttaaacattttaatggccaattgtcactgccaccatttcacttagatttgggttgctcggtattgggagacaatcatgtgctgagtttctattttgtttccattggtgatgtagaggagtggtgaaatgccatgactgatcctacagagtccggggaggggctaaatgtttgaytccactgctagataaatgtttcattccgtatttgtggcctttgggaatggtatagtttttatgtttggagacttggggagctaaatttcattttcatttggctcacgtaaatctgattgttttgcctggtaatgttggtcaaggtgggctgccagtgtggacactggcaggagctcagctctctgatttggattgtttatctctttttctcacagacatagcttctaaggaaatttagctttcttagttcctgggtacagagacaatcaaggcagggcttacccttttgttgcctagaaaaacaatgattaccgtatagcacactccttctctatgcatggagaccactggtgttaattttctgtgtgaaagctacccatttgcagattactagctaatcttcactctaactatctaatttcttgtaggagagggtaagtcctctcagtgaaaacacagacacatttcattcacgaatgctgacataaagcctgggaactaggtacttctaaagcctccaaattatgaagtacagactacattacaattagtgtggtttatgttatcaaatataaaaagtaatcaagatgacttggcacaggctcattgtcctctaaagcacacagattcaaggtcaatatttgctaagttgtcatttgcctgtagaagggacacatcacagggtagaaaataacataagcaaagatctggacagcaattgtggtgggcagaatttctagaatggcttaccaaagatgtcctgccctgaaccctgcaatctttgaatatgatgacacgtcactctcatgaccaggttatgctgacctagacagggttatctaggtgagtccagtgtaactgtgggaactgtgaaaagcaggggctatttccagctggtggcagaagagaaagtcagacagatttgaaccacaagaggaattcaatgtgctattactgtcttgaagatggaagagtcgtgtgagaagtaatacagatgccttaagcagctgagagaggccgctgggctacagtcagcaaggaaatggggcctcagtcctacaattgcaaggagctgggttctgccagcagcctgaatgagtgtggaagctgacttctctccaggaggggtccagctgaaattcagataaagggagcagggcatcctggcagcattcagtttgtggcagcaccatcctcagagggttgggaaacaaaggttgcattcttactttaaggagctgataaaatagttatatctaatgaagtatctccttccatccccaattcctttaactcttccctctgtgataccaacagaatcaaccaaaaccagcctgctcagaagccagatgtcctccctcaggagctcagcttgcagtgaaaggaaggatggcctctccaatgccagcagccggaggactgctctaagtgacaaaggcaagccagaaagcatctctgtggccaaccagcctccctttccacagtgtatctgttccagaaagagctgcgtgtagatatgttggggaaatcatattttaaatgggcccagattgcttcctattcaaaggaatcccttgtaagtcaggtctgcctgctttatgacctggattttctgagagctggccttgtgcttatggtgcctgggtgtttaatacacacgtggctcacataactatggtcatgctgctgcccctccatggtttgattttgaaactgtcatatttcatagttgattttttttcttccctttcttcaatggatgatgctatcagatgagccmctctctggtccaaattgtcagccttttggggactgcatatgaggaaaatgtgatttttccactcaatttttattactattgataaaattattaatcttaaagtaataagttttgaaacgtttgatgcctgtaacatttttcttttatttcaaatggttgatacatttaaaatcccagttaaacacacacatatacacacaatcccctagggagtaggaagtggctgagtagcaaatgtgcccctgtggctacacagtcatagtttaatttagaactctgttttcttcattgctgatctgtctgatatcttttcctcactttttttttttttttgaggtagagtctcactttgttacctaggctggagtgcagtggcgtgatctcggctcactgcaacctctgcctccgcggttcaagtaattctcctgcctcagcctcccgagtagctgggattacaggcagccgccaacaggccaagctaatttttgtatttttagtagagacagggttccaccatattggtcaggctagtctcaaactcctgacctcaagtgagccacccgccttggcctcccaaagtgctgggattttggccgggcacagtggctccctttcaattaacctgccatatttcctaagttgtctacatgcacattccttaaagggcttatcaaatgatgattgggatatgatttcttagctagttaactagctcacacccaaacacgcctccttctgaatgctgctcattcaacaaatatcccttttcatttataaatacacatttatataaggatatatktaaaaccccaaatattaatttgaaaatttgaacttacaactaaacaggacctaacaggttttttggttttctacagaaagctgaagaaccactaaacaatctatcagaaattaaaatgttgatcaaggctctcatataatttgggggagtccaaaaggtcaatattgaacaatcattggttaatggtatttttattgcacactttttagaggtgtgttttctgaatgaaagaatgaatatgtctcattgtctcaaaacagtggtagtgccgtatttacccatgcattggtctgtagtgtaaattgcaaaggaatcttgcctgagagcccgctctgacaaatcaggatatgttctctgaaatgtggtccatttattagctctcagtcacagctggactgagacaagcgtgatccctttgcattttatgtaaaacccatatgtgaggaaaatatacaactgccacttccccttccacagaaatgagcatcttgctggctgaggagtggctggatgacaaatcgtcagaaaaggtgacgcgagaaggaagccaggtttatgaccacgagtgagttctttaatttgacaaagacagttctgttatgcttctgttggttaaccatcaagttgtaaattttaaaacaccacctccttgtgttcttagttcttcagatgtgtcttcagaaaactggctgaagacctatggcttggtcgccaagaaactcaccctcatggatgccttgtcagtggcagcagtcccgcacagctccacctatgttcccgtcctggacaagcatgtcatgtctaaggtctttgatgaggtaaactgattgtctatacgtccctacttgaggccattttcattttctgctcaaataaaaagtagtccaatttcttgtgtggttgtaacagaaatgtattttagccactgggggaaaaagtatttgtaaaggcagtaaaagggagagagagaggcttttaagaatttgggagcggtggctcatgcctgtaaccccagcacttgggaaggctgtggtgggtggatcccttgaatccaggagtttgagaccagcctgggcaacatcgtgaaaccctgtttctacaaaaaatacaaaaattagccaggcatggtggcatgcacctgtagccccagctacttgggccactgaggtgggagaatcgcttgagcctgagacatcgaggctgcagtgagcggtgattgcgtcaccgcattccagcctgggtgacaaagcgagatcttgtctcaaaaacaacgaaaataagaattctctttttaagctgagagaaactgatcttggttgggttggcacttcgtggttcgttgctaacggatagaagtgtggggctgcagaaatgattgaaaactctaggtcagagtcatgagtgaacatcaaatatccctttatgaaaggaaagggaggacttgcgagagattatgtccttcttttgcttaccttctcttnnnnnnnnnnnnnnnnnnnntttgcttaccttctcttcctaaattgagtggcatcttttgtagctaaaggaaaaagttaagagagcaaacaagcaagccacatgttagcaaaagaaccaccagattgtcctaggccggtcccgagaggagaaaaacagcttccaatgggagggcgtggtagggttaaatgtggaggaaggccaaggaagtactgaaaacttaacactgaatttggcaacaaggaggtgctcatctttacaagaataattccagtggaacggcattactgcagtgggatgaagaacaccaaaaacatgagaacatgaagacggaacctcagtgcttccaggcaaatacaacagcaactaacgatttaaatagaaacatttcagtctttgcagtcactgaatggaaacaatatccttaaaagacctgtctcatgctgaaatctttgcagaggaaatgatacaatgcttggggatgcttggggtttgctttattgtaattggggtggtggagtagtgggcgggggagagtagatgaaatagatagaccacacgttgatcattgttgcatttggataagacttagtgagaagggtcgttttactcttctttctgcttttttgtgtatttgaaattttccataaaaagaagttgaaaagatcaaaggcaggagaaagtttttttaaaaatgaaaagaccttttctaactggccttgaaatagctgagatttgatgtattgggagaagcagatgaattggtgaattttattctattagcacattttaaaaattatcacccatggaggctcacctgcctgctggtttgggatgaccagtgactctccctccggaggctgtgtgtgtgttctcctctaggctggttcctggctactttgcctcaaggtgagtgctcctgtccctggctgtttccttgtgattggcagatttgatttatacctaattagtcagatgtcaactcaccacttgaacttgacttcttctagaagcaacagggagaaactgaaccctaatttatttcttgtaggaggtttggggacagctccttcatattctctgcagttatattactattcttgagttttatttgggacgaaatatatttagtgaactctacttagaaatagaattttcttgggcttattatgcctccttctaaatgtccyaacaacttgaggtagagtgaaaagtaaatttcttgaaaaaaatatggtaggatagggaagcagaagcataaaatccaaggaagaaacaataaaggaaagatttataggctgagtaggtaaaaatgttattttgcttaaaaacatgtaaataaaatgaagacaaatctcagaaaaatacctgcaacatacatgacagacaaaaagggccataggagtgatatcttacgtgtgtgtatcagtataaagcaccgtgtttgtatgaatcagtgttcagtatgcaaacacacatgcacatacatccataccataagggaatgagaaaatgacaaatactggagtggaaattttagggaaaaaaaggaaaaaagtcaaactcatatacaaaaatatttaactttactggtaaccaaatatatgccttaaaaaatgcaaattgataatcaattagacaccacctcccccatcaaattggtaaggttaaaaatcaccrataaacagtaatggcaatgacagggtgggatggacacttatatcctgctagtgagagtataaattggtgcatccttagtgtaaaatgttcagaagccttaagaacttatatttaccccagcgaattcatatattactaggaatctatgtaaggaaataattagagatactgaagtatatgtgcagagaataattactacagcctttagccaacaatggaaaacaacacaaattcatataatggcatgtcatacattcatcagatatcacatttctaaagaataagtttcacacgatgaaaagtcctcgtgctaaatgaaatatcatgctaaatgaaaaaaatcagaatatatagtgtgttagaaacttggttgttcatgtgactgatttaggcatggtggtactttccccttccctcccttttttcttttaccaaaatgttaacagtttagctgggtggtgagattgttgggagatgttttttttttttaaatttatgtagcttttaatttttattgtagtacttttaactctgaacattattaattatacactgagaaaaatgttaagaaaaacagacctggccaggtgcggtggctcacacctataattccagcacttcaggaggccgaggcagcggatcattaggtcaggagatcgagaccatcctggccaacatggtgaaactccgtctgtactaaaaatacaaaaaaattagccaggtgtggtggcgtgtgcctgtagtcgcagctactcgggaggctgaggcaggagaattgcttgaattcgggaggcagaggttgcagtgagctgagatcacgctactgcaccccagcctggcaacagagcgagacttcatctaaaaaaaaaaaaagaaagaaagtgaaacagacctgaaagcaaatgacaaaatgatgtaaatgtaatgggaacttaatttttaattaactgctttatttttatctgataagtaatatatgaataattctcagtatatgagatttaagccatacttaagtcttcagaggaggcttctctcaccactacgcctatccatgaaggaaacacgttgaatagtttggtgaatttccttccaatcctttttctacatatgcatatgtaagtatgtgcacacataacgtatttatacagagacacataagaactttaataaacatgaataagacaataccatatacatttactattttaaaaactattttaaacattttgtcttagagccctttccatacaggtagatggtctcatgcctatagttgcaaggttcttccccattattaatggatatttacattgtgttcttccttcccctcttacaaacattcctgtaacaggtatctttgcacrtagatttttgggcacatgtataagtctggctttggaagaaattccctcaagtcagatggctggacccaaagggtatgtgcattttaaattttgataattcaaatcatcccccaaattcaytgtacattttcactagcatgtatccccacagacagagtaaagtagtactctcttcctaagaagaactctgtgtaatacttgataatcattggtccttggtgtgtagaaatgctttgaaaaccctgaaagtaggatgcagacataagatctttattcagcctattctttcctcattggttcatatgctgaagaagcaaacttaatattcagtccaacagttagaaatttttttctctgagatgtatgtgatatatccatactctgtgaataataatatgcctactctgaggttgttatggaattaaaagaagtaatgcatacagtgtaaagtacttagcaggcacttaaaatgttgacttttattataaaaatattcaacaaatttatgcctattgtatatgcctgtgttgggctctagaatacagtgccaaacaggaaagccaacattcctacccaagcacaaccgacagtctcaggaggaagtagcaatgaaaatgagagaagttctagttaaatgtgacgagtgggaagtgctgagtgaagatgcaggagatgtccctcacctggcttcagtggccacagaaggcttgccttagctastggcatcggagttcagacccaggggaagagaaggagttatgaaggtggagagatgggaagagagccccaggcagtgggggagcttggggaatcctaaggaacagagaatgtttgtcattccagagaagtttagtgtgagtggagaaggtgataaagctggtgaaggaagggccttgattgaattaaggattttgaacttcatcctgaggggaatggaggggttgttagcagaggagaaattaatttggggtttgagctggcacacagagaatagttggagaggcgggcagtyaggaggcagttggggagatgggggcagtcaggaggcagggctgggtggctggaaccagtaggctgtgtggctgaaacactgcrgatgtacccaaagctctttataaagtcaagtcaacgatgtggggctgagagagagaaaaatgccaagagtgattctccagactccagcctggaatatcaagcaggggaaaaataaagaatgagtagtgagggtcttgttcttcaggggggcatcctagtcgtctgcctctagaacacaaagcccaggggaggggatgaacagttctcaagcgcatcccatgggcacttgtgcttggtgccttctgtggcgttgtgagttctcaagacagcctgcacgtaggtaggcactgcacagcacacttgccctcccttattcatagtaagaatcactstgatgacaggcatatactgcagtgatctccagtctcacatccaaagcacttttgtatctttgattccctaatattttctctgactggaagacaccctcagctataaatggaaagaataacaaaataataatctcaaatatctcccacctcatgggatgtatacctttttgatgtttggacttttatgaaaaagcagacaaaaagtagaatggagttgaaaaggaaacacactagagtcttacttcactgagaatcttaattgcgtcctcctcctgtgttctgtgcacggccacatctgtctgcatagagttgtaaagcagtgtctggctttgtccccagctctttgtttcattcatcacttatgtatgggctctttcttcttctggaacacaatgctgttttggttttcagtgtttcccggaccagcctcaaatcggtcaccttggaaatgaggtattgagcaaagaggttgccctagcaactcttcattacaagatgcaaaatggactcgataattttatcttagctctttcaaaaagattaactcttccccaagtcatatacacaataaaactgatttagctatgtaatgaacctagaatttaaagctctttatttgctggttgatttgaaaagcattgaaataatttgggaaaattggtctgcaccactggagagtctacatcatcacccatcatcattgtcgttatcataatgtcttttacagcatcccatcaaggcttcctgtgttgtccgtccttctccgggttctgcacatagctttgtggccagatagcctggattggtgctccagctctgtcatttactcctgaaggaccatggcaagctccctaatctagtatgcagtgcaccctcatcatatactaggttctgagtaaagcatttgctatcatcaaatatctcatctaaaacttagagtgacctgtgaggtggctattcagctcaccatttagctgacaaggaatatttggtgcagagaggctaggggtgctgtcaagtcatgacattttgttgcttttaaatataatagcaatgaacacaaaactgtacactgatagaaaagctttttaattaaaaatttaaaacagttatcacaaaacctacatatgtatatattcaatgtatagaaagattagaaaatgtagataagtgaaaaagaaagaagcaatagttatcatccacctcatcatctcatggttatctggccagatcttcttactttctgtatatagatatccagacsctttgttctttgtttttgtttttatcataattaaatgaaactgaacatcctgttttgtacctgcatttttcaaccacctatccatgaacattgttacatgctggcatatacttatctactataccagtttaaatgctcagccttttaattgaaatatattaatttaaacttaaattgagaatagagttttattttctacaagtttagattgaaaaactgtgagatgtaattttttttttcttgagatggagtcttgctctgttgcccaggctggagtgcaatggtgtgatctctgttcactgcaacctctgcctcccgggttcaagcaattctcctgcctcagcctcccgagtagctgtgattacaggcacgcaccaccatgcctgactaatttttttgtatttttagtagagatggggtttcaccatattggccaagctggtcttgaactcttgaccttgtgatccacctgcctcgctcttccaaagtgctgggattacaggcaagagccaccatgtaatttacacttagtaacatactctcatgggtttatgaatgatcttactgacatgcgatttggccagctgttttgtggccctgctttcattttgttctatggagcctgcaggtgtttcagtttgaaaggcagacatttaagttttggcacttggccatttgcacaactgtaatatctataaagctgttgcacctacattcaaagattccctgtgtgggatttacacagctattacatttccattacacacatccaatcagaacctctccttggccaatctggtaggaagctctgggatatttactggaagaactgatttagttgaaaaacagtgaagttggagaattcagtcagagttgaacaatagataatcaccagtttcacactagtttctcaatttcaaaatgttttgtgattgcttttaaacacagctagaatgttgtcaggtggaattcgacctgttctactttaacaatcaatagctgtgggcacagttctgtattctgtgttyttaatttagcatatgttatgaacatttttccttacaatagccattttgggatgaattttagtgattacactaacattcagtaatataaattactacagtttaattattcctcccaattgggggcagtttacttggaattttgaagaatcctcattttcctgtatctctttgctatcccttagaacagttaacagtaaaaacaaaaaacatcaaaaaacgttgctaaatggtatttcaatttcaatttcaattcttttatcatttgtgaatagttttcttatgtaagctaaatatatctcttaagctgtttttcacattattcatatgtttaggaaacacctcttaaatagcacagttacatttcatcccatgtctcaactaccaagaattcaaatttggtggaatccaaacaattatgttttataatacgataaacttaaaaaaagttttgaatcttagccgttaatttatatatagttttagtgttttatttatttaataaatgattatttgggacatgttttgttctagaaactagtaatttcaaaggggaataaaggattataaagttttatgaagaggaaagacacacaacaaaactgcaattaaatacatttgtctataaaggaattgaataagaaattatgtagagtagtcagtgcctggcagagagtaaggataaatagtattatcactattgataatcactattgagtacagtggttgcttacagagtatttcatctcacagtggggagaattctaacagaatcagcccaaactggcctgttcatgcatcccagcaattccttctgccctttatggtcagtgactgtctctctgcaccctccatccccatctcgatcactacctctacctctctactagtcacaaccttgtcacatatggtgtaattattcatatcaatttgataaggcttctaggttaacctcaagagaattgaattaaagtaggtaataccttaagcctcccttaaatcaaatattatccagaagagtccctcgttagccagttatgcttgatttgcattataacagtaacaagtaaatatttcccaaggtgccaagaccaggtggttttattccctctcaaacagagctctcaatgtcttcattaacctcagctccctccccacttgctttcttacagaagccgggggtgccatgattctgccccccaagtccttatgagaatgccccttatgacctcatagtcacactaaatttgacatcataaagaaaacatttcctgtgatctccacgcagccaccatgttgtaaaaactaagatgtcagactcgaagtgtggggtatgactttatctttccctggatctgcatgtggagaggacggagagtgggtgcacacaagccaaatctgagctactatcacactgaagcacacaatggccacgaaaggcatgaggttgaaatccacaaaagagggaagtagaacactaagcagtgggtttttcttaagtacattaagtcaggagacaagctgatcatgatgaaatgttataatgttgcttagtggtattgattcacaattgtgccatactgggcaaatttggaaagctatttacagacttctaacggggtattttttccagggaaagaaaaacccaagggactttcattttgttgagactgatcctttttttcttctaaaagtttatgtgacatatagctctatttcgagagatgattttatttttttaaaatttctacaagcttcattctgttttcaaagttcagtcctcccacctttcagcccactgtctggttccttctctttgacaagaattgtttagaagccacatgctgaattcatgtggttgttaagtagcaagattggactgttcagtttcttaactttctttctcttcagttttctaaatctttgcctattatttgtttgttttagtctttggtggtttaattaccgaattaaatatatgtagtttttaaaaaatgaaacaatacagtaaaaagtaaaagtcctatctaccttcttcacttgtcttgaaatctcaatttttagaagtaaccactattgatagttttaaacctaatttttaaatttttccattattttaaaaataaagcatttcagataaagttgcagccacctgtgcaactcctttttgttccactttccattcctccttctccagagataaaccctagcatgagttttcatatacattttaatttttatttatttatttatttatttttgagatggagtcccactctgttgcccaggctggagtgcagtggtgcaatctcggctcactgcaacctccaactcccgagttcaagcgattctcttgcctcagcctcccaggcagctgggattacaggcacatgccaccatgcctggctcatttttttttgtatttttagtagagacagggtttcaccatgttggccaggctgatctcaaactcctgacctcaggtgatctgcccgcctcggcctcccagagtgctgggattacaagggtgagccaccccacccagcctattttaatattcctaatacaaaagcactaaaacatcgtcctacaggtttaaaactttatagaaatggtattacactggaagcaccattatgaaacttactatttgttttaatactatgtttttgagattttatctatcttgatttatttttcctgctctatttttccactaagtgcaataccattttttgtaaatacgaatatatttgaactttttttaacctcttattttttatgctttctgttaaatgtcatttttaaatgatcactgcttgtatttctattcctttagtgattgttttaaaagttttaatgtaatgacaattttttttttgagacagagcctcgcactgtcgcccaggctgcagtgtagtggtgygatctcggctcactgaaacctccacctcctgggtttaagtgattctcctgcctcagcctcccgagtagcttggattacaggcacccgccacctcccccagctaatttttgtatttttagtagagacggggtttcaccatgttggccaggctggtcttgatctcctgacctcaagtgatccacccgcctcagcctcccaaagtgctgggattacaggtgtgagccaccatgcccagccaacaattttttttaactaagtctcaaggtattttgtatttttattctcctcccaaacacaatgggggattttagtaccttttaattagtcattaaaaacctttcccccaaaaatcttgtcactgtgatttagagtttcacttttgcctttaggacatgtaatcttttttgactttcaagagttaattaaattttttaacagtttcagctgtatatctctttatatctaaaaagcatctttagttttctcttcgctgttgagtgatagtttagctggatataaaagtctctgttaactgtaaattccccttagcaaataaagatattattttcacatatctattatctgatatatatactactcctttatacagtctgttttgtttgagttgcttttaagattttcttttagattcagtatgctgcagtcttatgatgatgtgtctatgtgtggatttgtttttagtcttttgttgtgggctgatttttgatctgaggacttatttctttcattaaactctggaaaactcagctattatgattatggttttaaatgctgattatctaaccatctttctattctattcttttaaaatgtctattaatatatattgaagtttctcaatcatcatctagttatctatattatttttgtctctctgtgctatattctgaggaaagtctgcagtactatctatcacccagttcaccagttcttttttaaaaattttgtgtagcctagaatttattctattaagattattttttgtttgaattacaatgtcttttcttccaagataaatttttttctggttttttttcccatccatttcttcttaagacactttagtaaatttttgtacttttatatggctgtaacatctttgaacaacctaataataaataaacaattttaatcataattaatttaaagtcattgttagatggctcataaatttaatttattatcatgtgaattgacattctgattgttaatttgctcagctatgattttggcattttttggtgtatacttgggaattctagtatgttggctcattttcacaagattctttaaaaatctgccttttctctttctccttctatttggcagttgcctaaatccatccccttgatccatcccccaaccctcatgggcttttatagctcttgttccatggtgatgttgtagatatcacagattcaaagagtgccttgatttaggtcttgcgaggctacatcagtgtcctctctccctaagcaggaccttctttcaggggtgagagaccctcataccaatgctgacgtcaggcattgagcctgacataggcctttgtttttcagaacactcctagtcccactagctttccaggagttgaactccctctgccttgccatctttggacacacagcttaacaagcctacagcttcaacaacactcatatgtttacatttctgctcagctttttgtctctaaaaacctatcagcgtgtgtccctttctctctgtctctctttctctttctttttctttctttctttctttctttctttctttctttctttctttctctttctttcctttctttcttctttctttctctccttccttccttccttccctctttgtattattttcttaaacatagcaacaacaataacattattgtatcattttggaggcaagaggaaacataaaagcataaactatgtcacctcaattaaaattaaaaatttacctcttaaaaataatttcccacatttctaaaatgcctacatgctccttatgggtggaatcatttttgaaacaatgacagtatagcttggcattttcctgttaggcttttttgcatttttgtttaaatattaatatatggaatatacctttttgggaacatgcgtttattcctttatcaacaaacatttgttgagggcacactgtgtgccaggtactattctaagtgataggaatacagtagtgaatagcacaacatttcttgtcttatggaacttacattctgatagagagaggtaggtaatatgcaaataggtaaacataaagttacagttactattaagattaaagaagaatttggaaaaaaagattgaaggagggtttcaattctagagaagatgaggtaagcgtctgttaccctgtttgtgcctttgaatacaactgtaagtcttggatagaatacatggagaagctaacagtgaactttgaaattgaaagggtccccccaaaattggggaaggagaccagaatttgaagttccaccaaaccaatacatttaccatcttttccccccggagctgcttggcatgaaatcaaagatatcccaaaacccagaagtaagtaccaggcacagagagaaagaactcaaaaagaagcctcatttattgatcactaagcattctttcacacgtgtaagaatctcttatccgagatcacaccattgcactccagcctgggctacaagagtaaaactccatctcaaaaacaaacaaacaaacaaaaaaaggataagagaaatcgtcaaaatatggtaactataatcaaatattctcaaaagaaaatcaaatgtaaaataaatatatgaaaaaggtgtttaactcaaatagcaatttacaaagaagcaacaatgagatctatttcttattgcccactcttaccaatttgacagagacttctgaagataattcgcaattctaattaaggttttctgaaacagttttggcggtggttgttttttggtgtgtgtgtgtgcatgtgtgtatgtggtggtagtgatttctaaaatatatagttttaaacattgaacagtaaaggttagcaatgatatctcttttttctctgtgatttactgtgttttctaatgttctacatttattgtatattgactttatagtcagagaaaacatgttatacaactatgtagatgtattttcgaaggcacgcattaacctatcaagtgacactttcctttcctttgccattgacatgcaggtgttccctctggcacatgtgtgcaacgacacaaataagatgacattaattaacccccaaggagccaaactcaatatctacaagcgaaaagtggaacaggcaattcaatcctatgaaaagtgagtattactcttggctgctctttaatggatgtggaatttattttatggagaaggagacttctcttgttttagcttagcttttttttttttttaatgaagcagctatttaaaaattgttcaggctgggtgtggtagttcatgcctgtaatcccagcactttgggagactgaggcaggaggacagcttgaggccaggagtttaagaccagactgggcaacaataggaagaccttgtctctacaaataatttaaagaataatatcacaacaaggtgattgcaatcaacaataatttattgtacatttaaaaataattagaagagtatagttggagtatttgtaacacaaagaaaggatagatgcttgaggtgatggataccccatttaccctgatgttattatacatcatatgcctgtatcaaaatatttcatgtaacctacaaatatatacacctactgtgtacccacaaaaataaaaataaaattctgtgatgaaaaataaataaataaatacaggctgggtgtggtggtgcgtgcctgtagtcccagctacttgggaggctgagaagggagttacttgagctcaggagttggaggctgcagtgaactgtgattgcaccactgcactccagcctgggtgatagagtgagacctcgtctaaaaaaaattgctcataaggaatataaacaacagtggcagcagctattgtaggggcttcctacatgctaggcactgcatcaagtactttacctgaatatcttcaacaaggttttaaagaaactatcttccctttccaatatccataaaaatctcatgtttccatgagatctgtaaagttttnnnnnnnnnnnnnnnnnnnnnnnnnnnnnnnnnnnnnnnnnnnnnnnnnnnnnnnnnnnnnnnnnnnnnnnnnnnnnnnnnnnnnnnnnnnnnnnnnnnnnnnnnnnnnnnnnnnnnnnnnnnnnnnnnnnnnnnnnnnnnnnnnnnnnnnnnnnnnnnnnnnnnnnnnnnnnnnnnnnnnnnnnnnnnnnnnnnnnnnnnnnnnnnnnnnnnnnnnnnnnnnnctgtaatcacctccctcccccggtccccagcccttaattaatcctgggtgcacaaacttaattaaactctgagcatttggcttctgcaggccagcctgtcctcggttctgggaactgtgcagttgagttgtcatttgccaccatgcgggtgggtgaaataaagttcaggaaagttaactattggcccaggccagcgtatgttggtctgctgtcattttgcaatgtgtctagcatgtgctcagtcaaacaaatataaggcctgatcctgccccacgaaggatcattccaacggcagaccttgctccactgtgtccaacccaggcctctccaaaccccctttaacgtgagcctccatcgytgccctcacccgagagtggaggccgccttacgaggctcctcagcagcctctgtgggctcctcagtatttctgaatctttacctgagaggaaagaagaaccaaggatgagcatttctttgggaagcaggatgagctattcaaggctcacccttccccgtgggtcggagacttccagacaggccttgcctcccagctcggctcctctccggttatgctgctgtccccagctgggtctttcatcgcttctcacctcagcaccaatgatccttctcagagagacctctcgggagctcctctcagcgcccacccttcgtgtggccctcagagcactcacagcttctgcaggggcggtggcttggtgaccatctctgccctctaggatgtcagctcccaaggccagggctcagccagccttgcttcctcctgcataccctattcctagcaggcgtctgtgtgtatatgactattcaaatttaattcaaattttatataattccattcttcaaattcagtcattcaaaatgcaatataacaataccattcacattctaatgtagtttgcttgaataattcaaatatttgagtcctataattacccggcctgtgaaagcctgatgcagggccacgagctagatagagcttcgtggtcagatggttcgcgggggtttcctgcttggttttgacaccagctctgttccagtgtgtgacagtcgtgagcctcagattccttgttcacagaatctatctcacaggtctgttgtgaggattatgtaaatgatatgtaaagaggaactgatgttcattacttccccctttcactcctgactctgctgaccctaaaataaccataggtgcatggagtgaaatcgtcatctggttcttcccactgcattgaccttttcccaaggatttcaggaaaggacagggagccccttcccaggcaaaagagaggcctcctttcttagcagcaaaaccaaaacaaacatagtaagtcatttgtcctccttcttactttcagtgagtgaatctggaaaagccttttagtaccctctagagaaatattgtcactatattgttattaattatattaacatcaagttattaataacaattttaacatgattggtattatttaataattaagttactgattgaattgttattatttggtatcactaatttgatgtttgtatcaagtaaattatttaacattgttatttaatattaatagtaacatgaatattatacggaaccaaatttcctgatcatttgcattcaattgtgtttaagagtgttgttggtataannnnnnnnnnnnnnnnnnnngggtcacacttagtgcccatgcatgggagtccttttgtctcattttaagaaccgaggcagcaattttggctttgtgtgtctgagtataagctttgagtggatattgccagggctggctggattctggagtgatttttctgttgcttactttcattgaaagtctaaggtcaaggtcacagctctcagatcacagaagcagtatccgttctagcctggcttggggaccatgcttagaaacctctccttaccatctgcaatttgctgggccggctgcttcttggccttctgaagtgtcactagttacaagttgctttgcaaatgagtcaactcttggcacaagctgatgtgagaattagagatacagaaagttggtgaatgcaatcccttagccaaatttctctctcctacaaaaaacaatgagggaaactttgttagaaaaatccctgaatcatggggctggaccagccgcagagaggccctcaggtccagtgccgggcctgaatcccacagggactccctcatcccacttggctttcctgcggtggcctccctggacagtagagctgttgaagtattttagtgaagatggaaaataggggaataacaaaggctatgaaaatgtgctcctggaaaaatattttctaaagaagtgaattaaaattagagacctgtgctagcaaactggacccacatttaccaatgattactcagtgtttctaagccttgcttttcagaacctggagggaataaacattgagctattcgtgatcactttatgtatgcatctcacttaatcctctcaaggattccaagggcaggtggtgttagccttgtcttatcaatgagaaaacagtttccaaaagctacgtagcacaggatcacacagcagcaaagtgaggacaccaaggtttgaacccagagcccttaccacactcccagcctccacactacactgcctccactctctacatttacatttaaggggattgtgaatgggttttttgttcgtttgcttgtttgtttttcagagaagcacaaagatacctaaaatgcgtactataaatccttttaacaaatcttggaagccttaatcattattacctgaatcacatgattcaagaaagccaatttccaaataggcctcaaagaaccaaacatctcaagtgagacagaagcactgagctggcttatttccctcttcccgactctttttctatcacttagagcacatttacctggatcagacacaatttatgtgctgtgtacacactagctcaagtcctcatggcgacactaggagtggagcggtactactatccccactttaccgaaagttgggcactggcccaaagcctcacggcaagaaggagaagaagccgactgagctttgggccctggagttgtggctccggagtctaccctcttcagaggccctgtctgcagacaccctttctgtgttcttaccaggctcatgatgggagggcagggcaggagaatgcagccacccgaaatgtgtcctctgagccctgtccagctgatgctgggtccagtggttagaagaatgcctcctgaagagcagtagcattctcctacctcattgtatggaagcagtgttttttgtttttgttttttgtttttttttgagatggagtctcgctctgtcacccaggctggagtgcagtggcgtgatctcggctcactgcaacctccacctcctgggttcaagctattctcctgcctcagcctcctgagtagctgggagtacagtcgcccgccaccacgcccggctgatatttttttttttttttttttttttttttttttagtacagacagggtttcaccatgctggccaggctggtctcgaactcctgacctcaggtgatccgcccgcctcggcctcccaaagtgctaggattacaggcgtgagccactgcacccggccggaagcagtgttttttaatggaacatcagctcacaaccctggagccagtgttctctgccctgcagctcagaaagcctgcttttgggtaatgatgtcctgacatgatgacacagaactgggctgggaactctgaagaagcaacactgattagtagccaaaagagcagctatagctaccctgtaggaaccactagcttcaacctccttctttgctcttgggtcaacagcttccctctgaaaacgcgmtcagtctcagcaccgccagccagcagctgtgggtgagcaaggtgcttcatccagctgcccctcctagcagcctcgtttggaaaacaaggcagccagcctgcttgatctctaaagtgtgtcccaatcctattatttatgaccctgttaaactcttttgatctgagaatccaggcagaagagtgtctacagaaagcgaactaaagagcacagttatgttcccgtaagaagaaaaatggtgggtgtttagaaacgacttaaaacagagataatgaagaccagtttgtcaactgcctttactcagtctgagttttacctggctgagctgggaactgagccctcctttaatatttgacgcaattgccacaaaaccacgaggctgctgcagtgatgctgaggtgacacatccagtgtctttaagcacatgacagtggcctggctcagtggagatgatgcttagatgggctcccactgcggtgcctggggttaaccttttgccatgaaatgaagtactgctacaaaattattgttgactttttttttttaacaggcgcttgaataaaattgtttggcgagcattatctcaagaggaaaaagaaaagtaagccattccattccctcctcacttttttttttttggtgaaattcacgtaacctaaaattaaccattttaaagtgtacaatgcagaggtatttaaaatattcaaaatgttctgcaaaccactacctttttctagtttcaaaactttttcattaccccagaaaatcactttgtaaccataaattaatcactccccattcctgtctcccccttttctgggttaccaccagtttgcttcctgtctctatgattttggctactctggatatgtcatatgaagggaatcatacagcatgtgaccttttgtgtctggcagcttttcttagttaatgtaaaaacctcatgtttttaaggttcacccaggtatcagtactacatgtgtatatatacaccacgtttgtctgtccattcttccactgacgggcatttgggttgcttccgctttttcgctatcatgaactatgttgctatatgcatttgtgtagaagtttctttgtggacatatgttttcatttctcttgggtatatacctagcagtggatttgcttgtcacatggtaattctatgcttaactttttgaggaaccaccaaactgtttttccacagtggctatgccatttttagaacatatctatttatttttattgacccataataattgtacatattttggggtacatgtgatattttgatacttgcacacatgtaatgatcaaatcaggatgtttagactatctatcacctcaaacatttattatccctttgtgttgggaacatttcaagttgtctcttttagctattttgaaatatacagtaaattattgttaactatggtctccctactgtgttttcaagtgttagaactttttccttctacctaactgtatgtttgtgtccaatagtcaaacctctcttcatctcccccacctccacacacactcttccctgcctctggtaactatrattctattttctgcctccataagatcaacttttttttgtttttagctcctacagatgggtgagaactatttgtctttctgtgccgggcttatctcacttaatatcatgacctccaaatgatattaagtgctgcaaatgatattaagttgctgcaaatgataggattttgttcctttttttggctgaatagtattccattgtgtatatataccacattttctttatccatccatccgttgatggatacttagtttgtttgattccatatcttgctgcaataaacatgagggtgcaggtgtccctatgatacatattgatttactatctttggataaatatccagtagtgagattgctggatcatgtggtaggttctcattgctccacatcctcatgaacacttgacattttccttttctttttttttttaagtcattctcatgggtgtgaaaggctattctgctgtggttttgatacacattttcttaatgaccaatgatgttaaacatcttttcatgtgcttgttgtccatttgtatatcttctttggagaaatgtttattcaagttctttgtccattttccaattgggttgtgtttttgttgtataacttctgaggattaagtcattatcagatatctgatttgtcagtattttctcccatgctatgggttatcttttcgtattcttcataatgtccttggaggtccaaaagtttttaagttttaggaagtgaattcttctttttttttcttttgtttgtgtttttggtgtcaaatctaagaatccattgccaaatacaaaatcatgagcatttatccttttgttttcttctaatatgtttacagttttaggtcttacatttggacttttgatccatttttgagtgactttttgtatctggtgtgaagtagggttccaacttcattctttttcatgtaaatatccagtttatccagcactatttgtttaagagactattctttccctttgaatggtcttggcacccttgtcaaaaatcatctgaccataaatgtttgggtttatttctggactctctattctattccactggtctatatatgactatatttatgcaagttgacactgttttaattattgtagatttgtattcagttttgaaattaggaaatatgagtccttcaactttgttcttctatttcaaaattgtttgggctattcagggccccttgaagttttgtatacatttgaggattggcttttctatttctgaaaaaaaaattggaatttttgtagggattatatttaatctaaagattgctttgaagagtattaccattttaacaatattgttttccaatcaatgaacatagaatgtctttccatttatttagtggatctttaattccttcagcaatgttatatagttttcagtatacctgcctttcacatcctctgttattttgttcttttgggtgctattataaatgggattgttttcttaacttcattttcagattgttcattgctggtacataaaaacacagctgaattttgtattttgactttgtaccttgcaactttgctgaatttattggtactagtggctttgtggggaatctatggggttttctatatatagaaacatatcatctgcaagtagaaataattttacttctttctttctaatttggatgccttttatttctttttcttacctaattgatctagctagtacttccagaacaacattgaatagcagtggtgaaaggggacgttcttgtcttgttcctgatcccagtgagaaagaaaggaagttccctatattcctagtttcctgattgtttttatcatgaaaagtgtgtgttaaattttgtcaagtgcttttttctgtatctattgaaatgatcatggatttttccctttgctctactaatgtgatgtattaaatcatgtgattttcttgggttgaaccactcctgcatttctggcataaatcctacttagtcatggtgtataatccttttaatgtccttttggatttgatttgctagtgttttattaagaatatttatgtccatatttataaagaaaatggtctgtagttttctttgacatgtttgtctggccttggtatcagggtaattctcttcttgctgactgttaagaagtattccctcatccattttttggaagagtttgagcagtattgttgttaattatttgtttggtagaattcaccagtgaaggcatctgcttcttaatttccctttgttgggggattttttatttcttatgcaaagtatttaattgttatataggctgttgagtttatctatttcttcttgagtcattttggtaatctgtttctaggaatttgtgcatttcatctagattatctatttttggcatagaactattcatagtattctctataattatttttatttttgtaagctgaattagtaatgtgcctgctttcacttctgatagtagtaattatgtgttttttccttttagtcaatctagctgaagatttgtcaactttgttgatattctcaaggaacaaacttttcattttgttgattctctcaattgtttttctattctgtaatttgtttataagtgctctcctctttattatttccttcctctgctggctttgggtttagttttccctcctttttctaggtccttaaggtgtaaatttaggttgttgatttgagagctatcttttaatgaggaatttacagtcataaaacttcttctgagcactggctttgctgcacccataaatttgggtgtgttgtgttttcattttcatttatctcatattgctttctaatttctctagtaatttcttctttgccctattggttgtttgaatgtggtatttaatttctatgcattttccatttttccagttttcccttcattgttgctctagctttattccattgtgggtgggaaatatactttgtgtgatttttgaccatttaaatatcttgagaattgctatggttaacatatggtctatcccagaaaatgttacatgtgcacttaatgtatattctgatgttgctggatggggtgttttggatatgtttgttaagtctagttcatttatagtgttttctagtcctctattttcttataaattttctgtctagatgttttatccattatctaaagtgaggcgttgaagtctccaactatttttacacagttggcccctccatgtatttgggatctgcatccatgattcagccaaccatgcataaaaaatattaaaaaaaagaaaaataatggtacaacaataaaaatgcaagtaaaaataagtatagcataacaactatgcagcatttacattgtatttggcattataaataatctagaaatgatttaaagtgtacagaaagatgtgtgtaggttatatgcaaatatgacactattttatttaagaggcttgagcgtctgtggattttggcttccatagggggtgctagaaccaatcccccatggataccaaggcataactatacataactgtctatgcctccctatgattctgtcaatatatgcttcacacattttaggaatcagtatgcatgtatgtttctaatttttatatctgcttgatgatttgagacttttagcaatataagatgttaccttttgtctcttgtaacaatttataacaaatctattttgctggtaatattatagccactccaactctctttggttactatttccatggaatatcttttttcatcctttcgcttttaacctatttgtgtctttaggtctaaagtgaatctctttttaagcaccatatatttggatcattatttacctcattctgccagtctttctgttttaattggtgagtttaatctctgacatttaaagtgattaccaataatgaagaatttacttctgccattgtgctatttgttttgcatgtcaaaagttttgttcctcaatttgtccaatatttgtttcttttatttttgatttgttctaatgggtcgttgtgatcgctctttatttccttttctgtatactttttagttattttcttagtggttaccatgggaattatagttaacctcctaaatttataacaatcttgtttgaattgatatgaagttagttttagtagccaacattaactgttcctattcagcttcaacctctttcatatagttattgtcacaaattatatcatttacattgtgtgcccattaacactgatttgtaattattattttacgcatttgcctcttaaagagtaaagaaaacaacaaaaggaattacataccaaacatacaagaatactagtgtttgtatttacctgtgtagttatctttactagtactatttatttcttcatatggcttagaattatcttccagtatcctttcacttgaacatgaagagctctttatagcattccttttaggacaggtctactagtaacaaactctcttaccttttatttatctggaaatgtcttaatcttgtcttcatttttgaagagtagtgttactagatagagaattcttgactgacatattttttttcaggacattaaatatatcaacatgttgccttctggcttccatagttgatgatgtgaaatcaactgttcatcttatggaagagtccttatttatgacaagtcacttttgtcttgttcctttcaagattctctctttgcccttcaatagtttaattataatgtgtgttggtgtgactcttctttgtgtttatcctgctggaagttttctgagcttcatgaatccttctccacatccttggcaacacttcttattttctattttgttttgtttttgtagtgaccatcctaatggatatgaaggatatctcatagtggttttgatttgcatttctctaattatttttttacatgattcctggacatttgtatatcttctttggagaaatgtctagtcaagccctttatccattttgaaactgggttatgttgttgttattgttgagttgtaggagttgtttatatattctggacattaacccattctcaggtttatgatttgcatacactttctcccattttttaggttgctgtttcactctgttgatgtgcagctattttctttgatgcacaaaagtttttaagtataatatagtcccatttgtctatttttgcttttgctgcctacacttttggtgtcatatccaaaaaagcttgccaaattcagtataatgaagctttatccctgttttcttctaggagttgtataggcttggatatttaatctgtttgagttagtttttatatatgttttaaaccaagagtccaacttcattcttttgcatatggataaccagtttccccagaatcacttcttggagagactgtcgtttttcctttgtgtagtcttggcacccttgtcaaaaatcacttgacaagatcacatgagagcttatttatggactctttattctgttccagtattcaatatgtctgtctttaggccagtaccactgctttgattacactacagtgttttgattattgtagctttgtaatgtgttttgatatctggaagtatgaggcctccaactctgttcttctttctcaagattgttttggctattcaggatctgttgaaattccatataaattttaggatctttttgtacttatacaaaaaataccattgggattttgatagggattgcatagaattgtacatcactttaggtagtatggacattttaacaattaagtctttcaatccatgaacacaaaatgtcttttttatttatttgtgtcttctttaatttctttcagcaatgttttgtagttttcagtgtacaagtctctcacttccttaaaattattcctaatttgttctttttggtgctattgtagatgggattattctcttaattccttacctgattgttcattgttagtgtatagaaatgcaacttattttgtgtattgattttatatcctttaagtttgctgaatttattagttctaacagtatttgtggaatctttagggttttctacatggaaaatcatgtcctctacaaacagataattttacttcttttctaatttggatattgctcctttctttttcttgcctaatttctctaagacttccagtactatgttgaataaagggagaagagtggacattgttgccttattcctaatcttagagggaaagcttycaatctttcattattaagtacaatagtagctgtaggcttccttatgttgatatagtttcttagtattcctagtttgctgagtgtttttatcatgaaaggatgttgacttttgtcaaatgatttttctgcatcacttgagataatcatgtgggttttgtccttcattttgttaatgtggtatattacattaattttcatatgttgaaccatccttgcattccaggaatgaagcccatttttttcatggtgattatctttttaacatgctgtttaattcagtttgctactgttttgttgaggatttttgcatcactgttcaccagggacattggtctgtagtttctttttccttgtagtatctctgtctggttatgatatcagcgtaatttctgtctcataaaatgagttaggagcatttctcccttttcaatcttttgaaagaggtttgaagagaattgttattaattatttcattgtttggcagaattctccagttaagccatgtggtactgggcttttatttgttaggaggtttttgattattgatttgatctccttactagttatagatctattcagttttttaatttattcatgattcagtcttagtaggcggtatgtttctaggaatttatccatttcttcttggttatgcaatttgtcggtgtaatattgctcttagtagtctcataatccttttaatttctgtgtcatcagttgtaatgtttccccttttgtttctgattttagttatttgagtcttctctcttttttcttggctagtctagctaagaatttgtcaattttgtaggtcttttcaaaaaaaaacaaatcttgctttcattgattttttttctattgtttttctatactctatttctaatctttattattttcttccctctgctaacttgggctttcatttgttcttttcctagttccttgaaaagtaaagttaaattgttaatttgggaccttcctccttttaaaatgtgtttaccactataaacttccttctcagtactgctttcactgcatctcatacatttcgatatgttgtatttttccttcatttatctcaagatatcttctaatttcccttgtgatttattctttgacacattggttgtttaagaatatgtgacttaatttttatatttttgtggattttccagttttccttttgttattatttctaggttcatttcattttgttcagaaaaaatactttgctttcaactttctttttttaaatatttgttttgtggcctaacattcagtctattctggagaatattccatgtgtacttgagaagaatgtgtattctgctgttgtttggtggagggttctccacatgttggttaggcccagttgattggtggtgttcaagtcctttgtttcattattgatattctgtgtagttgttctgtccattattgaaagcagagcatgaagtctcctgctaatactgggttgctgtctatttcttcagttctgtcaaagcttgttttatgtatctgagagctctgatgctaggtgcacatataattgttatatcctcttagtggatttgggtagtatggacattttaacaattaagtctttcaatccatgaacacaaaatgtcttttttattaagtcataagttgatataacaacttatgacttaaaatctatttttttattttttatttttattattatactttaagttttagggtacaygtgcacattgtrcaggttagttacatatgtatacatgtgccatgctggtgcgctgcacccactaactcrtcatctagcattaggtgtatctcccaatgctatccctcccgcctccccccaccccacaacagtccccagagtgcgatgttccccttcctgtgtccatgtgttctcattgttcaattcccacctgtgagtgagaatatgcggtgtttggttttttgttcttgcgatagtttactgagaatgatgatttccaatttcatccatgtccctacaaaggacatgaactcatccttttttatggctgcatagtattccatggtgtatatgtgccacattttcttaatccagtctatcattgatggacatttgggttggttccaagtctttgctattgtgaataatgcctcaataaacatacgtgtgcgtgtgtctttatagcagcatgatttatagacctttgggtatatacccagtaatgggatggctgggtcaaatggtatttccagttctagatccctgaggaatcgccacactgacttccacaatggttgaactagtttacagtcccaccaacagtgtaaaagtgttcctatttctccacatcctctccagcacctgttgtttcctgactttttaatgattgccgttctaactggtgtgagatggtatctcattgtggttttgatttgcatttctctgatggccagtgatgatgagcattttttcatgtgttttttggctgcataaatgtcttcttttgagaagtgtctgttcatgtccttcgcccactttttgatggggttgtttgtttttttcttgtaaatttgtttgagttcattgtagattctggatattagccctttgtcagatgagtaggttgcgaaaattttctcccattttgtaggttgcctgttcactctgatggtagtttcttttgctgtgcagaagctctttagtttaattagatcccatttgtcaattttttcttttgttgccattgcttttggtgttttagacatgaagtccttgcccatgcctatgtcctgaatggtaatgcctaggttttcttctagggtttttatggttttaggtctaacgtttaagtctttaatccatcttgaattaatttttgtataaggtgtaaggaagggatccagtttcagctttctacatatggcttagccagttttcccagcaccatttattaaatagggaatcctttccccattgcttgtttttctcaggtttgtcaaagatcagatagttgtagatatgtggcgttatttctgagggctctgttctgttccattgatctatatctctgttttggtacgagtaccatgctgttttggttactgtagccttgcagtatagtttgaagtcaggtagtgtgatgcctccagctttgttcttttggcttaggattgacttggcgatgcgggctcttttttggttccatatgaactttaaagtagttttttccaattctgtgaagaaaggcattggtagcttgatggggatggcattgaatctgtaaattaccttgggcagtatggccattttcacgatattgattcttcctacccatgagcatggaatgttcttccatttgtttgtatcctcttttatttccttgagcagtggtttgtagttctccttgaagaggtccttcacatcccttgtaagttggattcctaggtattttattctctttgaagcaattgtgaatgggagttcactcatgatttggctctctgtttgtctgttattggtgtataagaatgcttgtggtttttgtacattgattttgtatcctgagactttgctgaagttgcttatcagcttaaggagattttgggctgagacaatggggttttctagatatacaatcatgtcgtctgcaaacagggacaatttgacttcctcttttcctaattgaataccctttatttttttctcctacctgattgccctggccagaacttccaacactatgttgaataggagtggtgagagagggcatccctgtcttgtgccagttttcaaagggaatgcttccagtttttgcccattcagtatgatattggctgtgggtttgtcatagatagctcttattattttgagatacgtcccatcaatacctaatttattgagagtttttagcatgaagggttgttgaattttgtcaaaggctttttctgcatctattgagataatcatgtggttttttgtctttggctctgtttatatgctggattacatttattgatttgcatatattgaaccagccttgcatctcactcaaaacygctcaactacatggaaactgaacaacctgctcccraatgactactgggtacataacaaaatgaaggcagaaataaagatgttctttgaaaccaacgagaacaaagacacaacataccagaatctctgggacgcattcatagcagtgtgtagagggaaatttatagcactaaatgcccacaagagagagcaggaaagatccaaaattgacaccctaacatcacaattaaaagaactagaaaagcaagagcaaacacattcaaaagctagcagaaggcaagaaataactaaaatcagagcagaactgaaggaaatagagacacaaaaaacccttcaaaaaattaatggatccaggagctggttttttgaaaggatcaataaaattgatagactactagcaagactaataaagaaaaaaagagagaagaatcaaatagatgcaataaaaaatggtaagggggatatcaccaccaatcccacagaaatacaaactaccatcagagaatactacaaacacctctacgcaaataaactagaaaatctagaagaaatggataaattcctagacacatacactctcccaagactaaaccaggaagaaattgaatctctgagtagaccaataacaggatctgaaattgtggcaataatcaatagcttaccaaccaaaaagagtccaggaccagatggattcacagccgaattctaccagaggtacaaggaggaactggtaccattccttctgaaactattccaatcaatagaaaaagagggaatcctccctaactcattttatgaggccagcatcattctgataccaaagccaggcagagacacaacaaaaaaagagaattttagaccaatatccttgatgaacattgatgcaaaaatcctcaataaaatactggcaaaatgaatccagcagcacatcaaaaagcttatccaccatgatcaagtgggcttcaaccctgggatgcaaggctggttcaatatatgcaaatcaataaaatctattctttaagttcactgattctttcttctgcttaatcacatctgctgttgaacccctctagtgaatttttcaattcacttattgtattcttcagctctagaatttctatttggttcttttttatagtttctgtctctttgttgatattctcattttgttcatgcatcacttttctgagttgtatttgttgtctctgttttcttttagctcattgagcatcattaacattgttgttttgaattatttttcaggtaattaatatatctccattcctttttttttttttgctttgtaattagtatattaaggagactatatatttcaagaattgcttaaattctgatacccagatttaagcatgtgaacatatgagactcttaaacatacaattaaagctattcatcataatttgctatactaccaacattactttggagcgtaagtcaaatggtttaaagtaatcctgtaacatacctaaagaacaccttcctatattatgcatgcaaattctccacgtaaaggtcttttcactttaatttctatgttacccagctctgaagtcactactcaggcttatcatggtccacagacaagaaggggggcaaatgaccaggactggtcaagaatatatctccatttctttgggaccaatttctaaagatttattttgctcatttgattgggccatttcctcatatctttgtgtgcttttccctacattttttatgccttatsatatttagttgataatatgacatttgaaaaaacagctatctcatccgattttcacaaactggcctcttacaggtgaagggcttcaccaattatcccagctagagatttgggggactctctgaaaccttttctggggatgtgtcttctctgggcttgtgtgtgtaatttcccagtgaaaaagatttgcccgtttctttcaggagcctgtaatatcttgttccccctggtgtctctctgaagtactgcagtatctccaatgctgtaacaagctgtgacactcatttctgttctcagaggtcccaacctgacctgcaaaatatrccactgttctcatcagcattctgaatcaggcaagacggaaacctatttcttcagaagtcccccaaaacacaagaattttgaatgtgcattccactctcttctccaaaggaggagccaggattggggagctttcttccaattgcatcacattgttttggggaggaggggaggttagggcaggcaaaatgcaacaagctttcttactctccttcatgcagcttttcttgggtttgtacttgtctgaggtgccacaacctcttcatttgtttctggaattctcgcaaaggcgatttggttcatatattgttaagtcagtgtctctgtaggggaatgagggcctgggtttttattccaccatcttgctgacatcattccaataagaatgttttgctgtcttctgggtacgagtttgtttgtggatggagtcctgtgattgtgctgagtttagactgttctcttccaaaatccaacatctaaataaataagtgatgctttcagcaataagagtgataatcatgaattgttttctttctccctacccattccattctagcagtgtctgactcagaagcagctcagactggaaacagaatccaggacctgggccatcacaccacactagcttcccctggagtcccaccgcctgcttatcagccatagaaagtttggcttctgttctttatgtatcaaaacagcaaagccaaatagtttagacttatttaggcttgcaaagaggaaagragataaaaatagctaaaatgagctagtataagaattactgcactgaggcaaatatttgggtttgttttgctttgctttgtttttcagagtcactgctaggcatacttgtgtgaaatctctttgaagcccatgtttggttctgccagatgtcaggctccaaatacggagaaaaaaaaatgctgaaaattttatgtgtatcatacttctttaaaatcagataacctaatgaggtaatagggaaaagtgcctaccataattcacagagatggttatttctaacctttgcaagctaccaaagtcctgatagagcagagggcatggctatgatgctgtcatctgacacctgacactagcttcaacagatgtttctcaggggagaatttcttaggaaaccatcttaccatatttttttattatagtcattttctttgctttttgtttcttcctctgtttgtttgtttgtttctttgttttttaggttagatgcaaacaaaccaatacagtacttggaaaacaaaacagttttaaaccaggctttagaacggttgaattggcccatttcactgaaagagctgtcgatgctggaaagtgaaatcctagctgggaaaatgtacatccagcaggccatggaactccaggaggctgccaagaagaattatgcaaacaaggccccgggagaggtgggtgccctggaggtctctgtctttcctccctctctgcctatcccaagtcattgccattcctacattggcttccttctctgtctcccactccccgccacactgatttctaaaagtgttagagccaatccagttaaggtctcagtactttttttcatcataaaggaaatgccattcgattgtactatggacttatttttaaaacaatacgtcttttaattgaaaaaaaaaagctaaatagaagtataatgtagtgattaaaagcctggactttcacaggagccagaccaagaactagccgcagatctaccatctaacctgtgtgtgattttggttactcagtctctttaaacctcagttttcttacttgtaaaataagagtattaatagtatccatctcatagggttgttataaagagaaatgaacatgtgaagtgcttagtattgaaagctccccataagtgttagcaattttttttaataatcattaataaggcaaaccttctagaaagaaaaataatttataatccggttgccttattgctaccacttgggagcctttccttttagttttttttctcctcaaatgttttctacataggtgcaatcagagtgtccataattattgtatattctgcttttaaatttagcattatttcatagactttctctgtgtttttattgaattgtcagattcatatgggtgatggttacataatattccatggtgtgagtataccctggtttatttgattcttcactaaatgttaaacatttatagttattttccagttttctgctttctcacataatatttgcatgactactgtggtgcacagttgaattattttgttaagatacagccttagaagtagtatttctggatcaaagagtataaacatttggagtctataaatacacatggccagtgtgaaacctactctctgactatacatgggtgtgtgtggacggtgctttgtttgaatgtgtcccccagagttcatgtgttggaaacttgatctcccttgcagcagtgttggaggtgggacatttaagaggtgtgtgtgggaaaaacagttctctcaaccggtgctctcgcaccacaacagcaatcatcaacagggaagaaggcttctgtgaccaaaggtgtgggggatttccccacacataccaagcggcagacaccggttggttctcctccaattcaactctgacactacctacctagagatgacatcagatcccacaggttgagggctcagtccccaagactggccctcccaacacatcagtcacaagtctgggcctccagaacttctgactgacccgcttcaagttggggttcccacaactccctctttgagtttgattaatttgcgtgagtggcacacagaactctgggaaacaccaacgtttagcagtttattataaaggatattacaaaggatacagatgaagagatgcatcatgtgagcgatgcaggaagggtgcagagcctcctttccctgagtgctctccctgggtgggccaccctccaggagcctccatgtgttcagctgtcagtaagctctccaaaccctgtccttttgggttcttatggasgcctcattacttagggatgatcgattaaagcatcggctctagtgatcaacttaccttcagcccctctcccctcctggaggttgggggttggcgctgaaagtcttaactctctaatcctgccttggtctttccggtgaccagccccaccctgaacctacccaacaaagacacacaaagaacagtacttcagagaccccaaggatgttaggagttatgagccaggaatcatggaagaaaagaaatgtatatctatatgccatataaatatatatatgccatgtaaatatatatatgccataataccacaagctggctagaccatgagggctctggtcataaatggaccaatgccattatcacaggagtggattccttattaaaggaattcctttttaaagagcttggatctctgttgtacactctttctatcccatgtgatgccttttgccaggttatgggcagcaagatggccctcaccaggtgctggccccttaatcttggacctcccagcttctagaacagtgagccagtaagtttctgtctattataaattacccagttggtggtattctcacagcagcacaaaacgaactaagagagatctggaatagttcatccaaaatcttactaaatcctagataattttcagatgttcaccacattatagtctaaaaatcattcccaaagatctgacctttcaggttcatcatctttggttcagtctttgccaagtgatactggtttagcctggcttaaaattctctttttgatgctctagattcttgtgttttgtttcattttgttttgtttgttctctttcattttattctttcttctgcaaatcacattttttcttcagtgtcaaaagctatgtcttttgtgcagaatgtaaaatttttatcacagaaggtcatatgtctagtaatgttattcaaacaaaatgacttcctcaaagaattattcagtgtttctttgggaagtaccatctgacacccccagacatttctctgtckatttaccttcctcgcctgcatgccctgtgggcacctaagactcaagaggaccaagagtgaattacctgcctctccttgaaaagatgatcttcttctcattgtgcttttccctgtctgcttgctctttcacttattcattgaaacatttatgagtgcccatgagatgccaagcactattcgaagcactgggagtacctagaacacaacagacttagtccttagactatcctaatttgaacgaggatgacagaccatggccagtcccaggtgttgagctgtggagaccctgctgcataacagcagaatttgctggcatattcttttatctatactttatattaaatttgcaaataggaagtgttgcgaatggagtgaaaagaagcctcttgtgattcagagcagagataattgtgttccactgagttcatctggaattctggcaatcaagctcattgtttacaacatacgaattaattgaattaattgttctatttctttcttttcttaccacaaaatgggaataaaaataattcccgtaatttcttcatccaaaaatcatggataggattctgcacatgggacaggtgccctcaggtgttgagtrgcctctctcattcttttctgtctccctgggatctcccagggggataccttatattggacacaaaatggggatttgttagctgtgttgaatgcatgggcccagcctaatggaggagacattgcaccagagcatcactgctgtgagagccaagaactggtctggccttatttgtagctgtgtccatggcactgacagtgaagcccagtgcccaggggccacttaaccatgtgtattgaatgagtgaaatgcaaacccttacagcctttcactgtattataaatacaacagaggcacccccagagaacaatggaagatggggaaaagtgacctgactgggcagttagggaaggcttcactaatccagtttagcccagaaggatgcctaggaattggggactgggctgtgagaagtgtttggagtgaaagaaacagcctgggctcaggcagggatgtggggaagaacgcggagtgttccctggggaacgtggcaggagagacgttgggcatgggaggaggtaccagaaaacgaggtatttgaactctgttggggtcaggaacttatgcctgtaggaaatggacaccagggaggggttttcagcaagtcaaggacattcacggatgtgtgttttagaaagattattctgacagtgagctgaggcccaacgtaaaagaccaaaatccggtgcagcgctccccttgagaggtgttgagtccttgagccaggtaggaacactggggagagaacaggtaacagagacatgggttatgggaaagtaggccatgtggggcaaagttgaaggtgctcacaaaacttctgccttggacaactgtaggagcagaagcactgctaccccttccatccttcctctgctccwcagggagacaggtgcaccctggccagcctatcccatcacatgtcatcctctaaccgtctgccacgtgtttgtttatttygcagcacacttcactacctgacattatgtacacttttgtttacagtctgtcttccccactgaaataagggtgggacttggtttgtggtgctgtaggtgctcccagagcctagaatcgtggtgggcaccttgtaggcatgcatacatatttcaatgaataaatgaaagaacaaacacagaagaggcacagtgagaggaaaagcagattttcagggaaaggtagttcactttcagcgctcttgattcttagatacccgtggggcacacaggtgagagaggccaataaacagccacatgtctggagtttaggagagaggccagagttaaggagatagatttggaggtaatttcaggtgctgggagaggaggaggagagagtagaagggaccaaggcggatgaggcccggggtagagagccaaggacaagaggcagaaactcagcttagaaggcctgagtagcgtcacacagctggaagatggcagtgctgagatttgcattccagtccacctgacttcaaataaaaaaatcaaagcactggactaaaagatggttgtgagaccacgtacttcacatacctgggagagtgcacagcaccaggtgctcagcagtaaatgcacacaacatatcagtgatggctctttccactgctaaagttattatcaaggaggtttggaaagacatgcagaatgatgtctgaaagccatttgacttgccaagagaaggtgcattagtgaggttggccagaataatgccagtggaatggtgggggcaaaggccaatttgcagtgggtagaagggtgggtagaagtggaggaagttagtataagaagtgaagactttttcttccagatcttcactgggaaggcagggagaaagaaggtgggaacatcaggtgagccagtgcaggagaaggcatttagtttgtgcagtggcatcactgggtctgctgctgcctcttggtcaggggctaagactgtcccctcactgccttgccctcaacaggctgtcgaaagccacccttgtctgttaggggaacgccgatgttccagcatagatgtccctaggtaacggggagaggtcacatctggtgacttctcctcagagatctttccactcgtggcatggctctctgcagtggaagattttgaatgttgttttcttgcaatgatacttctcctttccatgtgtgatagattctgagacttcaaaatgccattactgtcacaccccgcagattcgattttgtgacccactaacaggactcaaactttggtgtgtgaagctccaggtttcaaggccttctgagatcctggggtgaaaaacgcatcagagatgcaagtcatttttcctgatttatatgtaaatacagtctcattttaaattcttttagcaaaggccaaagcttttgatggatgagtataaattgccatgaaagagcccctctgttcatcattaagcacccccatgagctgactgataacaagcagcaaaatggggatgagaccattcagagtgggctgcccatgtgtgtccagagggctgtggccactgcgtttggagtgggctgcccacgtgtgtccagagggctgtggccattgcgtttggaatgggctgcccatgtgtgtccagagggctgtggccactgcgtttggagtgggctgcccatgtgtgtccagagggctgtggccattgcatttggaatgggctgcccatgtgtgtccagagggctgtggccactgcatctggcctgctccagggtgcgttatggagtctggatgaccggggctttctgataccctcatctggaacagggttgccctcccccgccccatagctgccttgccgattcctaagtttggggcagcttcatgatttttctgtcagtaagaaccagcggtgggaaggagacacggcagcaaatgctgtgtccagggagcctgtgcctgctttttatgctccagcttccacgggcagttcctggctggcccagatgagacctaaagtgagagccgttattcccacctgctctgcctggcatcctgcacagggcacattccatgcttgactgtatgatggtttccacctatgtccataatccacaggcttcgtggtgtccctggagatggccacttggctcactgactacataatgacaggagaaatcttaagtctgaaattttaaattccctttgaaaactcccctccctagcacccctcatgttactgtgattgcagatttcaccctcactagccaatccagagccctcagagctgaacgataggggaagttgccggagggcatctgtgaattataattaatcctccctgggagcctggtctagggcagcccagctgtgctgtcctccaacattttctgaataaataaagattgttctccagggcaaatcctttggcccagaaagatcaaaaaggctctctcacccataaccttgactgctttggaaaatctggaggtagaaaatatttttaagctgaaagcagctctaaaggaggccgtggaaagttacccacaccactggctgcacacgtttccttctcaaagccgtgactggcaaggaagctggagcctatggccttcaggggtggggaattgagtgctctgctccgggagaaagagagcgttaggaaaatgcacacagggaggcaggcatgggcgaggctggatgaggtggaattaggagaaggaagagaagagatcatttgctgttgagaacattctgttgggttgtgactttgacactatacatgcaggaagatgttagctggggagacagaggaaagtgtctttcagttatcagttatgtaaaataaactcagaatatatacggctgttatctgtgtcccagatagtaaatgaaccaattgtcattcttcaattgtaacttttttttttttacagtccattaacgggaggtgtgaggcattacaccctaactgactagtcggcctttccaattccactagtaaaaactttagtctgttttgctgatattcaggtctgttgggaagactagctccctagtggctgtgaactgttctccagtggaacaagatctactgatgttgagacaggaaattttccctgaccccttcatgggacttgcaaagagggtggcttgtttactcagcccgtggctctcagcccctctcgggagagggagcacgcaggtgagtgggtgcaggggccaagatgagtacttctgggtgccggcaggagcagaactctgtgtggccccaaggcagcttctagaggagtacccacaacccctggagccccagagggcgtgtgttaccgtgctcctttagtgttgctgtccacagatggctaagtgtttaactccttggtgtgacagcccgctgtatccctagctcttgttcagcatgcaggaagaatcaggtcacacgaacaaattgaagatggtaaatacagggaattttattgctgatgaaagtgactctcagcaggatggagagctagaaaggggatggagtgggaaggtggtcttcccctggggttcagccatcactggccacactcttctctgaggtcccgccatcaagccatccccctgaagtcaagctgcttctcaacgacgtcaggctgctgcttctcttttctccatctctgctactccactgccagtggagcctggagtttttatgggtacaggatgggggggtggtgtgggccagagtggttttgaaaaaggcaacattcgagaaggaaaacaggaatgtgggtccaggcttgagagtggggccctcactggggactgctgccttctacccagtatttccctgcctcctgtccatatcagtgggcaggaagttaacaagtctggggtgtgcactggtgatgttaccatcacacagaagtgatgtgtgcacattcagaccatgccgtcctcagacagcactgcagtgatggtttagcatctggaagtgggacccctgatgggcctccagggcatgtggccagagtgaagctgaaatcccagaggcagtgagaggatgacaaagagaaaatgaagcccttcattactgtgccacgtttatctaggggttagatggggctttaaggagagaatcctgctcagaaacaccagtcactggaggaaactgaaagaagggggaaaatatccccaaactctattttctaagaagtcttctgtctcatgtcctgatgttcaggaatgggaaggtgggtgtcaactctggggatccctgaggtgacaaaaacttagaaccaggctgtcttttcattctgaagctaaaggcaccctcctcgctggagattcggctgggcagatgccagcactctcctgcctctacatttgtctttgttcccaaccatgaattctacccaagcaccctaaacagatctggggacagatttgccctccctgtctggaggaagaaaacggagtgtagagggcttagcaggggccactcaggaagcagaatccaattcattcagcacaagtgaagaaacgttaaygaaggaactctttgcagaagtgaaggtcagtctaaggcagtccgtgggatattgcaggaccccaggacaagcaatagcaggaagctgttatcatccccagacttaaaggggcaagggaaggaaagcgtgttcctggagccctagagagaaagagcagggagtgggcaggacaccaataccccggcttcctcctgccttctgagcttggcgcgtgcctcaagacagcaaaaattagggagatagggtggtgtgttccctgggggccagcctctgggggtacagagcagggcaaggaagggcagagagcaagggggatgcgtgagtgggggcggaatagccagcccagaggagtggatgtcttgaaaagttttcttaaagactcagaattcatttgcacaccagtctcgtgtgagatgtttgtgtaaagtaggtggctggtagtggttcatacgtcaaggcagtgccacgaaagtggctcccaagtgtggcttttgttcatctccggagtagcgggaaatgaataactgtatcaggaacgcgaaattacaaatcccaagctttggtgatttccagatataaatatgtaacacacttcaaatttttctctctttgtttgtttgtgtgttttttcctaaaagagcaataagggaatatttcctgagatgacgttgcaggtttactttcaagatagggaaatagttttggatttttttgtttttctgtttggaatatagtatatgtttattagattcctttgctgccacaaagaaaagaaagagagagagagaaaaaaaacacacaagtttattttcagcaaagctttgaggtagctatttgttaatgtttgactggaggttttgctttcagggtgattaactgttctccacaccccggtgctgccctggggtcagggaggggaaggaatgtttcctggttcggggatctgtctgtggaagtgtttcttgtgcctcttagccattcgcacggcacaaagcgctaccagctgggatgaggctgaggccagaccgctcaccaggcctgtgccgggctcaggaagcagcgcctggagagggaggtggaaactgcactggggttttgggatgcgtgttactggctgtgtgttttcacgagttatgctatgccctggggaggcgggggaaaacctcacaaagcactcctctacatccctttggtttttaaggcaaggctaagtgcctaagactactggaaaggaaggggatcaaaacccccttaagccttggccggccaggcagcactgccagctttcccttgagcccccgcccagatgtgccgtacttgatagcagctcacaagaagaccttgctgcttcttcagggctcatgcaggaaattccacttagagcttcacttctttagcacaatatttgccttctgttaaagtgcaaatgccctgggaaggaaggcactaattcgtttgccatgggccactcgctccccgccccggagatgctgggcaggagtttgccactcctgatttctattttcctgtaagctcttttctcattctctctccagtccatttttcaaagggatgcagagtctggatactttctgggtggatgaaatccctctaaatctaaatgagcggggagagagtgagttcccaaacgcttcaggttagccctgtcctgttcaccaaggttttaaagggagttgaattattcacagagacagtttgcaaatgtcccggtcttttaattaagtgtcctagaaaggggaaaggtcagcacctgtctgaacctacacacattcctttgattagagcagtgacagactttacatggccttaaggacaaacgtggacaaagaagcatgttggagctgctgttacgacaattaggggattgtatatgctggagttcaatgatttagggcaggaaaagtatttagtagtgggtgtttttaacaagattttgagccaaagattagttctagttaatttgtagaaatgtgttctgtacctagtgtagaagtatgctgcttgttacatggaaaattttaaagcatcaaacctttagtcatttcactatctccaccaccatgtccaagagcatgaccttgaaattaagtcacgaaatgaaaagagggtcacaccatttggggccctcgtccatatcaccgagattgaatctgacaaggaggtgaattggattatctgaattttgtagacaaggctaaatcaaattacttagcacacagcatccctcctgctggtgtcattgctcgtgggacttcctcactgaaactggtgggcggctattcttgtgtgcctgagtctaaacatatgttggcttatttgtttgagagctagcctttcctgctgtctctctattccctctgactttcatcacccatgggtttctttttagacctcggtagtttgcatgtattttgtgtgcatgtataggcgaggtatggcagaaaagaaatggagttgggagacgttctttgacgttaactgtacggcaccccgaagtctttggcaaaattcaaaaccagcaggatgtcatctttctggaacaaagttgtcaatattctggctgaagggatggcacctctagctgccctggggagatgtcttttcatcctgggaagcctatgttctgtttctgtgggatgaaccattatactgaagctggccattgtgcttcatctgtggtatagttcaactgactgtgccatgatgcaaatgaatcatcatgtaggccatggtgaataattccttccataaagtcccatgctgtggaatcaaccagaaatgaattcttgccaatagtaataacagttggaaacaaagcagagtaaacatgaattactttttttttttttttttttttttgaracaaagtctcactctatcacccaggctggagtgcagtggtatgatctcggctcactgcaacttccgccttccaggtttaagtaattcttgtgcctcgcctcctgagtagctgggattacaggcgcacggcaccacacccagctaatttttgtgtttttttagtagagacagggttttgccatgttggccaggctggtctcaaactcctggcctcaagggattcacccgcctcagccaccaaaagtgctgggattacaagtgtgagtcaccgttcacagccaacatgaattacttttacaatgttctttagtatctgtccttgtcctttccagtgaacttacaggcgtatgaatgacttgaaggggagtgatacttgtaaccatttagaaagacattttcttaggcgtcatttgcagtgctaagaatgaatgccatagcattgctaccattcactgtcacccaggcagggggaagctcttcacagagtgaatggctattctctatcagaagaattgggaagtgagtgataactatagaaaaaaagagttatctgattattttaggcaactcacctcccagatttatacctttaaacccattctgaaaatgtagaaagcaatctcctcrgttagcttctggctaagaaattgagagaatcaatatttggaatctagagacgaaagagggctagttaaataaattacgtgactctactcattcagaattttaaaaaggaactttaaatgtatctaggcataggttctaagaaatgacttctcatactaatgaaatctaagagggagaaatgccttcccagaatcgatgtggacatctttacggaatcaggtttttattcgtctggagacagagagactgtctcgtggtctcagtgaccaaagtatcctcccagccagctggtctttgacatgaacactggtgacctgaagcaaggtggcttttccgtaaaggctttaaactttatggaaaagtgaggtttttaagtaacagttgatttagcatggcaggctccagattctgaagactctaaattctatccattattagaacactttacacagtcttccattgaagaaatgactgtaggaagctgtgcttgggcatcccactggagtatgaagatggaaaaactgtgctactcatgttctcagttgtggctggtgcatttctctcatcttgtgggaactgccagcaagggtagcaggcttgcatcctggccttatacatacatcctaacagtttctccaagagtgtagattagcccctcctaaacagaaatagggaactaggaagtggtagagattatttagtttgttgccttactttgcatatgcagaaactgaggcccaagaaggctgagcaattgcccaaagtcccatagccaggtgggcagcacccaatcctgtttctcctgcctcctagtccagctccttcctctgaggtcatttcaagccacagtaggccattttgaaccttgcattagaaagaatgcttaggtttctcctctgggtgaaagctcaggaataagcaggtgacattcaccacccaccagtgatggtgaattctctttgatgtactgattgcctcagcaaatgtgcaagttccacaagtagggagggacccaagcaaagtttggctaaatgtgagcatcgtaaacaaaagaatatagttcaccatccatttttgtccgtggctgcagaggctacaagcaacgcaggtctgaagatttcccacagtccctgtaagagaccttaacccctcagcttatttattctccacttctgaggacgtggctcttaagttttcatctctgaggttataaaccgtatttccgcttattttaatgaacctaaaaagcatctccaaacaggtccaaatgatagatggctacaacagaacccagtcatatcagggcaccatggaaatgagcccacttatttccagaacccaaactgtattgaacatgaataataacccaagagcaaatgatgtgcagactgcctgaaattatttaaatttttatagccaactgcctcataaattagagactttcttaagaggaggcctgcaaatgaactcataaagtatgcattgaatattttatttatgatataactatagcatggcaaatacatagctatagctatatagctatatcactgcaaaaaggtggcatcaaaatgtctgggcaaacactttatattggactttgtgtcatggagaagaagagcatttgatggtctgaaaagaggagacacttgagaattattttgctaggcactccaattgggatggaggactaatttctttaagagactcaagaattataataagtttatggttaagaaagaaaaaagaaatgagtaaaaatctaggatggaaaatccccagtttcggcagtgtagcaatttggagaaaaagtcctatgtggtttatcttttgatttgtagatggattcggaagctcctgtactcattcagtcattcagtccactacagtatatgcaaaatattatgagtggttatgtagagcaaaccaaaaacatttttaccttaaaaaaaagatttgtagaagtataatttgtaccctcatgaaggttacctatttcaactcaatgacttctaataaaattgacaagagttttcaacttactactacaatscagttttagaacgttatcttcctcctaacaagatccctcatgcccatttgcagtcactctctgttcacactctcagctctggataaccactaatcaatttgtctctatatatttgccttttctatgcattttataaataaacggctggataatattccattgtatggatataccacattttgtttattcattccccagttaatggacatttgaattatttctacttttttattattatgaataatgctgatatgaatcctcatatacaggtctttttatagttataaattttcatttctcttgatgaggtatatgaaatgaaattttcatttctcttgacgggtcagatggtaagtttgtttaattttttaagaaactgccaaactttgttccaaagtgtcaaaaatcaattgactataaatataaggatttacttctggactcagtactgtttcactaatccatatcactatcctatgtcagtaccacaatttcttgatgactgtaggtataggaagtttcaaaagaaaaaaaaaaaagcaagtcctccaaatttgttctttttcaacattttttggggggtcatctgtgtcctctgcatttatatgtaaattttagattcaacttctcaatttctgcaacaacaacaaaaagaaaatccaaaaacaagcaaacaaaaagcttgctgggattttaatataaattataatgtctatatatcagtttaggaacaaatgactatcttaataatatcaagtcttccaatccatgaacatggtatgtcactctacttattagatctttgatttctctcaatgatattttttagttttgagtgtataagtcttccacttattttgataaatttattcctaaatatattcttttttgatgctattataaatgatttttttcttaatttcattttcagagtgctcattgctaatacatagaaatacagttgattttttcagtacacttatcttgtaacatgacaccttgctgaacttgttaattaattctagtagtttttgggtgacttccccggagttttcacatacagaatcatgtcatttatgaataaagacagttttacttgttccaatctggagacacctatttatttatttatgcctgactgtactggctagaacctcaaatacaatgttgaatagaagtggtgagagtgccttactttgtttctgatcttaagggtaagtcatctagtttttctaaattaggtatcatgtttactgtaggcttttcatagatgtcttttctcaaattgagaatgttttcttctattcctggtttgttgagtttttatcataaaagggtgttggattttgtcaaatactctttctccttgcattgaaataaccatatggttttatcctttatcctattaatatggtatattacattaattgttatcttttgttctattaatatgggtgttaaaccagtgttgcattccagggacaaatccgacttggccattgtatataatccttcttatacaatactggatttatttgctatattttcttatggattttgtgtctacattcatggggaatataggtctatagtgtccttttcttgtgatatatttgtctggtttggtgttgggttagtgattccccttctcttttctatatcaatgatcttcctagtaatttctagttccctatggcttctcttttcagttctccagccagaaatctgggtttattaatatatacccagctcagtggcttctatttattgtgtttgcatctggagccaaacagagggtggagagcgaaagggagagagagagagaacaatgggatttcactccaccttctcaaaatcacaatgccactaattagacaggaagatttagcctcctttagagttttaggctcaaaacattgctgcactgccacaggattgcttggtgactgaggtgtgagaatggagaataaaaagaggggaaaatttttgtattctttctgagtgttaggatttcctttttccatttattaagctagaactctaggattctcctagagctctctctgtctggacccttgtgcctatttctgggttttggaccacgccaagagacactggagagaacaaatggtaaacccaccactagcttggtggtactttgagttcttatcttcttttccgacccttttaccactacatgtttgcttttcagaatccttaaatagattttacttagaactcaagctctttctctgctatgttatttcatttttctagtaattcattttaatatattttacaagaacatttgtcctcaaattgattgggaattaaaaataatgactattctggatgatggaatgaaggctacaggggattttgaagggagagatgaatggggattggatatttctgttaacagtcatcaagcataaaaaaatggaactttagagttggactttacaagtcaaaatgatgctaatagtttctgcatgtagtagacatagccatgacatttactccaactttgattcatgtagtgccatttggaaataacaaaacaatcttttcctttctttttctgaaatttcctgggggtgacattgttccagaaaggttataactgagctggtctttgaagaaattatctgcaacaggaaaaggaccttgttcgtttttaaagatcctttttctctgcgttcttccaattggatacattctattgttttgtcttagagtacatggtctttttcttctgttatatcaattctatcatttctgctactgagtccttccagatattatatatttcacttctaaaatttccattttaatttaatagtttctatttctctgctgaaacaaaaaactaccttgccatttatttcaagagtatttaccctttacctcatagactatggttataattgctaattcaaggtcttgatctgatcattccaatatctgagccttcccaatttgggactctattgattgccttttaccttgagaattggtcatatttgcttttttgtttgttgaattttttattgtataatggacattttgaatattttgaatattatgttttaagattctggatcctgtttaaattctctgaaggagatttaatttttttccatcagacttggttaggtttagactgcaagctctgccttaccatctgtgggcagtagtttccatgtcagttcagttttagaaggctgtgctattcacagcttaagtctgcatacatcactcaaggtttatactggtaatctgggacttgggcaatggtttacattgtagttcagttctcaaagcctttgctgtgctgctttgagtgttttctgcacatgtgtaccttaggggtagtccaggactttaattcattcatatagaaaataaagrcattctcttctccctctctttcctctgtgagatttccagattaattattaatttttatcaaagtacatgtttcatatagttcgctattttatgatttgctatatttaaacttttaattccactctatgaaaaatattataattttactctcatccctcccctctttgtctcccaatcctaatattggatatttacgttatcttttattctgttggctgcatttgtaacattttatttaatatacataagcctctacttcttgatctatcaagttgcataacttcttcaattcctgagttcacatggtggtaatacctatgctttttctttcccctttcattccaacctttcaagagctacacttaaaccatcgtgttgtcaatgttgtactctttccaaaggttcacagtacgtgtttaaaatttttcatttaaaagaacacaaaaaagtatttgtactattctaactggataaatattgttcaatactgggacaagtcacagttcaggagtatatgccttccttaaggtcctatgtgatacactggccaattgaagaatgttaatagcatcaagcaaaaggatttctttaccttttctccttcagtatgtaaaattacgttacttgtttgaatcattatttttgcatatgttagatatatatatgcatgcttgtatatctatatatgcatatatttccaagatttctaagtcctcttttttcctgggagacttcctgctgtctgtgacttgtgcagacatgtcattcttactggaaaagtgcatttccaaataacttcctaatgtaggatgaatgggaagggaaagtttctacctagggatatgatcagaaattcctttgtttttccatttgattgatagttcgcctgggtttagaattctagattgaaagttattttctctcagaactttgaaagctctaccccactgacttctagcatccactgttgcatcaaccaggagatataaggaatgaggataattaatttattagccaattcagcccatggacttctttcctctttgtgagacagcgatcataaaggttctcctttgtcctgaagaggtgggctgggatattggatttctgtaaagcactatgtttcagtgcttgtctctctcaaatttgctagtggacttttctgttgaagggcccctttaccgctcactgttctaggaaggcagcagtgctgatcatggtgctggtgtagtctttgctctccagctttgagactgtcaaagaatgtcaggaattctagttgcatatgtaatttttctttattttccttttcttcaactactcatccaattctccttgtaccttgagctaaagtataaaagttgtggagggcagatattgcccttgccaaaatagtaacatttaattaacacaaagcagaaagtgctccaaagtgagtgtatagtacagggatattctgtaattcttctataatgtrattctcaatagaaaatttcaggtatattagtctgcttctacattgctataaagaactacctgagactgggtaatttatgaagaaaataggtttaattgacacagttcataggctgtacaggaggcacaattggggaggccacaggaaacttacaatcatggcagaaggcaaaggggaagcaagcacatattcacatggccagcatgagagagagagtgaaaggggaggtgccacacactttcaaacaaccagatcttttgataactttatcacaagaacagcactaggagaatggtgctaaaccacccccatgatccagccacctcccaccaggccccacctccaacactggaacttgtaattcaacatgagatttggatggggacacagagccaaaccatatcactaggctacccagtatttatcattttcagcatctgcattcactttttctcatcaattatttctgctttgtctttttcagcaacagaaattgcaaggaaatccaacaaagaaaaccaaatcaaaaagaccagatcccctcaaaggacagaaggttattgcaagatgtgatgaaaatggcttttattttccaggtagtttttttttttttaatttcgtgaggcttttgttaaataatttgatactagggacaagaagtttcaacctgtgcttttgctagaacactgacatttcatgagctggcctgagctagtccacttttcacagagaagaagtggaatatctctggccagctcatgaaatgagcgtatttgggccccccaaaaaagtagccagaaaaatgcacttattttaatttctcattttttagtaaacaaatttttattacccatttactgcgttgcatgtatgtaatattttgaaagtactggtctaatggtatgagcaaaaaggtgaacattcttgctttttggagattacatcttaaaggagacagacaagcaatgaaataaacagataaaatatgtggtgtgtcagatacagtgccatagagaaaaatcaagccacaaatggggttgagaatgttggggtgagggttttgattctatatttggtggttaatgaagagctcctggggaaggtgacatatgaataaggacttaaaggaggtggggcaagccatgagattggggaagggagttctaagcagaaacaacagcggtgcccaggcctcagggtggagtgcacacgtgtgttggaggaagggccatgagactgggatagctgggcctcagaggtttgccccagacttcctgggggatgtgatccctgaaggaatcagccagctgcaattcagcaaggggtggaggtatgaagggagtttcatggatggtgacaataatacgtgtgaagacttagaaatgaagaaagacatctatgtctggagaaataaaattgattctggctggaacataaaatgagaaggaagggtggaaataataaagctcttcagagaggtgagcatggggctatgcataaagggtcatattaaggatttgcactttaccctgagggcaatgagagccacatttaaagcagtgagaaacacaatcacatttgaagttttcaaaagctctctcccactgctgtgtgaagattggataccaaggggttaggatgtctctggtccctggcttcgggtggtagatagatagtggtacctacaggagatggtggtgtggatggaaagacaatgagatgtgtctgcaacatgatgaattgcaggtgcctgcaagatgcccagatgaagatatcagagaagcaattggagatgtgggtctagagtmtggagacagagatttgggagacataaccacagaagtcatcactgaaatcatgggaagggtctgtagggaaaagggaactgggagaaaaccctgaggaagctctgtcaggcaaaaagattacattgcagggcgggtgtggtgggtcacacctgtaatcccagcactttgagaggccgaggctggtggatcacttaaggtcaggagttcaagaccagcctggccaacatggtgaaacctcatctctactaaaaaaaaaaaaaaaaaaaaaaaattaaccgggcacctgtagtcccagctactcgggagactgaaccaggagaatcactagaacctgggaggcagaggttgcagtgagatcacgccactgcactccagcctgggcggcaaagtgagactctgtctcataaaaaaagattacgttgcagatacgtagctggcctttcataggcatgatctatctatcaacagttaaaagaataattattatttaaatttaattgaataatattttaggtgggaaaaaaatacttcagcaggatttttggtttccagcgggcacatatgtacaactgacatcagggacaggttatttgaaacgtgataaatgtgcttgggagttgcctggatgagagtaaatatggatcccagcacttgggatgatcgcataggctaaggcatgacacccttctttacaagggctgggaatcttccatttctctggggtgcagattttctaagaggtgattatagaaggccacccctgcttgagaaattttgattttctgaatttgagccttggagagagttttatggctaaactagtagtcgaatgaaaatactaaaagtggggccaggtgcggtggctcacacctgtaatctcagcactttgggaggccaaggcaggcagatcacctgaggtcgggagtttgagaccagcctgaccaacatggtgaaaactcatttctactaaaaatacagaattagccggacgtggtggcgggcacctgtaatcccagctactcgggaggctgaggcaggagaatcgcttgaacccagaagacagaggttgcagtgagccaagatcttgccactgcactctagcctgggagacagagtgagactctatctccaaaaaaaaaagagagagaaaagaaaatgctaaaagagactggattctaaatggttgggttaggggcttggggtcactgctggctagggccccgggaaaatgtagaatggctcgaacttctacccagcaccatgcttgtgtgatgagaaaattctaaagacctactggggggagtagaggagatggggctaataccatggccatgtgcaatgcctgaggccacaacggaaatttttttaatgtgcaattagaggcagaaagtacatactatactcccaacagccgcatgggatctgactaagcaggaatttttaatttgcagtgtaattaaacttcaataaatcagcttgaaggaaatatttgaatttagtcatataagcggtaattttgattagtgtctaagtagtaaactttgactcagccagattaagtggcagtgcatgggttatctccatgaacctagtttttgtgccctctcttcccagtcacctgatcttttccttaactgggaataactttactttcatgatttttttattaaaaattcaaacatacagaaaagtcacaagaataatacagagaaccccactatactctttacccagatttgccaatttttaacatttggtcacattttatcacatatattattttattctctctttcatacatatatacacacaccttattttttatgaactcttagaaattaggtaacatttatcatgttactttatcccttaacacatcagtgtggattaagagtaagaataatctcttaatataaccacaataaaggtagaaaattcaaaaaacgtaacactattatagtacttttatttaatctatgtattttgattttgttaattgtcccaataatggcctttatcacatttattttctccaggacaggtctcagcccagaatcatgtattgcatttagtggacatgtctctagccctctttgatctagaatcattctttagcctttcgtattatctttcatgatagtgacattatttaagcataaggccagttattttacagaacgttcctcagtttgggttagattacattcaggttatcattgccggccagaatactgcctaagtgatgtcatggccctctgggtcatcccgtctagaggcacgtgatgctcacctgccctcattggtgatgttaatttagatcacctgttcactgtgagtcactattttccctcacacacacacacacacacaaaaaaaaaaaaaaaaaaaaaaaaaaagaaggccaaataaaatgttgcagagcataggcttgatgtcattggtgactccttttctggtaactgttgttcaaaacctcctaaacatttttagtaaaaaaaacagctcacttaaaatgcaccttagcagaaggcaagattggagtcactggattgaggcgtccactacatgaggccaggtccacgcggaagcagagctggccagactggctgttgccactgttgtcgggattgtggtggggatttccctgtgaccaacgttattccaggggtcagtgtgggtgatccagttgaggaaatgactgactgtgttgtacagagcgatagcctggcttatctggatgccgaaaggcaaggaggaagacacattttcaacccttatttgaaatcattatttgtggaaactgggtcatcctgttgttctgtgagaagcagcattttacttcaggaaatccacagtgatttctgcactatgccataagaagaagttgtcatgaagaaaaaggggacaaaatggaacactttctcaggtgtgatgagctcaggtcaaaagtcctgtgttttcatttatttgagttctgcctcttgcctctgctggccacacgactgcaatcactttgtttccctgtacctcagtgtccctgtcttctccaacgggatttaaaacaatgaaacccttcataaactggctgtgtagattaaatgcgatgacgtacagccctttgttaattccatggaaagagtttttctgcatccgatgtgagagctcctcttaggagtagggataaacacctcgcctcctctcctggggaggagggagctgctttctatttcacagcagcttagaacctttcacagcaagtcaaagcagcaaaagtcagcacagagggtagaaaggaaacctccgagactggagggagaagcggacacgaggactgtgaaggatgacactgccgaggagtgggcagctggagggatgctctggctggagcagagtgaaagcctttttgaagaggtggaatttaagccgggctttgtatatcggaaggttcttagagccaaaggtttaaaaaaaagaaaatccagtctccagcctgacaaaacctatttggagcaaaggttcagaaccactcatgcatctttcaccaaacaaactgacttccactgtttactcagattgtgacaccaattctctgacccctgagcacccgcagcatttttgctgaaggcctccataggagcacaggccctttctccagctgaatacaggacaaccccgactgaggcagggagccaactcatccccagggaggcactgggcttaccagcttccgcccagaggaggggaggcagtggaagctctgggcccgccagcctctgcccagagaaagaggggaggcagtggaggttcttcagcttgccacccttcagaaccgaggtcctcaaacgggtcccagagatttcagagctgggagacacagcctcacctctcaaggctgaggacagagagaaactatagggtaagggaagccaaaaattggagctgatcttgaatcaggacacaagaaatggttgcagtcccttaattagatggagaaggagcaggtacagaggcttagcagtggtgggacaggccagtcctgggccctacagctgcccagagtgaggccacatgggggccctcgaggccaggttgaagccagaccgtaagaaactgtgctcatttctggagatgaacaaagacccacatctacagagattatacaaagaaggaaggtgaattaaaggaactaaaaagaagtcatcataacagtccaaaaagtttaggtccaaagaagaaagtcagtgataaatggtttaggcttcgtcggctacacaggctctgtcacaacttctcaatttaggcaaacaactggaaaactgcctagtaggcttgatactggatactgctaagtcccaaaggctaaggatttgaagagagtcacatgggccagtgtggctgtagtggcagctcagacccttccctggggccgtgggagggacgtggggcacacagtgcgtggcaggagacgagtcccctgattctcaatcaggagcggctcttgtttccagaatagaaattatttctaaaaggtagtatttgtttttctgattaaaaaggtaaagtcagtttatggtagaaatgtgtgaataatgtgtaaatatttcaaaacccaaagtaaacattttagtccgatcagaaaacacacaatggtaagctggcttgagtgtgcatatttttcaaaaaaaattcattcctttggccatttaaaacaagacacatggatcaagatgaaaatcagcagctatctctttgccccatgagaggacacagggctttgcttagcaggcacgtgagccaggactggggagctgctgcagcacatgccgtggagcccagcgggacgcgtgtgctcatttctgtctccaggagggtctgtgagcagctgatactgctgggggaggtgtccaatgtcatcatctcccccttaatgtttagaatccctttttaatgggaggataaatttcaagtcggataaattacaaaaaatatacatcttaacacaggtattttcttttcctagaatgataatctattctaataattatattaattaaaatgtataacaaaattattatataattaaataatatatatgtttgtgtgtatatatattaggctggtgcaaaagtaattgtggttttggtcatttttttaatggcaaaaaccgcaattatttttataccaaccttatgttatctatcatgcactcctttagtataacaaaaaaagaaacttcttacctcttttttcatttttttttttttgagacataattttgcttttgtcgcccaggctggagtgcaatgacgcaatctcagctcactgcaacctccacctcccgggttcaagcgtttctcctgcctcagcctcccgagtagctgggattacaggcgtgtgccaccatgcccagctaatttttgtattttcagtagagacggggtttcaccatgttagccaggctggtcttgaactcctgacctcaggtgatccacctgcctcagcctcccaaggttctgagattacaggtgtgagccaccacgcccagccttacatcttttttctttgttcctttcagctgtatattttggggaagctgagtatgttcagtctagtcagatgaaaagccaatttggatgggagtttatatttcctttttactttcccaatttaattaacaacatgtattttctatctttaagtattatggaaaaaaatagggctaaagtaaatgaaaatatcaggtggtaggaggtgttcgagaagaggatctttatttccaggacccatgttcctgtcaggatgggggctgatggcgcaggatgaacaagtctagtccattctcactggttctcatctcagcgggtgcccagaccaggcatgtgcaccactttgaattggtcaacccagtaggcatcctatggtgcccaagattatctgctggagaaatcaaaggggcacactgatttaaacaggcaaagtgttataactcagcatggccagaaagatggcacaagcctaagggaagggatgttatttgtctttatattttatgttttctttgattccttccaggggttgtgaagaagtgtgtgagccgcacccaagcactggtgggcttcagttacggagacaccaaggtcgtgtccacctccttcatcacgcctgtggggggcgccatgccctgcccgctgctccaggtacccagtccctgatgtgttctggggccccttttcaccatccacagagttttgaataacagaacgccaaggccactgtttggccctttgctgaacctacacgggctcctgcagggagggtgtgtttgggcaggaagaacaatggcccctgttctgggacctgtcacctggagatttctttgctcgtgaccctgacctgccaactccctgttatgtagctcagggctgcacagacttgtttgcactgcaccttgaggtccttgtccctttacaagacaatagagtttgggggaaggacattgctgtagctgccagtactgtggacacttttaactacaaaagattctattctattctattctattctattctattctattctattctattctattctattctattctatgccatgccatgccatgccatgccatcccaccccatcccatcccattccattctattctattacataataacaagggcagaggtagcactttccttggcactgtaatcagctgatgtcagacggtgataccgtaatgcacagttagcccaaatgtgcattccatagatgtgtcaccggaggaaaggccatgaatgtcagttgtccaggggtgttttgaacaaagaattgaacaatatgcacaaataaagtaacaaaggaatggaacacaggaatgaagctgcgaatgcaggggtttattaaagtgagaaagcactccacagggtgggaatgggcccgagcaagaggctcaagggcgctgttacaaagatttctgggttttaagtaccccttttgaggttcctatggactaccccttatctggatgaaggatttggtctgtggctaattaaaggctgaggtgaattagtgccctatgtagatgaagggatggtccctgcttggcctgtggccaatccaaggcacactccctttccctctgagccggggtggaaagggagggttgcagggagactggcctttgaccctttgctacccggcgtcaggagatggggtttctccttttggtttagctttaggaagtttgcagtgattggccttaggttccctgcctcagacccagatgttttccctttgatttaactttaggaaattatcacaaattggccccagattccctgccccccagaccttggtgctttccctgcccccagaccttggtgcttcgcttgattcagccttagaaagtcagcatgaattgaccttaagttccctgactccagaccctgttctcctgcctcagttgggccagattaatgtgttctcatctgctcacaaactcataaaagctgtgccatgtctggctcatcctcttgccgcgttcctaattccagctccaaggcctgggattagagggaaatccttgcagagcaccctgctgctgtcttgcccagtgtgagccgggaggagaagcgctggaggaggaattggagaattcatccttgggcctctgctgctgcttcctagtcagagcactggaacacaacagtgctcttgtaccctgatgatgcagaagggcctgcagcctctgcatgtccctccacaagatcctttttctgctgcaaattctccgtttgcgacttttacccttggattctgggtgtgtgctttggagcaacaataaacaaacctctccctttctacgtcttggtgacagcccttctggcagatgaggacactgtttatctttgcatgacaaacaccccaggttccttcaactagtctctttagggtgtggtttccagaaccctcaccatcttgctggcagacccttgggtccttgtcagttggtgaagtcctaccaaaatggggcttcccaaactgatcacaaaattccagatgtggcccaatgagcccagagaatcttggaactctttcttaactgagaaaaaaaatatctatttgaattttagcatcagtacttgccaattgccttggagtattttaaaacttgcttatgttaacattgtctgtacaatccataagcaaaatatttgctctatgttctcctctgcaggttggagattatgtgtttgccaaaattgtgatacccaaaggatttgacttctatgtccctgccattgtcatagcacttcccaataagcatgtggccacagaaaaattctacacagttttgaagtgtaacaaccggagagtaagtagattttcatttagaaaaggactttctcctgggcaatgccaggctgtatcctggcactgccaggcttcttgatgaatggtttccctggctgcatctgctgccctgctctccactccctgtgttttggcttctgcccaccgtgccacacagaccctgccctcactgaggtggccatggcctctgctgcctgtactgtgcagttctttggctcccactgctgaaccatgctttgcatttgacggactggcaggctcactctagggtcttggagcaccactctctctggctctccgtcttcctcatcctcgcgtcctcatcctcctcctcctcctccgcctcctcagactgcccctgctttgaggtcccctgctggccctgcagacttggtcacctcctgggccaccgctagtgctgtcctcctctgcctcctcctggtgtctttcggtgtgagcctccatctctggacacctcctctgtgccagaagtgccagccccgctcctgccctgagctccaaccctgtgcttctagctgggtcctcctggagcactccctcagagtgaacacaggcatctcagactccgcaagccagtgcaccccctttccccaagcgcctccttctcctctgtgtcccctgtattggggtgctactacctggttccccatctcctacttacctaggaaccacctccagagttggcagaagttgggagacataagggcggacaggcacaaagtggagtagagtgaaaagaayacaggctttacagttaaaagccctgtgtttaggccaggtgcggtggctcacgcctgtaatcccagcaatttgggaggctgaggtggacagatcacaaggtcaggagatcgagaccatcctggctaacacggtgaaaccccatctctactaaaaatacaaaaaatgagccgggcatggtagtgggcgcctgtagtcccagctactcgggaggctgaggcaggagaatggcgtgaacctgggaggcagagcttgcagtgagccgagatcacaccactgcactccagcctgggcgacacagcaagactgtctcaaaaaaaaacaaaaaaacaaaacaaaaaaaaaaacctgtgtttgaattatatgaacattcactctgctctttattggttgtctgacctgagcaggttgcttcaccccctgagactcagtttggtcacatataaaatgaatactttacatatctatatctgtatttatctatgtataccctacagggtgattgtgaggcttgaagaaaagacatgtaaaagatgtaaaagatctgtgtgtctgacaggtaggtgttaggtaacagtagtgatgatgtggctgcagaggttggcagcatcactcagatcccttccttctacactccccagtgccagcgagtgggaatgactcggttaactgtatcacctctagattgatttgctcattggacggatgtttgttaagggtctgtattgtctgttggatcgtttgtcttttttattgactaggggaggtcttctctgccttctgggtagtaattcttggtaatatatgcagccaatagttttccccggtctgttgcttgtcttttaactttggaatctttgttgacaggaagcattaaattttaatatggtcaaatttatccctcttctccttctgccctttctatgtttatttaagaaatcctttcttaattatatatttctgtatgtaatttttctaaaagtttcagaagaattctttatcagtttacgaaactgatgatgtagtttgcctgattgacgtctcctgcctcctctcaacccacacacatgcttcgtgtcaccctcagggagtatgcccccaggaccccagtgtggccccagccggctccatgagcttgacctccagccaggtggaagactcactgcttcctgaatgcggtgggctttttcaagtcccaggcttttgcctcttcctggactgccctccccatctcctctcccccaaactcccgtcaccctaaagactctgcctgattgtgacttcctgcaggccctcaggttcctcctgtccactacactgcacttgccaaactggcttcctcaccaacctctcaatccttgaaggcagagaccacgtctgttcacctttgtccctcccagcacagtccctgatgaagagaagggtctcacaattgttttttaaattacttgaatgaacgacattcctaatggaaaatgacattgttttgatggacgacttaacatgcctggaaaacagacccacaagtgaactagattggtgagcaaaaagccaggtaacagtggctctttcttaggaccttactgtgtgccatgcattccaatccaagcgctttacacagagtggacccttggatcctcagaacaccatgaggtagagactattattacactgatttccagaaaaggaattgaagcaagaggttaaagcacacacctggtgtgttgagtaggcattcgaacacagacaatctggctccatggcctaccctctaaactaccatgcccggctgcctaggatacagaataaaaatatccagtgcctccttgactgtggcatgaggtagttccaccagggagaggggcatgggaaatgaaatttagggttaagcgcaaaggagaaagaccatcagagccagcggccactggagcactgtatccaacccaacagggcaagcggagaaggagttgtctgctcatcaccccagaaaaaaaccccttggagaaaatggagtttcctgaagctgtctggatagcagtagagaaacatctggaagggcagagcatggggaagccttccccttcctgatgtgtgggaccattctggggatatcaactgtgaaagggagggatgttttaagagatgtccccgggcatgccctagggtgtggggagagatgaggcagttggcccaggacccctgaggggaagccgcagaccccagaaaaggaccttgaacttacctacaggacrtggggccctggaggctagagtggcatggccgggggcggggggtggaggtgggtgtggcagggtggagggggaaggatactggagacagttctgatagggacttggggagacccaaagagggtgaaggtggrgcagtcagcaaaagtggtggccaaaggctgaaataaagatagaaaggaaggtggttatgtgaaggtgtgtgtgtgtgtgtgtgtgtgtgtgtgtgtgtgtcttacgtgggtacatttggcaattgatccagaatatggagaaatgacagagaggactcaatgatgacttttattcagcaaataattgtcaagtgagggtctgaatttgaactactcttttaagtgtcaccctgaataggataatgactagaagctattataatgggttgagctagaataaaattgtatctgaattgtggacatttctgatttaagttgagtgaactctgttggtattattacaggaattttgccctcggagtgcacttattaagatcagccaaaacaagtatgcgctctcttgctctcatataaagtcacccccaattcctgaggatccagaagtgtaagtgtactcaacttttatctcttgaatattaatttatatccttgcacctttaatctgtttttgagatgagatccatgacctctaaatactagggaagaaaagtagagatgcagaatgtcctacttaaaatgtagctctgtgtttattattccttcgacgtcacacctttcacctgctacttattcatccatctggttctaatctcaaattctacattatttgacccttcaggaaagcattcatgaatatgaaggaattgttccccttttatttgtaaagactgaaggccttctaattaagttgcatttgggtccagtcacctacctacctctccccttgctgggaggtgggagcaaggggctggccctggcttgcctgtagccaggtcagggtgttggaggggcggtggcttccaggggctgcagtggagtgaacacattttcaggtgaggtagtaggatggctaagagctgtaaggtagactaaagccaaggcaaaaggaaagggggaggcctgcagagcaaacacgaacccaagtccatggggccaacgaggggcatcaaaattgggctcatggagccatgaccttggagtcaaggtcatacaaaaagagatgaagttggatgttgagcaagtgttggggaaaaggacccaggaaacatcttccagtttctgttagagcttgcaggctgtctttgggtgctaaccttcattctcctaatggccttaccttctacttcgtcaaagaaccatcagacatcctctccctccacttctgatctcccacttctgggcttatggaagtctctgcctttgcccccgatgtcaaagaatcagtgtccttcctttcaccccaggctgatctgtccattgggctccagaggcccatcctccactgcctcgggtcctggatccatcagtgatccctggattcttctcacctctctccttagctcctcttcactgagcccttcacctcagcaagtacacaggttggcctcctgttcacacacacgcagcacccacaaacacacacactcctaaataaataccgttcccttggttccgcagtgtgatccagcatgctccctgcccttcactgccggtctccatgcgtcatcggatagactcaacgtccccactctcctgttcactcctgagccttggatataggcatccacccttacccctccaagaaactgcttccacagaggccacacgggacctctcacgagcctgaaccagtgagctccgccctcactgactgaacctgctccagagtcgctttggacgccaccagccactcccttctgccctaaaccctcctcttgaggctcgttgcccctctacctctctggggtttatccctgcctgacttcactgcctcccactgcctccatgactccctttgcactaaggaccccatgtctccttctccaacccaggctgctctcctgtgcttgtgtgtcacagtcagactccgagagtgggcctggaggcaggtttttctgaaagcccccagctggttgcaaggtgcagccatgatgggtaactatagrgggaagagcattggaaccaagattgggtttatatcccagccctgccctcattagttttgtggttgctcatcgaccctgagctcatctgcaggatgacagtgatgtgaagattggggacggtcattgtctggcaggtgttcagcacattgtgggaagggcattgtttccaaccaccccctggatatttccaccygagtgtacagaatctcaaaaattcagcacatctaaaactgaaatcagagctccccacaaacctgctcccatctcgggcttccccatctcagttcacccttttacccacaagtcacggagctgtccagccagaaatctggtggtcatctttggctgctgcttgtccttcacctaccacacccccttggtctccaggttgcaggcatcctaactggccaggagttctcatgtcctccagcctcctcctgccacagtcccagtcactcaccataagggctgagcagaatcaacttcctcacatgcaaatctgcctgtgtcccttccgcacttaaaaatccttcagagccccatccccatcaccccttcttatcacagcttagcttcttgttggtctggcccagacctgcctaccttgcctcacttgtccctagccactcccagctaacccaccaatgccttctgcatgctaaccacactaagctacatgtaggttttgcccacaccatgctttctcaggtctctgtgccttcaccagattaagtattctccctggacagctattccttgccctcagccacctggggaactccaagactgagctcaaacgtcaacaccaccatgtgatgtcccagcaccctagcccccccaggtagtgaggtggccccacggcaacccgtagaggtttctgttaaagaaaatttcctttgcattggacactgtaggcacaagtccttgaaggtaggggacaggttctatctgcctctgaatcccagttgccagggtccagctcacagaatgcccccaatgactatttgaagaacaaataaatatatacagacacatgctagcagatgcccagcgatgctcctcaaggggtgtgcggctccacagagaacctttccttagctatgattatcaaaaacgtatgctacaattctccattctttgtctagatgggttgatacttcatttaaaatagcaggacattttctgctcatctcaaacatctaccccaacaatggtccctgtgggtcttgcttctggttcctatgatgtccaaattacagctcattataaaggaatatgagcagatgtatctaagtattacccattttcaccaaactcaatgttatcaatcattattttagaatgaaaatgcaaatccttgtatgttgagaaaagcctttgttttccatcttccccaggccttatttaaagctcttcactgtgaattatctacccttgcttctgggcttcacatggtggaagtcttcattgactctcgagtcccccattgtaatttctactcttttttatgttggctgcctctgtgggagcaagagactgagtttaatgctcataagcagagatcacattcaacctactaagttcagagcttaacctgtctctgtttctataataagggctagcagaaccgagtacaaaaataaaggcataggtctgattttgtgtctgagctgggatttccttctggtaggtcccttcctcaggagctctttctcacttactttacaaatgtgttccttagggagcattcatgccattattcctgttagaaatgcttattccccggtgctataaagaaatagcacttgaacataaatttaatttcttccgcaaggccatttttatactttctgcagaaagggtacacttgccagcagttttgccatgagagtacaccgaacaaaggagacagggtcatttataacctgacgtgtccaccctgctgctatgcccggtttccattggctggaacgggacctcamattctgtatttgttctgactgactagcaacttagaacttttttaaagaggcaaaggcagaggagagcaaaggaaggaggaagtaacttggggaatgctgagaaaggtaaaatcaccttcaaataaggaagaggaacaggctatgrcctaaygcttgcttggaccagtataagcttgccagggcaaatatttaaactaaattgtgagagctaagaacataaagtacattgatttctttattacggttagcagatgtttaagaatgttagcacaggtctttgaataaattttgcttctaagagaagttactcgttattcctaattagatggggaggaaagtctttgaagaggaacctctactttactttttacattccaaatgaggccatctaaaaaaatcctgatgctttcttcacaggctattaaagacatgtactgtaggttacatctccaacagaacattatttgactaaatttaatttttaaatattgaatttactataactatctgcttgcagggtaaagcaagggatacctgggcccaaacagcctccatcttccccccaacctcctttccttccttctgggagcctttcctccaggtctctcttctggcttctgagtgagaacggtgcacagtgaaaggcaggaagaaaggcatttggaggctgaagggctcaaaactaattgaacacagcgaaatctgatgcacattttcattttcaacttaaaatttgacacctaaatgattcttaaagactttttttaaaaaaacaagattggcttataaaatatgttatcaatattgctaaattccagactactcattcctcaaggaggggatgctggtattgccatatttgcaatgtgaaaccagctaggcgggtgcagattttctctttcctttgcagcatgacgacggcattctctgacacacggctgagaggcgtgtctttcaagacagtgtgtccgatggagggaaataactgctcttcccttcccttccgttcaggagtgtccctgagctttctgctacattccatggcatcagagatgtcttttctgagggagaatagtccgtatcctgtctataactgcctccatttgagaacatatgtgtagtttctcccatgtggtccttctcaataactacaagaaacaggcagaacagagggattttcctccatttggcatcctctctccttgccagggcaggggactcacagaccaagtccttccctggctgcctcccctggcgtcccgttcccatcagaggactgtggcctctggccagggcagggggaggcacctggtgggtctgatgctccagctgctggtgttctccagtggagagaggtgcctctagcaggcattactcaaccacccacaggctggggtttcaggccgcctgaactgaatacacacacctggtgccacttaactagctagaactctctcccagatgagctggaatccttcctccccttacccttaacagagcacagcttgtttttaccttcaagactcctccttaagaagactcctgtccgggggcagtggctcatgcctgtaaccctagcactttgggaggccgagatgggcagatcatttgaggtcaggagttcgagaccagcctggccattatggtgaaacctcgcctctactaaaaatacaaaaattagatggacatggtggtgggcacccttaatcccagctactcgggaggctgagagaagaatcacttgaacccaggaggtagagcttgccatgagccgagatcacaccactgcactccagcctgggcgacagagcgagactctgtcaaaaaaaaaaaaaagaaaaaagaaaaaaaagcctttttagagggagtatgatttatttttaaaaaaataataactttccaaatgtgatatcaggaaagcaaaataggactcagcatttcctctgtgctccagggaaacatcaggcatctgaaggaagctgttaggttctggggccctggaggcaaggcatgttcttctcttgctgcttgagggtcattgtgtggtcctggggacatggctatgtatgagtcggcaggaggagagaccctcccagggccaggtggggtttgtctgggtctctggtcaacccctgttccccacaattcctgttacacaaaatattagcctctcattatctgtcttttgagcagttgaggaactttccatgaagccattggatttgggagtgtgtcccagtggaaatgataccgtgcgcagtgtttaacactcctcccttgaccccgtgtagtgttgtggactcacattgtctcctgacatcagtgaaattaagtcattgattgaaacttcaagattcagctctgcctctgacattacgtcagatgaatcacttcacttaatctcgcctggtcactcctgacgattttctcctaagaggcgtctgtgcatttgaaatcattaagcctctgtatgtcattagctccctccgtcccctctggttggattaggagccccatttcttatgctggaacaaagccctgaaaaacgtgcagttcagcaacaaaccctgtctgtgagtgtcctatgtaatttagaaggacacgtgccgttgcttacattcaggaagcatgtggtggtgccctaggacatgggacaaggggacacaaggagacacagagattcgccagccttcagggccagcagtagcaattcagatagcaacagcctttgcttatccatttcttcattctccaccccttcagttgctgaaagtctaagaccccccaccgggtcttcatcaaacatctgctggtgcctactccatgggtcctcttgttctttatgttctaaggcagccttgctgagagagagacacttagggcacaatacaaacgagacctcaggaatccagcaggatttctgacaagctgccaatgctttattcagcaaagggggtgggttctgaccccaggagggcatggagtgggcactcagcactttcttcccagaagtggaaccagcacagcgccagagtcctccaggcaggggggtaggcatctccctaccttgttctttccatgcttttaatgcctgaaaatctctctacttctcacatccgcttcttgtcgctcctctttctgagagattatagcttagggactggactgtaatcatggatcctaactcatggaaaatagagaaaaaccctgaaaaagaaacagaatgtatcaacttattctgctctggagagaggtagcaatttgagggatagttgagggtaacctgatggataagattttagacttcacagagcaggggcggtaagtgtacccttgaagcatgattcctagaagtctctcagaacctgctatcacagaacctatacatccacacaagcgctggcctcagatttaaagatgattttgtctgtggcctcccagaaaggcttttcccaatgtcactgctgtcgcccaggccaattttttaatctctcttgggaatctctcctgagtctttgagccaatctttgaaaatgatcatgtgcagtgaatcttgattctttcacaagggatttgaatggtggcattttctatttgaaaatagcaaaaactctctttctactttattgttttgtttttccctgacaatttccaaaaggatccgaagcagtaatagtcagaagttatgcggagtaaaaacaaaacaaaaaattattcggattgaaggcaggttgatcaagatagctgatactgattatgggaagaaaataaggtttaacattaggcagtgggtgtccttaacttaccctgaaggccctgaaaaaaggtgagctcccaaaacggtgagccatggaggcatggctggaatgaggtcatggtgttatcaaggtgccttctttgaaggacagcacttctgggtaaataagctttgtcagcgtattttctaaatagtaatctagctctgtgacttcatagtcattcctaagttcaatgtcattacaaatcataccattttggacatttggaaaaatgtttccgatagtataccttggagtcattacagaaacacagggtgtgaaagaatatctctgatgtacaagctccaatacagggatgaactgggctgtgatggggccaagctcatctccctggggcggacacaggtctatgctgaggagtttccaggggcttttgggctgggagttgttccttcactggcttggtcaggacgggtccgtatactcaagttctccgtgccgtgggaggctcccaaacaccaaaggctcgtggaaatgaactgagtggacctaagcccagcctaaagcattgggttcacagcgctccagagactcctttccatgggaagagggacgtgggcaaggagctgagaagcagccgtggggatggcttggacatctctgtagaccccgcagccatcaaggcagggtaaccctgatctctctctgtctctagagaggatgtggaggcgaggaactctgctttcctcttctggccactgaaagaagcggacacgcaggattccagagagccaagacgagagaagcccaggaggaaaaagaggcccgccaagcagccactccagcaggcggcgccctcggactcggacggctcctcccacggcatcagctcccatgggtcctgccaggggacacaccccgagcccagggtttgggtgatggggggggaacacaacatcgcttatctcaggaacaccctgaaatccctttcaagaatagtacacctaacatcgtccttcagattctgggcctgtttaggctccagtgcagcaaagaccctaacatccttaagtaatgctgaactctgcttccccagacagcccacctccacttccccgcggccgggcgtctaggactcagcagccacgccatcattgccacacctccacctcgagcagccctgccctgtaytctccaagccacccacagcagcaaagggctgaggagcgtccctgagacactttaaggccgtctggtggcagctatgtttaagagaccagcgtccttccaggctgttcagacctcagcgttgacactgaaactggcccctccgcggaggtaaggccgccctccgcgccgcctrtgcctgccctgtctgtagcaaagactcctctcccctccatccctgctgcctcccctacccgtttgacgacttggttctggctttttctgactgttctttatcctgttttccccctgcactcacaaaattgtattccatcttctggtagacgccccacccccagaagttttaacctgaaggatgactgtcacaggactttcaaattgtttagcagtcagcatagtcaggatccaagcccgcaatcttgttttaaattaattatcacatctaaattagagawtttgtcacccaatattaggactgaaattcagactcggtaacttgtctgagatctgcaagactgaacatcccctactgtatagtttcctgacattttcatttagcctttcctaattatttttgtctatagtctgttgtaggtaactctaattgagcccgaaaccagaataaaaactcttacattggaaacatttcaaaaccattggattgttggattatttgttaccatttttctctgaacacattttagcaatgacatatgaaagtattcagttgtgtttactaacttcaaaaatgaaatcgctccatcaaatttcgtttttctagtcggtaagatccctgaggctagatgaaaatagagcacaggtcatcactagggaaaatattggatgctttttgcaaacagaacagatagggctgagttctgatactctaaaaatttacaatctaattaaaagtggcattcacattcctgaaagctaggagtagccagggttatggtgaagaaattaaagaactaatccacttctaaaaatatgaaaaaaaaaaaataagggacatgcgctcagcatcaggctaaaaacaataatgcagtgaggaaggaactgaagagtgagggaattgtttgaaacaaggcaaggaacagtgcttgtgggaggcagagtacctcccagaactcagacgtttcctcccagcaggaaggctctggagcagtctccgctaatgagagttgtgtcctggaaggaaggaagggtatgagggtctgaaggaagcaaggtgtctggtctggagaactagtggagcagtttagaaaccacccagtcataggcattggttcatttattcatacgtgcatgcatgtgagcctgcgtacattcattcaattattcaacaagcaatttgagtgctgacagcctgccaggctccagagagatgccagcagacttggaaggtggttatcttccctctgtacccatctcgctctcttcgtctccactttctcattggaacaatcactggtgtctggtggtggggtatgagcagagacaaatgactacagggcaaatatatacaatgctagttgcattggtgttacattgcagtgcacaaggccatcatttgatgtgttcaatgatagtgcctacttcagtgtaatggaggaagttgcaattacaacggtgaacttccacctccaaccaatacagaatggcagcaactagaattacactcccaccaaaacaactaacacacctgctaaaatatatgtaacaacagtttccaaaacactgggcgtcaggtgataaggacagtgctctttgagagataaatgtgatgagccctgtgcatttcccagtcgcttcctggagatatttccaggctgcagcatagggagggggaacccaaacacagcccggcagcctctgtgagctgaggagatggaaatggaattctgaggacaccaaggtagctggagtttaccagggtcagggctggtgagcagagagctacagagagaaagctcgctggagacctgcggagtggccctcttcagtcttcagctaataagtgcatggctgtgaggaaattactgaagaccagagaaaggaccactcaaagtgattacaaggaacaattcctatggtttacacagggctgggaatatttcctgtttccttcaaccaaagtggaaaatattattcatggggcatcggataaagtattcaggagtttgtctcaatagtggagcaaaactggcatttgactaaatgtttccgtggtcccagcctaacaaagctgaaaagcaagcctgggaaggatcaaacctgtttccaaatacctgtgtcccagaacaaagatcaaggatatttatagggatacaaaaatatccatcatccaacaaggtacaatttacaatgtctgacatccaatcaaagactggcctaaagacaggcatgaaaaacagcaagaaaataacccataataaagagaaaagctggccggacttggtggctcacgcctgttatcccagcactttgggaggccgaggtgggtggatcacctgagctcaggagttcaagaccagcctggccaacatggtgaaaccctgtctctactaaaaatacaaaaattagctgggtgtggtggcttgcacctgtaatcccagttacttgggaggagaggctgaggcaaaagaatcgcttgaacccaggaggttactccggagcaagagtccatctcaaaaaaaaaaaaagaaaaaaaagagaagccaattggaatcagctccggaatgacacagacaatgaaaagtaccagaaatggcaactgatggtatatatatgaaagactttcttttcttaccatttaaatctcctttaaagataattggctttatagagtaatgtcgatagtacattaatgcattttcataaatccttgaacatgcacctggatgcattcattgcctcagatgatttgcacatttgatttttttgctgaataaatctgtacttttagcatatagcagaagtaataaaaggggttcaatctgttaaacacactcacagacacacacaataataatagtgatgataataataatacctatgtatctagattttatggccaccctatataataggccaggatcacaagccaggggcagtgggtgattgctatagggatggagtgattgaaaaccagatgtaaactatgtggaatgggtacaaggtgaatccttgaaacagaaggatgttcttcagaagaaagggaacagatattcaaaaagagactggatcaccaattaagtgatgtaaaaaagattccatacttcaagtgagagtcatctacatacttctaagctcctttccaactctaggagtctacagctcaatgacacagtctattgccaactcagagcatttccacatagatgaaaaactgtccttataaaaggtggatgggttgtagccaacaaaactagacaagagaaatcaattagaggaataataattggaaaagaaggaaaatgatgtttgcacatgataaaagacaacacctgaaaattctgaatcaataacactaatccaaacaaaagaattcagtgagacgaaggatataaatttaatacacagaaatcgatatacacaaatcatgatcgattagaagatatgttgatagtgaaaaacctcatttacaatgacaacaaagaaactaaaatgcagttgattctcactattcatgtagttacgttctatacagtggcatctaacactgaatactgaatcatttttcctaggagacacacaagattaggttcctgcaggccgctggtcaccatattttcatcaactaatcaatatgtaactttgtttttgtgtgtttctgttcaaaggtatcttaatatatattgctgactcattaacatactcatgcccaaccctataagcatgtttacagtaggagagctaaaacaagaaggcagtaggcagattttttcacttctttgagcatgcacctgtctgcaaacatgccttgagcattgattttgaggttacaaataagttttagcagtgatatggtttccaccccaaaatcacatgtcaaattataatttctggctgggcgcggtggctcatgcctgtaattccagcactttgggaggccaaaactggtggatcatttgagctcagaagttcaagaccagcctgggcaacatggcaaaaccctgtctctgccaaaaatacaaaaaaattgctgggtgtggtgacacacgcctgtagtctcagctacttggggtggggctgaagtgggagaatggcttgaacccgtgaggcagaggttgcagtgagccaagatcatgccactgtaccccagcgtgggcaacaaagtgaaactctgtctcaaaaaaaaaaaaaaaaaaagtgtaatccccaatgtttgaggagggcctggtgggagggtgattagatcatgggggtggagttctcattaatgctttagtaccatccctcctgggtactgtatagtgactgagttcttaggagatcggttgtttaaaatatgtagcacctcccctcccctctcttccttctgctctggccttgtaagtactggctccttcttcaccttccaccataattggaagcttcctgaggcctccccagaagcagatgctgccatgcttcctgtacatcctgcggaaccatgagccaattaaacctcttttctttataaattacccagtctctagtatttctttatcacaatgtgagaatggactaatataagcaggtaggtgaattcacaaatatggaacctgtaaatagtgagcatggactgtacctagaataaacttaacaagaaatgtgcaaaaccaatgcatgaaaagctttgaaacactcttgaaagatacaaaagtagactggaacatcctttgttttagataggatgactgaacatcatgaagatgatagttccccctgagttcatgtattactataacacaatccaagtaaaaacaacagcaaacgttttatgaggcttgaaaagtttatagtaaagtggtaaaccaaaaataaaattctaaaccccccccagccatctgagtggccttcctcctaggccagagcactctaaagtttaacgtgaaagactggttcaggccctgaggggaagtgggggtcggaggtgcctcattataccctccagcattaacatcaacacagaccttaagcctgataagaaacatttacaatctattctctctgaagcctgctacctggaggcttcatcagcatgataaaactttggtctcaacaacctcttatggtaacccagacattcccttcccttgataataagtctttcaaccaattgccaatcagaaaaatttcaaatctacctataacctggtagcccccactttgaattgtcctgcctttctggaacgaaccattctatatcttaaaggtatttaattgatgtctcatgtctccctaaaatgtataaaatcaagctgaaccctgaccaccttaggcacatgtcctcaggatctcctgagggctgtgtcacgggccatggtcactcatatttggctcagaataaatctctacaaatattttacagagtttaactctttttgtcaacaaagttcatatggaaaaagaaatgtgagtagctaagaaaattctgaaaaataaagctatggggaggaacttatgttagcatattaaacactatgatatctgtatggttaaaatagtgtggcaccaatgagatatcatctcacaccagtcagaatggctattattaaaagtaaagaaaataacagatgctggtgaggttgtggagaaaaaggaatgcttttacacagttggtgggagtgtaaattagttcaaccattgtggaagactgtgtggcaattcctcaaagacctaaagacagaaatacaatttgacccagcaatcccattactcgctttatacccaaagaaatataaattttttattataaatacacatgtatgtgtatgtttatttcagtactattcacaatagcaaagacatggaattaacccaaatgcccatcaatgatagactggataaagaaaatatggtacatatacaccatggaatactatgcagccataaaaaagaatgagataatgtcctttacagggacatagatgaaactggaggccattgtcctcagcaaactaacacaggaacagaaaaccaaatactgcatgttctcacttataagtgggaactaaatgatgagaacacatggacacatggtggagggaacaaaacacactgtggcgtatcagagggttgaagagtgagaggagggagagaaacagaaaaaataactaatggatactaaacttaatacctgggtgatgaaataatctgtataaccaatccccatgaaacacatttacctatgtaacaaacctgcacatgtacccctgaacttaaaagttaaaaaaataatagtgtggtactatcacaaggaaaggcaaatggactaggtgtccaaaaaagacataatatatattatttatctatcatctatctgtcagtctatctacctatctatatatctgcaattgtccctcagtacttaagagattggttccagcaaccccttggataccaaaatctgagaatgctcaagccctgcagttggccctg

SEQ ID NO: 96956 - DNA, 13351 bp, Homo sapiens
cgtgagtgtggtgtatgtgtgtgtcgctggccactccgatgggagtgctcgccactcctgctcctccctgttcgtccttgcaggttcttcagctctgagcagtacagaacaggaaagcccatccctggtgaggccgctgggaactgcccttctccttccctccctccccttccaaaataggatgggttttggtccaggggaccggggagtctctttttgaatactctgcccagtcctcaaggtactaagaagatggcagccaatggtacctcccacatggctgcttgatcattgagctggatacagagcctgttctggcaattgagacctggggcccctgggaactgggcccactggggctgggtgggctgggtcctgaggacaccgactatagtcatgctgtgggtgcagaccagctgctcaaggagccaccattccctctgagcacacgatccatcatggagcccatgtccctggatgcctggctggacagccaccacagggagctgcaggcaggcacaccactcagcctgtttggggacacctatgagacccaggtaatgtagtcctggggcatccggggcatcctcccacagcagccctggaaaatgggaaccagtctctctctcactgcctctctctctctttcacacacacactcacacacacacacacacacacacacatttcagaggttgtagacatgagcataggcctttgtgctccctccctgacgcagaaggcgatggctctgctccgagtgaagtctgtggaggctacatggtcccaagcaattttatgatctgaattcactttcagagttggaggttcccccactcactggcagcttcctgagggtctgcagttttcccctcgctaggaattcctgaaccttcagccagtcacagccttggaagccaaaagggagagagttgtttgggagtgagggttgggtggagagagggattcaaacaaggctgactttctttcattccacatttattaaatgcctgttatgtttcaggctttagtgggagagtaggatagagttgctaccttaaagaatgtatagtttgttaaagagatggacaagttaatcaacaattgccacaatcatgtgataaagtatcagatagaaaagctataggaagctatagaaggataaaggaggaacccactctgaaagggaagtcaaggaaggcttcctggaggaggtgacatgcacattgcattttaaagctagtgtaggagtttgtaaaagaaagaaagggaggtggagagagcattctaggtgagggagaagcatgagcatgagctgtttcaggcttgaaacagcctggcactgggagcagccgaagttggccagaggcggggcttgggggtgggggtacaagtgtgactggtggactgtggagcagcaggcagggcccaggtcctggtaggtctgctgggctaggcaaggtgggaggacttgtcctaaagacaacagccctccaccaaagtattgaagcaggggagtgacaggccagagtggtgtttctgtaccatgtgtggggacaaggctgggagggcaagagtggtgcagggagacctgtgttcacttgtgctttacggcttgccactggcacatcccatgggctttgaatgagtcaatctgtgcagggatgctcatggccacaggcttcccgtagaggcctggcctgctgctcttgggtaccagggacgtcctgagcttacacagggctgcgagaacatgcgcacatgtcacagcagtaccactcagccctgcaccccacctctgcaataccctgctcttacctgcttcagtttacattaatgaatatgcaccctctccagggcatcagcagcacggccctgcacagtagctgtgtgcttccaggctggtgcatgtcagagagccctcagcctcaccttccttgtcccctcctcctcctgaggccagactcataacctctctcagagaaagggaggtggcaccctctgggaagctgatggaaatgcgtccctcatgtgccctggtgagcatgccttcgcatgagcacacatcagagggaccacgggtgcactgcacgtgaaaggcaggcatgtgtgatcccaaatacctgttgcagcggcgggcacagggaggcctgcagcccaggcagccctcctctccaagtcctggtctctgctcagcacatggtgatggggctgtttcatgggccccaaccctgctccaagcaggcctggtgtctgggggccaggttcaagaccatctcccatgtggggcaagaagcaccagaagtttctgtttcacctcccaccaggtgatcgcctatgggcaaggcagcagcgaaggcctgagacagaatgtggacgtgtggctgtggcagctggcaagtggggcccagggacagggttgcagaaccccctgccagagggcatcagcccgctcctcggccctgggctcccacacggggcccactcttggggccttggggcccaggcagactcagacattcacccaggtgatgaggcccaacagtctccatttgattctcctgctcctcttctccaggagggctcctcggtggtgacaatggggggacggcgcctgagcctggcccctgatgacagcctcctggtgctagctgggacctcgtgagtacgcagggagggctttccctgggatcctcagggtccaactctgtgtgatccctgctcatctgtgtgtccacaggtatgcctgggagcgaacacaaggctctgtggccctgtctgtgacccaggaccctgcctgcaagaagcccctggggtgaccctcttgccatggcctgaagcagccacaggtgtgccaagcaccctcgagtgccatccctgccaaacaactctcccagcccccactacctctctgtgtactgccgctgtgtcccccacagacctgcacattgttgtcacccaccctcctgcccttctcagcccagatgccatgcccctgggcgggcagcagctccccatcttctctggcagactcagcccactgccttgccagtcttgccaggtggtctacccccggccccgctcctgcccattcctctgtccctgcagactcagtgcagcacttccacaccaagaaggccctcaataaaggcttcctgaggaacgcacacctgggggtctgccgcaggcagtcatcactggccttcccatgtgccccccaggaccatgtggtgtgtctggggcatcagggcaccaggtgaccatggacgtgttggagggtctgttattgggcatccctgtttgtggatgggcattcttcactgtgtgtgtgacttgatccacgcatgctccatgcctggtcctgggagcacggctaatgtcatctctccacttccttctctgttctcatttattctttttactttttttttttttttgaaacaggatctcactgtcaccaaggctggagtgcagtggtgtgatcagagctcactgcagccttgaccctcctggctcaagtgattctcccacctcagccttctgagtagctgggactacaggcatgcaccaccacaccctgttaattttttttttcttttttgtagagatggggatttcaccatgttgcccagtctgtctttttacataactttaaaacactagcatctgttgagtttttttccaataacagaagtcatctgtgctaactatagaaaacccagaaatacacaaaatcccccacccagagctaaccactgttaatacctaaagactatgatcagcctggagaggggcatgaagttgtaccaggagctcagcagtgttggtgggggtgtctggccttgtgtccccttccctcccctgtcatgcacaggtgccctgttcaaagactccagagggacccctgagcctgctatgggtgtctagggatgctggaggcctcagaggcaccagtgggaagagacaagaatgtggaacctgcagcgggcgcagctcagtttcctgggacttccgtgagaagtcaatgagggcatgcacatgagagtgacagatctggacagaacaggtccctgcgtggactcaaagcttcctctagaaaagaacacttgacccctgtctccctcatccccagcccagtggctcactgccttcctacactccactgggagcagagaaagacctgcctttgctgaaaaggctactggccctaagagacatcgggaccttcaacctcctcgtcacccctaagggctttcctctcctgcaagcaaagaaaaaacaccatcaggctccttcaaacacaaatggtccaggataggcacaggcagaggctccacgcggctcgttcctggcctgtagcaatgcactgctccgtgcaggacctgagaagaagacatagaatgttccagggaggacccaggtcagaataccgatggccgtgaagagaagagtttactctcatatgcagggcaagcttaatccagagagaaagtcatgaaaattagatctgtttttgtgaacactcgctctgtcccaaggaatcccctagaagttttttttttttttttttttttttttttttttgagacggagtctcactctgttgcccaggctggagtgcagtggcgcgatctcagctcactgcaagctccgcctcccaggttcacgccattctcctgcctcagcctcccgagtagctgggactacaggcacctgccaccacgcccggctactttttttgtatttttagtagagacggggtttcaccgtgttagccaggatggtctcgatctcctgacctcgtgatctgcccgcctcggcctcccaaagtgctgggattacaggcttaagccactgtgcctggcctataagtttttacataaattatctcattttatcctcacaactctccaagaaggtggtagtgcctgattttacagatcaggctcagagaggtttggaaatagggcagctctgtttccaacccaggcctgtctgcatatggagcttaggctgggcctcaccaccctgcttctcccagggatgtttgccctcagccttgaccaaatgggagcccagggcagccaagagaggccaggggccactgtgcctgggacacagaggccaggccacacatggcagactgctgaccccagccagttggcagtgatggggtcaggccctggagcctggaaccagcacctcccttggccctgctgtcccgggttatcaggagcctgaagccctcatctccacccacaggaccagcccatgggctcatgagaatacctcaccatgggacagctggacttgtaccttgtctggagctagccccagcctcccactccctattccgcagtgaatgctaatgggggcagggagtggagtggacaaggagccatggggagacacagacagggaaaaatcaggattgttctatttgcgggagaagcccccagctccccgtgccatggcagtagaaatttggcaggggcgtccccgtccatggggcctacttcaccgtgtacccggacttgggaccatcacagacttcggaaccatcaggaacctgggagcaactgaaagctgaactacagtgggctttcagacacacagcaggctggcggagcacaaataggactggttccctccaggccaccagcagggcggtggaggtcttcactgactccctgcctacctctcaggacaatgtccttttggctccacagtccctgaagccagagctggtgggggcagggaggcagccaccagcctctatatgtagtggaggagggggtgtccagggagggctgcatgatcctgagagcccccacctcacccggctggactatcctcccacttcagggtttctctgggcttccatcttgcccctgctgagccctgcttcctcctctaccagcagcacaacccccaggctgggctcagagacctcatgtggtgggatcactcagtaccccgaggcggagggaaggagggagggctgcagggttccccttggcctgcaaacaggaacacagggtgtttctcagtggctgcgagaatgctgatgaaaaccccaggatgttgtgtcaccgtggtggccagctgatagtgccaatcatcccactttgccctgagcactcctgcaggggtagaagactccagaaccttctctcaggcccatggcccaagcagcccatsgaacttcataacctgagctctccatctccctctctctcctcctctgttctccctccctccttctctccctcaccctcctctgctccctctgcctttaccactgtgggggggtcctctggagggccctgccaccccacctcttcctcgctggtgtctgccttcctggcaccaatcctggccctggagtttgtcctgggcctggtggggaacagtttggccctcttcatcttctgcatccacacgcggccctggacctccaacacggtgttcctggtcagcctggtggccgctgacttcctcctgatcagcaacctgcccctccgcgtggactactacctcctccatgagacctggcgctttggggctgctgcctgcaaagtcaacctcttcatgctgtccaccaaccgcacggccagcgttgtcttcctcacagccatcgcactcaaccgctacctgaaggtggtgcagccccaccacgtgctgagccgtgcttccgtgggggcagctgcccgggtggccgggggactctgggtgggcatcctgctcctcaacgggcacctgctcctgagcaccttctccggcccctcctgcctcagctacagggtgggcacgaagccctcggcctcgctccgctggcaccaggcactgtacctgctggagttcttcctgccactggcrctcatcctctttgctattgtgagcattgggctcaccatccggaaccgtggtctgggcgggcaggcaggcccgcagagggccatgcgtgtgctggccatggtggtggccgtctacaccatctgcttcttgcccagcatcatctttggcatggcttccatggtggctttctggctgtccgcctgccgmtccctggacctctgcacacagctcttccatggctccctggccttcacctacctcaacagtgtcctggaccccgtgctctactgcttctctagccccaacttcctccaccagagccgggccttgctgggcctcacgcggggccggcagggcccagtgagcgacgagagctcctaccaaccctccaggcagtggcgctaccgggaggcctctaggaaggcggaggccatagggaagstgaaagtgcagggcgaggtctctctggaaaaggaaggctcctcccagggctgagggccagctgcagggctgcagcgctgtgggggtaaggtctgccgcgctctggcatggagggacaaggccagcacacggtgcctcaaccaactggacaagggatggcggcagaccaggggccaggccaaagcactggcaggactcaggtgggtggcagggagagaaacccacctaggcctctcagtgtgtccaggatggcattcccagaatgcaggggagagcaggatgccgggtggaggagacaggcaaggtgccgttggcacaccagctcagacaggggcctgcgcagctgcaggggacagaggccaatcactgtcacagcagagtcaccttagaaattggacagctgcatgttctgtgctctccagtttgtcccttccaatattaataaacttcccttttaaatatatttatttgcaagaccaaatatctgtctttaattctaacctgggactatcagtaggcgtcaaagtgagcgccccaaggtgaagggaaacttgggagagagtggggaagccatcccacagccccatcccagggggcactgtccttcccagaacttctgggaagccccggcatgtcctgaaaggcagaactgctttcctgggtgaggcctcaggcaggccaccagggctccaggccctcgggtacagagtttgatgctggggacctaacatccctccccagttccctcaatccacttagcccagccctctcatatcatggacaggacgcaccccagctactaaagtcgtcaggaatagaagtgaaagcccagaagtgtcacacacagaccaggagggtggcatcaagggtccatgtggatgctggggagggagcgagagaaaaagtatcaggcagagggaggtgggcccgggaaggatgagcgggtgagtaccagaccccgcctccaccgtgtatctccagcccacttccctgttctgaaaatctacctgctgcactcagaaacctaccaaggtactggggtgccacctgggccccccccagggttgctcttctgtctctcggctccccatgggcccctcttgccccctcaactcctactgctcccttttactccctggagccacgcctagggggtccctgcttctccacgccctctgtcaccacagggaagggagtccaaccctgggcggggccacctcagcctgagtcaggtcttttaggaaaggcctgcacactcctggaggatggggactgagcagctccttcgggtggatccccacctggggcgccaacacttaccgccagctcaacaccaggcacctttcctctggtaccatctctgcccctgaatgcgcccacctgggctcagggcagctccacgggccatttcctcaatctcctcttccctggacccttctcctaccaactcctccctcaagtcctcgcacctctcccagcacctgccctcactccttcatgacctgatggaagggaaatggacagatactcccatggtttgcaggcatgtctgcagtcctgtcttttcccatcaagggagagagcagaggctgcccttgaggagttcctgggtagatgctggtcacagggttcaggcccgcactcctaacctgccctggattctccttgctccccatcttgaccctgaggactgcttcctcactgacagtctgggtcacaccacccttccccgcctttccatcatttgcaaggccttctctaaacggggttgggtgctccctcgcgaagcaggcttcaggctgccgccacatggaggtaggactgactccctggtccgaactatggccccagcccactgtacccttctctggacttagttctccatctgtgaataggaatagtaatcctggcccttgcccagctccaggggctggggatgggagtaactatatgcccagagcacttggtgaggaaggcagttattatgtggagcagggaagggagaaggaagaggagtgggaagagaaagaaaactgtgtttaagtgtagggtttcctagagatggagtagtaccccgtggtggtataatgggagctgggggcaggcggagaccccatttcctacatttgggttctaaatggcattttggtcccggggacaggctgcactatccagtgtgaattttgggcagcatcttccacccttttttctcttctttctcctaacataatctgctgcccccctgagagaggatcagatggcatgcattaccttcctccagggactcctgagcagggggcaagcaggcagggctgggtgacaggccagcagtcattaacttgccagtgcttactgggcacctgccgtgggccagacactgagctacaaaggcagacaactgtactctcactttgagctccccccggccaagccggggagagacggacctgcaaatggaaccagcgcaatgcaacccagtgcaggccagggtcttttaggtggtgatgcaccctgagagcagaggcttgaagagctgactctgcctgggctgtcaggtaagtcatgcacataagctggatctcagaggatgaggaaggagagaaaagaatggcatccctggcactggaagggcatggccagcgcatgcagctgtgagaagactcagtgtgcaggggtgtggggaggagaccactgaggcaagagaggaggaggcctaccacagagctaggggacaggcaggaaaggcaggaaggaccagatccagaagggccctggtgccaagcccaggagtctgggttgatcctgcagacagtatggcaggagacgggtgtgtgcacgaggttgttaagtggaagatgatgattggtttgcattttcatcagttactctggcaagagcatgagggtaggggacgtgggagatgacctatgtctgtattccaagcaaaggcctgaagaaaggcagcagcagagaccacggagggtccaaatggggaggctgtgtgggggacacactgaggatgcaggtggtggagcaggtttggaggtaaaacaagttgtaggggcttggaagacacccaggcaaacatgtacagtagcacacttcggactggagatagaagcaagggtcttccactcaccagggctatgggaaagaatgtggtcatctggtgagaatgaagagaatcaagaaacatcctttaaaaaaatccctgcaagtaagggacacatgtaggaaaacccagtgaaatgctcagaaaaaaaaaaaaatctttaggaaaaaagcaggactgcagaagaaaagaagtcaaggcaatcttcacccaagtaagagattgcccattaaaaaggacagaatcaagccatcttttatgaaggtaaaagccaaacataaaatacccagacagtctgcaaagtgcctcctgcaagaacagagcattttcaaaagtgtttcctaattacatattgaagagagttgatctgaaaaccagtgtccatgtctgacactgtctggtcaatgaacaccctggatggacaacctggattaacaatgcactgtctgggtctattttttaaaagcttttcaaaaagtgataggttgtcattgtatgaaatttaataatatgcaaaacatgctatcatttatggattcatacatacgcattaattgtataaaatcatgtatgggatgataaacactaaattaaagagagtacttactgctgagatggaggaaaaatgggaagtggcacacaggtgatttactactagatctgaaattatctttgtaaaaaaaatctgaaaaaacgactatgaatgacatctgcatgttacttagcattgctttgggtagagaataaagggattagtgtaacgaatgaagaaaattcatatggctacaacatcttcaaatgctcaagaaagctcaaagaggatgacttaagaatagcattggatttaacaattagaaggtcattaaatgtgactttattgacagcaatttcagtgagtggatgggggtgggggcagaatggaagccataaagtgctataatgggttgaggaattaatgagatttgaagtaatggagacaactcttcccctttcaacaaatgtgccagtaaaaggagagaagataatagctttagatgaaactaagcagaggacagatgttttggtggtttgactgttctgttatttggtggattagatgaagagatttttaaatacaggaggagaagggagaaaagaaaaatactggggaggaggggaatgatgatggggactggaatgtaccaggccttattctaagcattttacacatattaatttttttagtcctgatgagggagattccattattatcccattttacagatggaaacactgaggcacacagaggttgaataatttgcccaaggtcatccagctagtaagtggcagtctggcctgagtcaagacactattgcaaggccctaagggagtggaaggatgaatgcagctcatgggtggcaggagggtctgtccccagaagatagaaggatgcctctttgagctggagcaatggcactatttcagtaggtcttgggacaaggggaataaagctgaagggattcttagaagccgcagctctcaggggataaggacttaaaaagtggcaaaggattggaacagctggttctggaaataagaaaatcaagctcccaacgaagaacatagaaaagggtcactaagcaagtggctcaaaggggcctggtgagttaagcaccctgatgagttaagctgtggggtcgtgagtaggtggtgtggttcctccagcaatctctgcacccaggagcagaatcagaataaacagagggtaaaacctacccagggaggggcagaagaaacctcctaggaagtccgatgataaaaacccagtcctggtatggagcttaaggtcggcccccttgagaggtatggcatgcaacactctaagctacagaggagcttccagaaagagggaggtgatatttgagttcgcattaaaagccttaatttaaaacaaaaaacaaaaaaacaaacaaaaaaaacactaagaaggctgggcgcagtggctcatgcctgtaatcccagcactttgggaggccaaggagggcaaatcacctgaggtcaggagttcgagaccagcctggccaacatggtgaaaccccgtctccactaaaaatacaaaaattagccgggcatggtggcgtgcgcctatagccccagctacttgggaggctgagacacgagaatcgcttaaacccagaaggtggaggttgcagtgagtcgagatcgcgccattgcactccagtctgggtgacagagcaagaccacgtctgagaaaaaggaaaagaaaaaaataagcttagtgtctccttttaagaaaatctttcagaaagcccagcaaacaagagtcacaaacatgtgtacttcacaaacacaggctggaggggtcccaagggagccaagcttcactttcccctataatgaccttggcacagcagctgagacagagtccacacaaacagccagccaaacagcaaaccccatgttggggcacagcagccttcctcagtgcaccacctgaacaccccagcacccatccccacaacccagcactggccacagcagggcacaagtcacactgcagggtagttcacgggaaaaaggctgcctattacacctcatacctccaggcctgggggcacagggtcaaaggcctcctactggggtgaccttgcctcgtgaaacttccatgtccccaggatgtggcttatgagacagcagaagaagatgcagaccctggggaaaggcctctgagagtctcagtgcagctggggcacagcagaccaactggcctggcctattacctccccggggccctcggagctcaaggttctgaaacaaggaccacctgaggctgggcctaggggtgcgtgcacagtcttacacctgagccatcatcctagtaaagaacagcataaaaccaggcaaaatttccaggaatttattggaaacacaatacaaatt

SEQ ID NO: 96957 - DNA, 12599 bp, Homo sapiens
  misc_feature (1)...(12599): n = A,T,C or G
aaattttgcaagaaaaatggcaaggttttatgtttctgagaatgttaggctaggttagactaccttctactcccccaccctccaccccagaaaaacagccacaattgttagatgaaaaaacataaataaaagaactgacaaaaaagcaggaaacttttggatcaaaatctaactgaaaataacgcagaaaggtaatttaaacaccatagaatggggtctgcttttgtcctgagggcatttgctcatgtggacaaagtggggctttgagtttagaggatttgtgaaaagaacagtagttaagctcgattcctctcaaggtaaatagcctaaaggagaccctccccacaccgatggaactctgaagggctctatcctcaaggtgtgagggcagactagaggcacatgtgcctcacaccgttccttgccctcatctggttgtctttttactaaatgtagcacaaaaagatgaaaagggaaaaaaacctgttcctgagaattgtagctctgtattggcctttgtgaggatttttagcccagttacattgcctggtagttcagggaaatcgggcatgaatttaattcaaggtgtttctagcttgtcatctgacaggaacaaagataaaacctctctggaagaagttaccttcatcctaagatacaaagaatccctgcagattttttttttttttttttttttttttgagatggagtcttgctttgtatcccaggctgaagtgcagtagcacaatctcggttcactgcaacctctgcctcccaggttgaagcgattctcctacctcagccttgcaagtagctgggactataggcgtgtgtccggctaatttttgtatttttagtaaggacggggtttcactgtgttggccaggctggtcttgaactcctgacctcaggtgatccgcctgcagatattttttaaggacagtgattaatagtacacagacaaaaatgactaagcacacaagcaaataagccactctgagttaaaaccagtacagttcaggtgtggtggctcatgcctgtaaccccagcatattgggaggctgaggcaggaggatggcttgagtccatgagtttgaggctgctgtgagctatgattgcaccgctgcactccagcctgggtgacaaagtgaaaccttgtctcaaaaaaacccccagaaaatgaaaacaggaaaaccagtagaaacacttcctcaaagacttcaggtattggaattgttagaaacagactataaaaaaagtgtactttttgtatgtgtgtgagaaggtcttactctgtcgcctaggctggagttggagtacagtggcgtgatcttggctcactgcaacttccgcctcctgggctcaagtgatccttctgtctcagccttctgagtggctgggactacaggcacacaccaccacacctggctaattctttgtattttttgtaaaaacaggtttttgccgtgttgcccaggctggtcttgaattcctggctttaagcaatctgcccacctcggcctcctaaagtactggaattacaggcgtgatctagcatgctggctgagtgtgcttcttatttttaaagaaataaatatttggctgggtgcagtggctcacgcctgtaatcccagcagtttgggaggccgaggcgggcagatcacaaggtcaggagatggagaccatggtgaaaccccgtgtctactaaaaatacaaaaaattagccgggcgcggtggcaggcgcctgtagtcccagctactcgggaggctgagacaggagaatggcgtgaacccaggaggcggagcttgcagtgagccaagatcacaccactgccctccagcctgggcaacagagcgagactccgtctcaaaaaaataaaaaataaaaagaaataaatatttaacaacataaaaatatttgtaagaaacagtaaaaggtgatatagaatatttgaaaaaggaccatgtagaacttctagaaataaagaataaaatattcagtatcacaaattcaggccaggtgaggtggctcatgcttgtaatcccagtactttgggaggtagaggtagggagatcacttgagcccagaagttcaagaccagcctgggcaacatggtgaaaacctgtctctacaaagaatttttaaaattagccaggcgtggtggtgcacacctgtagtcccagctacttgggaggctgaggtgggaagatcactcgagcccaggaggtcaagccatcattgtgcaagtgcactgcagcctgggtgacagaacaagaccctctctcaataataataataataattcagtgtgtacaggtttaataacaaaatatatacagtgaagtgaaaatcagtgaaccagaaaacaggtcagaaggaattacccagaatgaagcacagagaaaatgatgggaaacataggccagaacatgggacatcgagggcaaatgtctaatggatgtttacttaatgttctgtaaagagaaaagagagaatgaggcagatttattattagaaaagataaagactaaaatttctcagaattggtgaaagaagtctacagatttaggccaggcgcggtggctgacgcctgtaatcccagtactttgggaggctgaggcgggaggatcacaaggtcaagagttccagaccagcctggccagcatggtgaaaccctgtctctactaaaaacacaaaaagtagctcagcgtggtggcacgcacctgtaatcccagctactcacgaggctgaggtaggagaattgcttgaccccagaaggcggaggttgcagtgagctgagcttgagcgctccagcctgggtgacagagcaagactccgtctcaaaataaaagaagtctacagatttgagaagacaaatgaatggtaagcaggataaataaaaataaaatttatagctagccaaaggagagtaaaactacaaagcaccaaagagtgttcttaaaataaacgaaaaacacagatcaactttatctgagcagcagtaagaatgatggctgacttcttaagtgccacaatggaaaccagaagccagtggagtaatattttcattgtgctgaaagtaaaacaattcctgacttctaactttatatcaggaaaaattatctttcaaaaaaattatctgctgtaggctgggtgcggtgggtcaccctgtaatcccagcactttgggaggctgaggcaggtggatcacctgaggtggggagttcgagaccagcctgaccagcgtggagaaaccccatctctactaaaaatacaaaattagccagacgtggtggtgcatgcctgtaatcccagctacttgggaggctgaggcaggagaactgcttgaacctgggaggtggaggttgtggtgagctgagatggcgccattgcactccagcctgggcaacaagagcaaaactctgaaaaaaaaaaattatctactgtagttgaatgtttatgtccctccagaattcatattgaaacttaatccccaatgcaatagttttaagaggtggggcttaccagcctgagcaacatggtgaaaccccatctctacaaaaaaaaaaaaaattagctgggcctggtggggcatgcctgtagacccacctacttgggtggctgaggcaggaggatcactcgagcccaggagattgagactgcagtgagccatgattgcactgctgcactcctgcctgagcaacagaattaaaccctgtcccaattaaaaaaaaaaaaaaaaaggtgaggcctagaatatgatgaggccgtgagggctccactctcatgaatgggattagtgccttgtagaagggcttgagggagtctgttagtcccttttgccatgtgaggacacagtggaggcaccatctgtgaaaattaggtcctcatcacacactgaatctgctgctgccttggttttggatttcccatctcccagagctgtgagaaataattttctgttgtttataaattacccagtctaagatattttgttatagcagcagaaacaggctaagacacagtcctttactaaatacaattctcaagaataggggccaggcacagtgattcatgcctgtaatcccagcactttgagaggctaagaagggtggattgcttgagtccagaagcttgagaccagcctgggtgatgtggtgaaaccccgtctctacaaaaaaataaaaaaattagccgggagcggtggtgcatgcctgtagttccagctacttgggaggctgaggtgggagtatcacttgagcctggaggtggaggctgtagtaagttaagatcacaccactgcactctagcctgggtgacagagtgagaccccgtatcaaagtaaaataaaagatagaatggactttaggcagaaaacagtgatcctaaatggaagaactgagattcaaaaaagaatgcaaagcaaatatgtgagcaaattcaaattagcattggaggggtgcagtggctcctgcctgtaattccagcactttgggagggtcacttgagcccaggagtttgagaccagcctgggccacatagggagaccttgtctctacaaataataaaaaaattagctgggcatggtggcacattcctgtagtcccagatacttaggaggctgagatgggaggatcacgtgagccttggaagttgacattgccgtgatcacaccaccatactccagcctgggtggcagaccgaaaccctgtcccctccaaaaaaccccactaattgtttagtaatataataatatctatggggtaaaatcaaggtagaatttcataatacatgaaaatagtaacaaataagtcatgaaggagagtaaatgaagttaaaacattccagtctttgtagtagctgtgtcttagtccatttgtgttgctataaaggaataccagagggtgggtaatttataaggaaaagaggtttgacacagttctggttctggtaagagtttcaggctgcttccgctcatggcaaaagttcaaggggagccaaagggaagctagcttgtagagaccccgtggtgatagagaggaagagagagaaagagaaggtgccagtctttttcttttttttttttggtatttttagtagagatgggggttttaccgtgttagccaggacggtctcgatctcctgacctcgtgatccacccgcctcagcctcccaaagtgctgggttacaggcgtgagccaccacgcctgatgtttttttttttgagnnnnnnnnnnnnnnnnnnnnnnnnnnnnnnnnnnnnnnnnnnnnnnnnnnnnnnnnnnnnnnnnnnnnnnnnnnnnnnnnnnnnnnnnnnnnnnnnnnnnnnnnnnnnnnnnnnnnnnnnnnnnnnnnnnnnnnnnnnnnnnnnnnnnnnnnnnnnnnnnnnnnnnnnnnnnnnnnnnnnnnnnnnnnnnnnnnnnnnnnnnnnnnnnnnnnnnnnnnnnnnnnnnnnnnnnnnnnnnnnnnnnnnnnnnnnnnnnnnnnnnnnnnnnnnnnnnnnnnnnnnnnnnnnnnnnnnnnnnnnnnnnnnnnnnnnnnnnnnnnnnnnnnnnnnnnnnnnnnnnnnnnnnnnnnnnnnnnnnnnnnnnnnnnnnnnnnnnnnnnnnnnnnnnnnnnnnnnnnnnnnnnnnnnnnnnnnnnnnnnnnnnnnnnnnnnnnnnnnnnnnnnnnnnnnnnnnnnnnnnnnnnnnnnnnnnnnnnnnnnnnnnnnnnnnnnnnnnnnnnnnnnnnnnnnnnnnnnnnnnnnnnnnnnnnnnnnnnnnnnnnnnnnnnnnnnnnnnnnnnnnnnnnnnnnnnnnnnnnnnnnnnnnnnnnnnnnnnnnnnnnnnnnnnnnnnnnnaaaaaaaaaaaaaaaattagctgggcgaggcaggagaatcacttgaacctgggaggtggatgttgcagtgagccaagatcacgccattgcactccagcctgggtgacaggaatgaaactttgtctcaaaaaaaaaaaaaaaaagagaactcagttactccctcaagaatggcaccaaaccatttacgagggatcttccccgacaaccagaacccctcctaccaggctccacctcagcatggggcaccacacgggccccacctcagcatcacacgggcctcacctcagcaccacacgggccccacctcagcaccacacgggccccacctcagcatcacacgggcctcacctcagcaycacacgggccccacctcagcaccacacgggccccacctcagcatcacacgggccccacctcagcaccacacgggccccacctcagcatcacacgggccccacctcagcaccacacgggccccacttcagcaccacacgggccccacctcagcatgaggcatcccagtttaacatcaggcttggtggggccaaagaaaccatatccaaattacagcaaactaggatagggattaactgtagattttaataagtgcagtttacaagttctaaggaattattgtaggaatagaaactggccaggcgtggtggctcacgcctgtaatcccagcactttgggaggccgaggcgggtggatcacgagatcaggagattgagaccacggtgaaaccccgtctctactaaaaatacaaaaaattagccgggcacggtggcgggctcccgtagtcccagctactcaggaggctgagacaggagaatggcgtgaacccgggaggcggagcttgcagtgtgctgagatcacaccactgcactccagcccgggtgacagagcgagactccgtctcaaaaaaaaaaaaaagaaaaaaaaggaatagaaactgtacaatttccaaattagtgaagagaaagtagtggaccttcctttattcttgtaaggaaaagctgcaacaatttttttagcaaccattaactaaatgataatatatattgaaaacttaacctgtgaaaatggaaagaagacagggtgcatgcttttaccacttgagaatagtgatggaagtcttagcccaataaatcagaaaaaggataaaaagataaaagaatttaaaaggaagaaacaatctattattcgttggtgatactattatgtatgtagaaaatccaaaatgatccaaagctataatacagtcaattctttacccaaacagctttaaagtcaataatcttttagcaattgtctggataaaaaagtcaaacagggcacggtggctcatgcctgtaatcccagcactttgggaggctaaggcgggcggatcacaaggtcaggagttcgagaccagcctgactaacatggtgaaaccccgtctctactaaaaatacaaaaactaagccaggcatggtggctcacgcctgtaatcccaggcctgggctaggcaaaagggtgaaaatccgtctccaaaaaaaaaaaaaaattcaaacaaaaataaattacagtgtaccaccaacaaacacactgaagttaaaaagtagaattataaataaaaaatacctgggaataaaataaaagatgtgtaaaacctttatggagagcactatacaattttgaaagcaattaaagacttgaataaatgggcagaggtaccctggttttggattggaaaacttactgttataccagttcttctccaactgatcgagaaattgagtgcaatcccaataaaaaacccgagattgtcagtgagggtgtgggaaaagggtgaaatttacaagcaaatttttttttttttttttttgagatagggtctcactctgtcacccaggctggagtgcaatggcacagtctcagctcactgcaacctctgcctcccagactcaagcgattctcctgcctcagtctcccgagtagctgtgattacagggatatgccatcacgcctggctaatttttgtgtttttagtagaaatggggttttaccatattggccagggtggtctcaaactcctgacctcatgtgatctgtctgccttggcctcccaaagttctgggattacaggcataagccagcacacccggcctgatttagaaatgatatgaaaatgaaggggtccatgaatactcaaggtgtgattgaagaattccaattcattccatgtgtcaaagatcttgttttaagatgttggtgtttttatattggtagggtgcccatcagccctggtttgcccaagtgtcctggtttttcctgtggtcctggtctcattaagaaagtgttttcatttcgagtccttttggaagtcttattctgctgtttgggtaaagaattgactgtattttttagtttttaatttttgtttttagggttgcccgtgttttcccaaatacagaattctaaaccagagaatagcaccttacatagtagagagattgcttctcttttggtaggcggtggccaggaaggaacgccaggtagcattaagccttggcccccaagtatgtcttgttccctgtctctttgctttcagtgggttccttgggccttcttgtttatgatggagaatacataggaattagcctcctcagcttccttctttcttgctgtgcttaagacaagcagccatatggggctgttatctttctgccactgggaaatgagagggtgggtgctaaaaaattaacttaaaaaggaaaaggatgaggccaggcgcagtggctcatgactgtaattgcagcactttgggaggctgaggtgggcggatcacctgaggtcaggagttcaagactagcctggccaacatggtgaaatcctgtttctactaaaatacaaaaattagccaggcatgatggtggatgcctgtaatccaagctacttgggaggctgagacgggagaatcgcttcaacccgggagatggtggttgcggtgagccaagatcacaccactgcactccagcctgggcggctgagcgagactccatctcaaaaaaaaaaaaaaaaaaagaaggatgaacacctttgagctcgtgtgttagtgacatcacatcccttctttcattcatttagtaaattcaagtatgatttgttgggcacttataatatgccaggtgcattacataactcctgtggccttttgaagaaaatattattttatatgaagctcagtgtcttaatctgttttctgctgtttagaatacctgagactgggtaatttataaagaaaagaaattttagtggctcacgcctgtaatcccaccagtctgggaggctgaggtgggcagatcacgaggtcagtagaccgagaccatcctggctaacacagtgaaaccccgtctctactaaaaatacaaaaaattagccgggcgtcgtggcgggtgcctgtagtcccagctactcaggaggctgaggcaggagaatcgcttgaacttgggaggtggaggttgcagtgagccaagatcgcgccactgcactccagtctgggcgacagagcgagactccgtctcaaaaaaagaaaagaaaagaaatttatttcatatggttatggaggctgagaagttcaaggttgagaggcatatctggtgggggccttcttgctgctggggacactgtggtggcccaaggtggcgtgggacatcacgtggcaagggagctgagtagtgtactagctcaggtctttcttccttttttttttgttttgtttttttaagagatggggtgtcactctgttgcctaagctggaagtgcaggggcacaatcatggctcactgcagcttcaacctcctgggctcaagcgatcctcccacctcagcctcctgagtagcagggactataggcgcacagcaccatgctcagctaatcttgttttgttttgttttccatagagacagggtcttgccatgtctagcaggctggtctcaaactcctggcctcaagtgagcctcctgcctttagccttccatagttctgggatcacaggcctgagctactgtacctaacctcttctttttataaagccaccagttccactcccatgataactcattaattcacaaatggattaatccattcttgagggcagagctctcatgatccaattacctcttaaaggccctacctttcaatactgccacactgggattaagttttgttttgttttgttttggagacagaatctcacgccgtcacccaggctggagtgcaatggtgcgatttagactcactgcagcctctgcctcccaggttcaagcgattcttgtgcctcagcctcccgagtagctgggattacagacacgcactgccatcacgtccggctaatttttgtatttttagtagagacagagtttcaccatgttggccaggctggtctcaaactcctgacctcaggtgatccacctgccttggcttcccaaaatgccgggattacagcatgagccaccacccccagccagggattaagtttttttttttttttttccttttttgagacgaagtcttgctctcatcccctaggctggagtgcaatggcgctatctcggctcactgcaacctctccctcccgggttcaagcgattctcctgcctcagcctcctgagtagctgggattataggcacctgccactatgcctggctaatatttttatttttagtagagacagggtttcaccatgttggccaggctggtcttgaactcctgacctcaggtgatccacctgcctcggcctcccaaagtgctgggattacaggcatgagccaccgcgcccagctttttttttttttttttttttttttttgagacggagtcttgctctgtctcccaggctggagtgcagtgactcgatctaggctcactgcaagctccacctccccagttcatgccattctcctgcctcagcctcccgagtagctgggactacaggcgctcgccaccacgccaggctaattttttgtatttttagtagagacggggtttcactgtgttagccaggatggtctcgatctcctgacctcaggtgatccgcccgcctcagcctcccaaagtgctgggattacagacgtgaaccactgcgcccggacaaggttttttttgttttgttttgttttgttttttttgagatggagtcttgctctgtctcccaggctggagtgcagtggtgcaatctctgctcactgcaacctctgcctgctgggttcaagcgattctcctgcctcagcctccaagtagctgggattacaggtgcccgccaccatacccagctaattttgtatttttagtagagatggggttttgccatgttggccaggctggtctcaaactcctgacctcaggtgatccacctgcctcgaccacccaaagtgctgggattacaggtgtgagccactacgcccggccttaagttttaacatgagttttggagtggttatatattcaagccatagactcagggaagtaaagaaccttgctcaaattgtagtaaggtacaaaccgagcttctgcagcaaggaggtcccaaagaacagtggcttgagcaaggtgcaagcacatttctttctcctctaacagtctggtctgccaggtggccttcctcagcttgtggcttccactcgtggatctagaagggtctttatggtttttggtttcccaccaggcggtaaaatcagaacgaaggaagctcacaacagtaagaggttgaggttccagtgttagttacttctactcgcaacccatttacccagagtttagtcacatgatgatagctggctgtaaggagggttggaaaagttaggctgaaggagggtggccatgtacccagctgacctctattctgttgaagaaagggaaactggaaactggggacaagtagaatgtcccccacacctgcctgcagtcacacaggtggagggtgtggatccaggccctctcttcctatctgtcctgctcttccgcggtaccttactactgtttttgggaagaagcagcctttgcgaactttatgtatgtattaaattaaaatcatttatttattttttgagacagggtcttgctctatcaccgaggctggagtgaaggggtacgatcatagctcagggcagcctcaacctcctgggctcaagcgatccccctgcctcaggctcccggagtagctgagatgatagtcccacaccaccatgcccagctagtttttaaaactttttttgtagagctggggtcttgctgtgttgcccaggcttgtcttgaactctgggctcaagtgaccctcagcctcagcctcggcctcccgaattgttgggattacaagcatgagccatgtgcctcttttcacttctgattttggatttttacttaacttgtttgtcccactccaccccctttttaaagttagactctttttcctggtcttttttccccggtggactatgctcaggatcgacatagtcttgtttgttccttggttgtacaaatagtcattgtgcttcatgtgctcacgttgccatttttttccgggccaaatggaaatcaagcattcagcctatccagtggtatgttggtaaatgtttaacaacgggctttctggggaggaaaaaacctcctggtttgtaacacttgctgatttccatggcgttaatactcccaccacgttggagttgagctgccagggtgatgtcctgaaggtggaagagggaagagaggtatgag

SEQ ID NO: 96958 - DNA, 14161 bp, Homo sapiens
  misc_feature (1)...(14161): n = A,T,C or G
ctgaggagacacagcaaagggtgccaacatctaggactgaggccatctggacccacatgactatgttgctttttgtgtgtgaatgtttctctgcttcaacattttcagaaatttcacatctagacgtgtcagaaaattaacaattccatgccagagaaaaggccttgcctataacccaatagaggcccccccagttcccagcaggatggtggcagagctgctgactgggcaccgactcccccgcctgggccggagcaccctctccatgaggacacgtgtcctcctcaggatgggctgagtcctggcatctgccccgtctgtaaagggaaagaccccacccataccagctccccagcagcatctccttgggaaagagggcaaactccagagcagtgcgggtattggagcaggacatcccctcggccgctgctgtgcccagggctccccagggcccgggctggctgggaagactgggaagacttccaggaaccaggcaggccctgcgggtccgggtctctgggtgccagcaggagggagctggtgaccagacatagttgtgtgggggagggtccggacgaaggggttgtcagggacagtggagccacagtcattccgagagctgggcacctgaaaagcacatcacatggaagggtcccggccttgcagtggagactccactgcccccaaccctccctggaaagccccctcacccctgcccagatagtcctcagcttaccctttccctccctccgtccaggttagggcccaggttagggtcttgccttggggtgaagcgctgtgaggatgggggaggggggtgctgggagcatggttcccatttcatccctggcggccaacacaggccaggcaggaagggagttgatgttcagtcccctccccaccttttcttttcatgaaataaatagatgcctgaatcccaacaagaactctaaccacagccttgtctttcccctcttccccacccacacccctcgcccacacggtacctgggtcgggggcggcgggtcactcccacaggaagcgcacgtaccagatggtctcattcttcagctggggcccgaacagggggttcagctgcgccaggatggcgatgagccagctgccagggacagcaaagatggtgagcctggcacaggannnnnnnnnnnnnnnnnnnnnnnnnnnnnnnnnnnnnnnnnnnnnnnnnnnnnnnnnnnnnnnnnnnnnnnnnnnnnnnnnnnnnnnnnnnnnnnnnnnnnnnnnnnnnnnnnnnnnnnnnnnnnnnnnnnnnnnnnnnnnnnnnnnnnnnnnnnnnnnnnnnnnnnnnnnnnnncacttctgggtttggttttggtttcatttgatgttcggtagatctgcaggatccccgagttggggctgaacctggggttagagaagaggggaggcagcctcaggggcgctttgggagcgactcccagctgtgccctcacacacctctgtccaggctcccccggctccatgcaccagggagcgaacagggcaggcctggcgggcagcacgtcagaatcacctcctcttatgagagaaggaactaccccaagacgtgaggagctgacgggtcaggggcctcctgttcaggctgctgccaggccacctctgttcttcaggccagaaaaccctcagggacctgccccacctgtcatcactgctgggcgtgtgggtggctgtctggccccatcattcatgacaaagctcccaacttcatttgccacagtagttagtaggtccccacgctctgtcagtgcctgacctggaagggccccccacgaccacatccacacggctttgtctgtttctgcaggaaggatcggcattttccctctttgaatccctcacagtaggtaggaggacctaacgcccaggaagccatcagaaattgttacctcctttacatcagcattctctccgagtttatgttttgtaaatataatttctaggcgtaacattttcttagaatgaccccacctttctacctgtatgcatccaatttgcagtgtgttttctgtttcccgtatgttgattcagttggtatttgggattaccccgcatcttgtgtaggccccgtctcccccaccctcccagccaccaaacacaagcccctctgaggccctgccatgggcagatgaggatcttttctcaagccctgaaggacctagaaatagcattagagaaaggacctcagagaatgctctgtccaggaagaattttgaaaaaaaaaaaaaaagtgggtttaagttaaaccatgtgttaatagtcatcattatttctaacaagtttagtttttgtcagtaggagggcttatacatttctgggtgcagtggcgtgtacctgtaatcctagctactcaggaggctgaggtggaaggatcacttaagccaaggagttcaagcacagccttagcaacatggcaagaccctgtcctacagaaaatttaaaaatcagccaggcatggtggcacatgcctgtggtcaaagctaggctgaggtgggaggatggcttgagcccagaaggttgaggctgcagtgagctatgatcccaccactgcactctagcctgggcaacagagtaagaccctgtcaattatctaattagttaacagccgggtgcagtggtgtgcacctgtcatcccagctccttggggaggctgaggcagaaggatcatttgagcccaggagtttgagaccatactggcctggtctcaagaccaggggtcttgacaagaccccatttcaatcaatcaatcaataaaacataaggtaaattaagagaattggttaataggaataaagaatccatgacctaatcagataaaacaattttaactatgataacatcaaatctgaaatcaatgaagtaaattttttgaaagtgggttttgtcctatgtattttgaaaaatttggcaaccctggaaaatactccagttgtttcaaaagaatctgttacctcttaaagaatgagcatctcatcactttacctgtcctgttttgattattctgaattaagaacacccaacgatgccaagcttaacccataaaaataatgtacaagacataggaagatgggaaacccaacagccttaatgcagcttgattaaccatgagacaggcctcccaacaaactagaacttgaacttatctcttggttggcagccaggatcatctaaacatggagcaatgtaaccgcaggtttgggatggatgcgggggcagggtctttttctttttccttttaaaaaatttttttaataaagagggattggctattgtgaatggcagttttagcaagagactaaacaatagacactgaggatctgcaaactgatttcctcacactctccagggattcaagtcccttggaatgttcttctatatccccagggtacctatcccaagtttgatgacttactctcacctagtggttctttttttagagtcggattctcactctgttgcccaggctggagtgcagtggtaagatcttggctcaccgcaacctccgtctcccgggttcaagcgattctcctgcctcagcctcctgagtagctgggactacaagcacgcgccaccaggcctggctaatttttgtatttttagtcgagacagagtttcactatgttggccagactggtctcgaactcctgacctcgtgatccacccacctcagcctcccaaagtgctgggattacaggcgtgagccgccacgtctggcctctcacctagtggttctaagatggctgcattccagtcacctgggggcattcatgaacaacaggaattcccaagtgcagatctcgagagttgtaatttcatgggtgtagggtgcagcctgaaaactgtgtttgaacaatcactccaggtgacccagtcaggcacagacagcactgaggtggcctgcctccttccttgcccaggtgagaaaactacagcccatgggggccagaactctgggggcagagccagatccagagcccagggttcatgacttctggcccactgctctctttcccattccacaccacctccactcctgttgttttataggttcagcctttgaagaggcatttactaccaggacagaaggaagagcaggctagggtgaggaggaaaggagggaggacaaaggaactggctgactttgagctggggagagtagtacttacaagaggtaacagcagacggcggtggcgaccagcatggtgatgatcactctgcagcagaagaggacacgggtcagaacaaatgcagccagcacctcacaaggcctggccaggaccagagcaagaagagctcctggtgtgagctcttttccattggccttcctgatgcctcctggacacaggaggctgagttctactcagggtaagaatagcaaggcagaaaataaaaactgaaagtgtcacctcacagagaggccaaccttgaccacatccaagttgccttaagaatccttcccttcatttcccttctctaccacccaatattgctccatcttaatgcagacgtgttgtggaaaggcactgcacagagctgcatttgtggcaacccaacagggagtggtctgtagaattcaaaattcatggagcaaggggaaggaaaacaataggctagaagacagggcaagaagcaggcagactgtgagccagttctgaggcccagtgagttgttacaaagagaacagggactagccactttgcgtgtactcagagaagaccagagacagatgcttcaagtgcagcaaaagaaatttcagtcaaactgaagcaagaactcaccaagaatagcaggagacgcaagacacgaaaatggtttacaaagtgaagctgtgggatcccaaaccctgcctgtctttaagaacaaaggcagcactcacatgtccaaacggcctttgggcaaagctaactctaatccaaacgaggcccttgatctttgatctaaagcactgcaagctggtgctggacacaggagcacgcgatccctttttcaacattactaagcaggttgtgccagtcctggctgggcactgagtagacaatggtgaactggacaaactccagcccctgggaacatgcagtcaagggaagggtgctttgtaactgaagataatatgaagcagaaactggtgaatggcgcagcaatctgctagaggaccttcgaaaaataacgccagctaaacttatcccatacctacaaagtgtcacgcactggtaggtgttttaaatgcgttaccgcaggtcatcctcacagcagccttttaaggcaggagtcgacattatctccattttacccatgaagaaactgagacttgatattggctctaggtcacacagctagcaaggagtggagaaactgcgtcagtgcccacttgtgccctttactggctgcaggaggggtgacagacatctccaatgtcactctcctctttaccttctggatatgccctctcgccccacctcctgcctgttcccggctgtcagagacccaggtgcagagagacctcagaggtggcgtccggggtcctggcgtccctcctgcggacgctcgctgcagagcaggaagccgccgccccggggcggaggggcgagccgggccagggggccggggtggagaggtctgcagggcctgcgcgctttccttacccgcggttgggtcccttcggcacgaaccagggcccggcgatgccgacgaggccccagaacgtggtgaagatgatgaccgggagggcgaatgagtgcgccgtcatggccgggcgcaggatgcccaggcaggatgcagggccgagcagcgggcgctgcaggtgcgcgggtccccagccgggcagcgcgctgagcatgcgcaacaggagtcgagcacccgaagcgatcagccgggccgggccgcgcacgcgcatctcctgatccagcccgccgcgctgtcactcaggacctgcctaggagcccactcgctgattggctgagcagggccgcggacagagagaaatgccgaggaataggggcgcggccgcccggtttcggcgatgggttatagggtccgcgtcagccccgcgcccgcacagccaacgtcacgccgcattcttatttccaaagacccctggagcttggggtcccaccccagcggtctttcggggcgtcccctgcccttcacgcgccgcgccggctcggcccgaagcgccctgcggacccgcagcctgggccgccccgaacckgacggccccgcgggggtcggacgcgggaggaacggcctcgctttcagagacgcagcgggagggcggtccccgctgtccctctggccgggtcctcagcacgcgttctcctcactcccaggactagcgagcggcgggcgcggaccggggcctggggtcggaggcggcgcagccagaaaggccccagcggcgctgagacgtttgggggaaggcgggggcttcgcgtttcgatggcgggaagcggaatgaggttggaccggccgggccggcgttcagggacccggcgggaggcggagggctggcgtcctcgcggacatccatctgcagcgaaccaggcagaggctttgggattagatccttgactccttgcgtcagtagttaaggtttgtttaaatataaaatgggatggcccttcttacaaggttgctggaggattaaatgaataggcatgtggaaagcacctagtataataaggctcggtagtttcttccatcagggctggaagagaccacggagcctgctttcctccttcggcgtttggatctcacatatcccttcttctctggcgatcaaaaatccctatcttctgtagagawcccttttacagatcagtggcctccaggcggtatctctagcaacaagtgctaccccaagcggccggccacacatattccctggcttcatgacatagggaggcgcagtccccacgtgatgcagaagggaaatgtgcctgtccttgcactgaccccgtcagccatgtgtgctcctggctgttttctgaaatcaagaaccagttacatccgcccttctccgttctctagttgaaacctccctatccatccttccaacattcatgtaagttggaggtgggcgtgggatgacaccaaactgttaggtataaaataccatcctagccttcgaggggtttctaaagtagttgaggagtgatatattctggtaaaatcataatgctggacagcgcagttctaagagccctgtgatcaaagtagccaaatgcccattatgagaattcagagggtggagaaatccaggaagactccctggaggaggtgagattttagctggattgtaaacaatggttatttttctcatccagagtgtgtacattgttgagaacactggcctaggataagggtgcacttggcatccaggagatagagttaagagtatgtccatacaggccttcaaaaaatcaccacgagggctgagcgcagtggctcacacctgtaatcccagcactatgggaggcagaggcgggcggatcacgaggtcaggagatcgagaccatcctggctaacacggtgaaaccccgtctctactaaaaatataaaaaaattagctgggcatggtggcgggcacctgtagtcctagctactttggaggctgaaaggagaatggcgtgaacccgggaggcagagcttgcacttgcagtgagccgagattgtgcccctgcactccagcctgggggatagagtgagactccgtctcaaaaaaaaaaaaaaaaaatcaccacgaaagttctatagctcaaaaaagacggactttttgaattttgttctggaaaaaaaaaatcctctgtagaaaatgacagctgtaaagtgaaatgtatttccttctttgcctctgctcctttgtcttggctttggccagaaccaaaaacattgctgagtctgagcagccactcatattagcagcctgcagctcttactcttttcctttaatgtctttgatgtttcatttctgtcctaatttgcatgtgattgcctatgtcatttgtttggcagctttgtgatggtctgaggtccatgaagggattaaaaccaggaactggctccttctccaaccactaaagcctcatctgggcccacaagccctggctgttccctggagcgtgactggaagatgtgagcagctttgtgctggagccccatttccatgggtaaactgttcacctgatcaaacagctccccagagttccacagtaccacatatttattttctagaactttgtttttagctgaaagggatcttagaggctaaggcaatcctatcactttacaggtgataaaactgaggcccagagaagtgaagtaacttgcctaggcccacacagctcatcagtaaaagagccagaacacatggccgagacttctccctaatccagcgtctcctccacactcccagctcacccctagggtttgtgcccaggctgaggacactattttcagaggcactaatgtgaggcaaagggcatgttaccagacacagccccgcctaccccggtcccctgaggtggagctgtgcattccgctggcttcacggttcccctctgccctggcggcttctggttggtattggcgccaccgactgctctgccatggctcctcagtgagtgctttgggtgtgattgacaagtttccatgacatctcccagggagtggggtcctgatgttggtgacatctctatcgttcatcttttcatggggctgatgaattcctagaaagggtagaaggagaaggagccactgaaagaggctctttaaaacttccctgagtgtcccccagtgcaaatgaacaggagccccaggacacttgaaggccctaggaaatcacacctcagagccacagatgcatcctaatgctctctgcagacggggcacgtgtcggaggtgagaacaacagctccagatgtctctgtctttgcaaataaggcctgtgacatttaatgatgtaaccacctaccttccacccattgttctggtggccatgagtagaaggaattataccaggatgtgataagaaggaattaggagctgggagtcttgctgggtgaggaccttggccccttgcttgcttgccatctaataggggcactcctggcctgtggggtcagggagaactagacccagagcatggttgtctctgtgactagttgagcctgtttctccttcaagggccctggcagtgggaaaacatattatgacaattgcactgttttatcagcccttggcactcctgaagttgccctgaaataaacatccctacctgtatgccaggccctgcctacttctggagctctcttaggtttacaacctacccccgctgtcccaaattgatagggtgagcccagggcattaaatgggtggtgcaagtcaggcttcaggactgacacgggtctatgtgcgctcagtgtgggttgaggggcactgggctgtctttctccctacagtgcatgctgctgccaaaccagagatcacttgtagacttgaaagggaacatgagctttgggtgaaggattcccagcccccaacagaggccaaaaagctaccacccagccaggtaagccttgatggaacatctcttgcacaaagatcaccatgttcattgagcctttagtgcctcctgggctctgatcaacccacgaatcagtatctccgcagcacttcctgtggtttggattcaggttttttacttctgtttcctgcctttatgataggagtttgggtaacctgtgagaaacacagccacagtgtaaacctcttgagacaagctacactgatgggacaatcagggtgagggcaatccggcgccgtggctatgtcagctcatgtgtgctctttcaggaggacatgtctcacagacacagatcttcagctctgacatgctcgatctcacaagcccttttctgaaacctccatcatgtgctttctgattctctacaggcagaaggaacataaagtatgcattttatgatacgactcagcttggagggatgaagtagaaggtcctcactgcacctcatggcaggctgctgacggcagatattttaccgggctcactgaactgggcagtcagggaagggtcggctcctgctctgtccagctgtcttcataagggactctgtgacactttttataaaaatgactttgatttctgcataagaaggcttcccaagcttgctgtctagcagtggctgctacagggaattattcacatggcagcaagagagccctggctccctggaccaggacattccctttgtgtgtgttggaatgagagcaggaggagtgctggtcagaagcccctccccagggctctgggacttcagtgttctcagacaaactgggccgctcctctgagctgggatgctgacccacacttggccccggctctggcatccacaggacgctgccttatccgtcatctcgctggggctgggggctagaggctgagcaggtcacactgaacaaaagaagtgtgtccccatcactaggctaacatctgagtttcttccacagtatttggtaacacagtcagaaacaagactgaagatgattctggaggcaactgggaaccccccagaacgattctgcaggcttctgggaagctgaaaaaccccaaggccagactggcctcagaatgcctgagtccttttgattccactggaaaagccatccatctgtgccaagtgtgtggagagcttcaagagccatacagccctggccaccatgagcacagccacgtgggggagtagtcctgaaagtgtcctggtgtggcaaaggctttccactaagtggacctcagatggcacaggaagaccctcctggggatgtgggaggacactgcctagtgggtgaggggccgctctttcaggtgtgcacactaaatgcagagacagcctctcctggctgccaagaagcctgtgcatgatccaggaccacaaaacacttgcaaactcactgcccagaggccctgtgcctgtctggagtgtgcccagtgtgtctgcgccccacagcttgtcctggcccgccagcagagccgcagcactgcagggcccttctgttgtgagtgccagggcccttgctggctgcctgagcaaggcaaaaggttcaaaacaggaagtctctgggcagctattcccaggtgcagaggggagcagcggccacacaggtgccagtgtggcaggagctgcagtcagaggcagcatctcaagagccctgggagcaggggccagccacgtgaagcccacgagtgtcgctggcacagggaagggacacgaggatcacactgacccaagagaaggcccacagtgaggaggccccaccgaagcatccccagcaacagggactgaggcatctgaggcagccagcccactcggaaaggcctgctgactgcactccagatgtcaagagcacccttgggaaaaagaaaggcaggagtgcagcactttctagagcctcagctcacttctctccttctagctccagccggagtgatggaagaggctgcgctgggagctgcctccctgggagcctaccctgcccagcctgagagtggaggctaccagcatcacgcttcccctagtgaaatccatctgtcctgaagggaaccctgggacggggtcaaggaaaccctgttcacccccaccacggggtcaggtcttcaccaaagggaggccgcacggattcccagtcgcaaacccaaagccttgctgcctttgcctctgtttccatagttgtttcaatgtcttttttaaaaatcacatacactcgagtaagactgagtctcctcaccgaagagatctggctgtatcccgagtctctgaaacctttgctccagtcccgtgggagcgtgccgtcccgaggatgtggagccgcaagggctcgccagagggatctcaggagctaggcctcaaggagcgctgttgagtgacaggtctgatgcagtagcttttactattggtggaaatcgatgttttttccttgaaagtctacctttctaagttcagtaaaccaaattagatcatgtatgtgaaagcactttgtaaactatgcagtactccagaaaaggcagccaagcccttaattataactcaccaaacagccaactctcatctttaccttctaactggcaaaaatgattgagctcactttgaaggactagagaggaaagaaactgaaagacaaaaatcaggtgaatacacaggcacttcccctgcccacctctgttcctggccctgtcccctcgtgagtgagagcagagctcgttctgtcagcttctctgagctcctggtcctcgcttagggacacacaagacagagatgtgttgaaatagactctgctttattcaggtagcaaaaggttaggaatcaaacatggtttttaaaacctcctttcatctttgaaaatagaggagagaacatccctgggccagtcacagttactgtatttggctaagcacacacctgtatgagggacccgcccctccacactgttctgataggtacttagcaccctagaaactcatcctctgcaggagagagaagcaagggtctggagcgcggtcacatactctaaggtatcttccaggacagggggctgggctccctcactcccacctggagtcgctatggctattgggatcaaactaccagttacatactggttacttggaatgtcagacccggtgggtatcagtcatcagggagagggaggggaaatgccaggacacgtacatacggatgctgtcaagactacaggcaaggaggagggtggcgacaagcgctgggactccagccaaagcgggagtgcatgcttcttcccctcccagagccctgtggtttttcttcttgtgaggcataaacaggaagcctctccaacaagggggtctccagcactaggggctgaaactcagccagcctctccaaacaaagcaaaggggccagcctgggccagggcctctgataaggatgctcactgtgtttccacgggggtcctgaatgaggaagttcaggaataagatggcagtcatcttcttccttcttggccattggctgacaaaggggaacggagcaggcctgtgccccttgagaaatcgggtagtgcaaattttatgacaaacagcattctcagtggccccgctgcacagggacccccctttcccaccacctaaggaaggcactggccggtgtcctcggagcacgctgatgctgacgtggagagggcgagttgcttcccctagcttccacctcagctccagaactactcccacagagacccactcacggctgctcacaggatggcctcctgctctgagggattcttcaaggatgaagaggccgcaggaagcatgtgtgctggaacagcaccttgatgtggaatccctgtgggtagggcagaggctatagccccacctaaaaaagcctttctccctccctttccacgagttcacatccacagtgcctgacctgggcaagttcctgaacgcccatggagacggtgatggggagaaggaggcctgtgtgtgccttagccacgcagatagtaacacctcccagagctcccgcaccacaggcctgtggggtccctctgaccgccagacccacagggctgggagacatttccacaggtcaaaggcagaaagcaagaaaggaattcctgactagaactgaaaatgacacgaaagcaacagtgctaaggctaagtactggggtggggatgaaagggcaggtggggtaccagggtacctgcggtaccagggaggggctcggacgccagcatctaccctgggaatgggaagggtactcagacagcagcttctaccctgggaataggaagggtactcaggtgctcagatgccagcatctaccctgggaatgggaagggtactcagacagcagcttctaccctgggaataggaagggtactcaggtgctcagatgccagcatctaccctgggaatgggaagcggcagactatggagaaagggcccacccacaggggcctgcagcacagcacaggacctgcctgagccaggcagcaagcaagctgggatggatggcgcccacttcctgcctgtttaaaacaagtatcaggcagggcagagaaaccctgcctgctg

SEQ ID NO: 96959 - DNA, 14941 bp, Homo sapiens
tttgattattctgaattaagaacacccaacgatgccaagcttaacccataaaaataatgtacaagacataggaagatgggaaacccaacagccttaatgcagcttgattaaccatgagacaggcctcccaacaaactagaacttgaacttatctcttggttggcagccaggatcatctaaacatggagcaatgtaaccgcaggtttgggatggatgcgggggcagggtctttttctttttccttttaaaaaatttttttaataaagagggattggctattgtgaatggcagttttagcaagagactaaacaatagacactgaggatctgcaaactgatttcctcacactctccagggattcaagtcccttggaatgttcttctatatccccagggtacctatcccaagtttgatgacttactctcacctagtggttctttttttagagtcggattctcactctgttgcccaggctggagtgcagtggtaagatcttggctcaccgcaacctccgtctcccgggttcaagcgattctcctgcctcagcctcctgagtagctgggactacaagcacgcgccaccaggcctggctaatttttgtatttttagtcgagacagagtttcactatgttggccagactggtctcgaactcctgacctcgtgatccacccacctcagcctcccaaagtgctgggattacaggcgtgagccgccacgtctggcctctcacctagtggttctaagatggctgcattccagtcacctgggggcattcatgaacaacaggaattcccaagtgcagatctcgagagttgtaatttcatgggtgtagggtgcagcctgaaaactgtgtttgaacaatcactccaggtgacccagtcaggcacagacagcactgaggtggcctgcctccttccttgcccaggtgagaaaactacagcccatgggggccagaactctgggggcagagccagatccagagcccagggttcatgacttctggcccactgctctctttcccattccacaccacctccactcctgttgttttataggttcagcctttgaagaggcatttactaccaggacagaaggaagagcaggctagggtgaggaggaaaggagggaggacaaaggaactggctgactttgagctggggagagtagtacttacaagaggtaacagcagacggcggtggcgaccagcatggtgatgatcactctgcagcagaagaggacacgggtcagaacaaatgcagccagcacctcacaaggcctggccaggaccagagcaagaagagctcctggtgtgagctcttttccattggccttcctgatgcctcctggacacaggaggctgagttctactcagggtaagaatagcaaggcagaaaataaaaactgaaagtgtcacctcacagagaggccaaccttgaccacatccaagttgccttaagaatccttcccttcatttcccttctctaccacccaatattgctccatcttaatgcagacgtgttgtggaaaggcactgcacagagctgcatttgtggcaacccaacagggagtggtctgtagaattcaaaattcatggagcaaggggaaggaaaacaataggctagaagacagggcaagaagcaggcagactgtgagccagttctgaggcccagtgagttgttacaaagagaacagggactagccactttgcgtgtactcagagaagaccagagacagatgcttcaagtgcagcaaaagaaatttcagtcaaactgaagcaagaactcaccaagaatagcaggagacgcaagacacgaaaatggtttacaaagtgaagctgtgggatcccaaaccctgcctgtctttaagaacaaaggcagcactcacatgtccaaacggcctttgggcaaagctaactctaatccaaacgaggcccttgatctttgatctaaagcactgcaagctggtgctggacacaggagcacgcgatccctttttcaacattactaagcaggttgtgccagtcctggctgggcactgagtagacaatggtgaactggacaaactccagcccctgggaacatgcagtcaagggaagggtgctttgtaactgaagataatatgaagcagaaactggtgaatggcgcagcaatctgctagaggaccttcgaaaaataacgccagctaaacttatcccatacctacaaagtgtcacgcactggtaggtgttttaaatgcgttaccgcaggtcatcctcacagcagccttttaaggcaggagtcgacattatctccattttacccatgaagaaactgagacttgatattggctctaggtcacacagctagcaaggagtggagaaactgcgtcagtgcccacttgtgccctttactggctgcaggaggggtgacagacatctccaatgtcactctcctctttaccttctggatatgccctctcgccccacctcctgcctgttcccggctgtcagagacccaggtgcagagagacctcagaggtggcgtccggggtcctggcgtccctcctgcggacgctcgctgcagagcaggaagccgccgccccggggcggaggggcgagccgggccagggggccggggtggagaggtctgcagggcctgcgcgctttccttacccgcggttgggtcccttcggcacgaaccagggcccggcgatgccgacgaggccccagaacgtggtgaagatgatgaccgggagggcgaatgagtgcgccgtcatggccgggcgcaggatgcccaggcaggatgcagggccgagcagcgggcgctgcaggtgcgcgggtccccagccgggcagcgcgctgagcatgcgcaacaggagtcgagcacccgaagcgatcagccgggccgggccgcgcacgcgcatctcctgatccagcccgccgcgctgtcactcaggacctgcctaggagcccactcgctgattggctgagcagggccgcggacagagagaaatgccgaggaataggggcgcggccgcccggtttcggcgatgggttatagggtccgcgtcagccccgcgcccgcacagccaacgtcacgccgcattcttatttccaaagacccctggagcttggggtcccaccccagcggtctttcggggcgtcccctgcccttcacgcgccgcgccggctcggcccgaagcgccctgcggacccgcagcctgggccgccccgaaccggacggccccgcgggggtcggacgcgggaggaacggcctcgctttcagagacgcagcgggagggcggtccccgctgtccctctggccgggtcctcagcacgcgttctcctcactcccaggactagcgagcggcgggcgcggaccggggcctggggtcggaggcggcgcagccagaaaggccccagcggcgctgagacgtttgggggaaggcgggggcttcgcgtttcgatggcgggaagcggaatgaggttggaccggccgggccggcgttcagggacccggcgggaggcggagggctggcgtcctcgcggacatccatctgcagcgaaccaggcagaggctttgggattagatccttgactccttgcgtcagtagttaaggtttgtttaaatataaaatgggatggcccttcttacaaggttgctggaggattaaatgaataggcatgtggaaagcacctagtataataaggctcggtagtttcttccatcagggctggaagagaccacggagcctgctttcctccttcggcgtttggatctcacatatcccttcttctctggcgatcaaaaatccctatcttctgtagagatcccttttacagatcagtggcctccaggcggtatctctagcaacaagtgctaccccaagcggccggccacacatattccctggcttcatgacatagggaggcgcagtccccacgtgatgcagaagggaaatgtgcctgtccttgcactgaccccgtcagccatgtgtgctcctggctgttttctgaaatcaagaaccagttacatccgcccttctccgttctctagttgaaacctccctatccatccttccaacattcatgtaagttggaggtgggcgtgggatgacaccaaactgttaggtataaaataccatcctagccttcgaggggtttctaaagtagttgaggagtgatatattctggtaaaatcataatgctggacagcgcagttctaagagccctgtgatcaaagtagccaaatgcccattatgagaattcagagggtggagaaatccaggaagactccctggaggaggtgagattttagctggattgtaaacaatggttatttttctcatccagagtgtgtacattgttgagaacactggcctaggataagggtgcacttggcatccaggagatagagttaagagtatgtccatacaggccttcaaaaaatcaccacgagggctgagcgcagtggctcacacctgtaatcccagcactatgggaggcagaggcgggcggatcacgaggtcaggagatcgagaccatcctggctaacacggtgaaaccccgtctctactaaaaatataaaaaaattagctgggcatggtggcgggcacctgtagtcctagctactttggaggctgaaaggagaatggcgtgaacccgggaggcagagcttgcacttgcagtgagccgagattgtgcccctgcactccagcctgggggatagagtgagactccgtctcaaaaaaaaaaaaaaaaaatcaccacgaaagttctatagctcaaaaaagacggactttttgaattttgttctggaaaaaaaaaatcctctgtagaaaatgacagctgtaaagtgaaatgtatttccttctttgcctctgctcctttgtcttggctttggccagaaccaaaaacattgctgagtctgagcagccactcatattagcagcctgcagctcttactcttttcctttaatgtctttgatgtttcatttctgtcctaatttgcatgtgattgcctatgtcatttgtttggcagctttgtgatggtctgaggtccatgaagggattaaaaccaggaactggctccttctccaaccactaaagcctcatctgggcccacaagccctggctgttccctggagcgtgactggaagatgtgagcagctttgtgctggagccccatttccatgggtaaactgttcacctgatcaaacagctccccagagttccacagtaccacatatttattttctagaactttgtttttagctgaaagggatcttagaggctaaggcaatcctatcactttacaggtgataaaactgaggcccagagaagtgaagtaacttgcctaggcccacacagctcatcagtaaaagagccagaacacatggccgagacttctccctaatccagcgtctcctccacactcccagctcacccctagggtttgtgcccaggctgaggacactattttcagaggcactaatgtgaggcaaagggcatgttaccagacacagccccgcctaccccggtcccctgaggtggagctgtgcattccgctggcttcacggttcccctctgccctggcggcttctggttggtattggcgccaccgactgctctgccatggctcctcagtgagtgctttgggtgtgattgacaagtttccatgacatctcccagggagtggggtcctgatgttggtgacatctctatcgttcatcttttcatggggctgatgaattcctagaaagggtagaaggagaaggagccactgaaagaggctctttaaaacttccctgagtgtcccccagtgcaaatgaacaggagccccaggacacttgaaggccctaggaaatcacacctcagagccacagatgcatcctaatgctctctgcagacggggcacgtgtcggaggtgagaacaacagctccagatgtctctgtctttgcaaataaggcctgtgacatttaatgatgtaaccacctaccttccacccattgttctggtggccatgagtagaaggaattataccagsatgtgataagaaggaattaggagctgggagtcttgctgggtgaggaccttggccccttgcttgcttgccatctaataggggcactcctggcctgtggggtcagggagaactagacccagagcakggttgtctctgtgactagttgagcctgtttctccttcaagggccctggcagtgggaaaacatattatgacaattgcactgttttatcagcccttggcactcctgaagttgccctgaaataaacatccctacctgtatgccaggccctgcctacttctggagctctcttaggtttacaacctacccccgctgtcccaaattgatagggtgagcccagggcattaaatgggtggtgcaagtcaggcttcaggactgacacgggtctatgtgcgctcagtgtgggttgaggggcactgggctgtctttctccctacagtgcatgctgctgccaaaccagagatcacttgtagacttgaaagggaacatgagctttgggtgaaggattcccagcccccaacagaggccaaaaagctaccacccagccaggtaagccttgatggaacatctcttgcacaaagatcaccatgttcattgagcctttagtgcctcctgggctctgatcaacccacgaatcagtatctccrcagcacttcctgtggtttggattcaggttttttacttctgtttcctgcctttatgataggagtttgggtaacctgtgagaaacacagccacagtgtaaacctcttgagacaagctacactgatgggacaatcagrgtgagggcaatccggcgccgtggctatgtcagctcatgtgtgctctttcaggaggacatgtctcacagacacagatcttcagctctgacatgctcgatctcacaagcccttttctgaaacctccatcatgtgctttctgattctctacaggcagaaggaacataaagtatgcattttatgatacgactcagcttggagggatgaagtagaaggtcctcactgcacctcatggcaggctgctgacggcagatattttaccgggctcactgaactgggcagtcagggaagggtcggctcctgctctgtccagctgtcttcataagggactctgtgacactttttataaaaatgactttgatttctgcataagaaggcttcccaagcttgctgtctagcagtggctgctacagggaattattcacatggcagcaagagagccctggctccctggaccaggacattccctttgtgtgtgttggaatgagagcaggaggagtgctggtcagaagcccctccccagggctctgggacttcagtgttctcagacaaactgggccgctcctctgagctgggatgctgacccacacttggccccggctctggcatccacaggacgctgccttatccgtcatctcgctggggctgggggctagaggctgagcaggtcacactgaacaaaagaagtgtgtccccatcactaggctaacatctgagtttcttccacagtatttggtaacacagtcagaaacaagactgaagatgattctggaggcaactgggaaccccccagaacgattctgcaggcttctgggaagctgaaaaaccccaaggccagactggcctcagaatgcctgagtccttttgattccactggaaaagccatccatctgtgccaagtgtgtggagagcttcaagagccatacagccctggccaccatgagcacagccacgtgggggagtagtcctgaaagtgtcctggtgtggcaaaggctttccactaagtggacctcagatggcacaggaagaccctcctggggatgtgggaggacactgcctagtgggtgaggggccgctctttcaggtgtgcacactaaatgcagagacagcctctcctggctgccaagaagcctgtgcatgatccaggaccacaaaacacttgcaaactcactgcccagaggccctgtgcctgtctggagtgtgcccagtgtgtctkcgccccacagcttgtcctggcccgccagcagagccgcagcactgcagggcccttctgttgtgagtgccagggcccttgctggctgcctgagcaaggcaaaaggttcaaaacaggaagtctctgggcagctattcccaggtgcagaggggagcagcggccacacaggtgccagtgtggcaggagctgcagtcagaggcagcatctcaagagccctgggagcaggggccagccacgtgaagcccacgagtgtcgctggcacagggaagggacacgaggatcacactgacccaagagaaggcccacagtgaggaggccccaccgaagcatccccagcaacaggsactgaggcatctgaggcagccagcccactcggaaaggcctgctgactgcactccrgatgtcaagagcacccttgggaaaaagaaaggcaggagtgcagcactttctagagcctcagctcacttctctccttctagctccagccggagtgatggaagaggctgcgctgggagctgcctccctgggagcctaccctgcccagcctgagagtggaggctaccagcatcacgcttcccctagtgaaatccatctgtcctgaagggaaccctgggacggggtcaaggaaaccctgttcacccccaccacggggtcaggtcttcaccaaagggaggccgcacggattcccagtcgcaaacccaaagccttgctgcctttgcctctgyttccatagttgtttcaatgtcttttttaaaaatcacatacactcgagtaagactgagtctcctcaccgaagagatctggctgtatcccgagtctctgaaacctttgctccagtccygtgggagcgtgccgtcccgaggatgtggagccgmaagggctcgccagagggatctcaggagctaggcctcaaggagcgctgttgagtgacaggtctgatgcagtagcttttactattggtggaaatcgatgttttttccttgaaagtctacctttctaagttcagtaaaccaaattagatcatgtatgtgaaagcactttgtaaactatgcagtactccagaaaaggcagccaagcccttaattataactcaccaaacagccaactctcatctttaccttctaactggcaaaaatgattgagctcactttgaaggactagagaggaaagaaactgaaagacaaaaatcaggtgaatacacaggcacttcccctgcccacctctgttcctggccctgtcccctcgtgagtgagagcagagctcgttctgtcagcttctctgagctcctggtcctcgcttagggacacacaagacagagatgtgttgaaatagactctgctttattcaggtagcaaaaggttaggaatcaaacatggtttttaaaacctcctttcatctttgaaaatagaggagagaacatccctgggccagtcacagttactgtatttggctaagcacacacctgtatgagggacccgcccctccacactgttctgataggtacttagcaccctagaaactcatcctctgcaggagagagaagcaagggtctggagcgcggtcacatactctaaggtatcttccaggacagggggctgggctccctcactcccacctggagtcgctatggctattgggatcaaactaccagttacatactggttacttggaatgtcagacccggtgggtatcagtcatcagggagagggaggggaaatgccaggacacgtacatacggatgctgtcaagactacaggcaaggaggagggtggcgacaagcgctgggactccagccaaagcgggagtgcatgcttcttcccctcccagagccctgtggtttttcttcttgtgaggcataaacaggaagcctctccaacaagggggtctccagcactaggggctgaaactcagccagcctctccaaacaaagcaaaggggccagcctgggccagggcctctgataaggatgctcactgtgtttccacgggggtcctgaatgaggaagttcaggaataagatggcagtcatcttcttccttcttggccattggctgacaaaggggaacggagcaggcctgtgccccttgagaaatcgggtagtgcaaattttatgacaaacagcattctcagtggccccgctgcacagggacccccctttcccaccacctaaggaaggcactggccggtgtcctcggagcacgctgatgctgacgtggagagggcgagttgcttcccctagcttccacctcagctccagaactactcccacagagacccactcacggctgctcacaggatggcctcctgctctgagggattcttcaaggatgaagaggccgcaggaagcatgtgtgctggaacagcaccttgatgtggaatccctgtgggtagggcagaggctatagccccacctaaaaaagcctttctccctccctttccacgagttcacatccacagtgcctgacctgggcaagttcctgaacgcccatggagacggtgatggggagaaggaggcctgtgtgtgccttagccacgcagatagtaacacctcccagagctcccgcaccacaggcctgtggggtccctctgaccgccagacccacagggctgggagacatttccacaggtcaaaggcagaaagcaagaaaggaattcctgactagaactgaaaatgacacgaaagcaacagtgctaaggctaagtactggggtggggatgaaagggcaggtggggtaccagggtacctgcggtaccagggaggggctcggacgccagcatctaccctgggaatgggaagggtactcagacagcagcttctaccctgggaataggaagggtactcaggtgctcagatgccagcatctaccctgggaatgggaagggtactcagacagcagcttctaccctgggaataggaagggtactcaggtgctcagatgccagcatctaccctgggaatgggaagcggcagactatggagaaagggcccacccacaggggcctgcagcacagcacaggacctgcctgagccaggcagcaagcaagctgggatggatggcgcccacttcctgcctgtttaaaacaagtatcaggcagggcagagaaaccctgcctgctgacttgcctcatttcctgcccatggttaaggaaggcagaacctagacaaaatcatcctcctcctgataagcggcctcctgagcctgccaagacggagctgcccttggaaggaaaagtgcttcactttaggtggaaggaagatcggggcgaggagggtgtgaacctagcagtgccagaagcccctctgtgcctctagggcggtggttctgtggttctgaagctagagcaggcccaaagtccctggaggaggttgttcaaagcccttgtcactgagcgcccattcggggatgtctcagtgggccctggagatcctggtgcagagtccccagggcagctcagagaagagtggactagcctgtcgtgcagatggtgcattcagagagcaactcctacaacaaggactttggagacaaattcctacctgtcccactaaggacgaggatggggcagatggcagctaagtccacactgcagccagaggtctttcagggagctcgaggctctcattcactaatcctagggcagatggggagtcagcaggcacttggatctctgctgccacttcatggagagggaaactgaggcacaaagaggaagggattaatcagaccactgcctgcagcagagctggggctgcatcccaagcctcccaactccaacttcgtcccatcctctcctgggtaaaccgggccgggcatgccacgggttaaacgcggctcggctctccgggaagcaccagaccccctgccagaagagcccagctccaccatctggagctgcaggaagagaactttcttgggtgctctgtgcaaagggcttgtgattgtttcgccctaaaggaagccctgggaagaggtagagttccgcacgagaccacggcctcactgcttctgctgtgggagccagggtaggaagtcccagaacaatgcctctgggggctcttgcagccaggccagctgtccctagagcaggggcaacctccccctctaacaaggtggtctttcccattcccacttagactgtgggcagcctccctggaacattccccagggatgtccaacagtctcccctaccaggacactcctcttgccaccaaaactcaggggctgaaacctttcatgatggggttattttctgcagcaccttaaaaatgaacttgagatatagaaccttctggcacatttgtgtgctgtgaggcatggctgtgctgagtggggcctcaggaaacaggtcatgcacctcctgatacccctgctgctctgggatgccactgcccacttcctggtgcttagagaccatcgccaccagcagaagatcctagggcagcctagaatctgcagagcctgtcccagtgatcacagaggcgtctccaaggcagtcccaaggactccctgtccctcaggacatcccgggggcctcctggctggtgtggggatacaggagtctctcgggaggctccatgatgcagtccttcagaacctccgctgcttccctggagggcaggatgggtggcttctgggtcctgggctcctccacatagagggctcccatctcctccttcctgagcctggcgcctgtgagggaggaaggagaatacaattagactgactgacagtgaccgccttccacatccagcttcgcccaggggctgtttggtgaggaaagcttggcagaacagactgaagtcaggaccacgactgctctttgcagccctcatctgttgctactctgttcattcttttatcctgagataggggatctcaactgggggcgattttgtcccccaggggccatttgccaatgtctggagatgatttttgtggtcacaaatggggtgtgtgctactggtatccagtggttatctaataggtagaggccatggatgctgctcaagttcccacagtgaacaggaagggcccccaacagagattacccagccccagcatcaacaatgccaaggctgagagccctgcctggaaggaggcagcggtgcgtagtttggcagtgtttggaccaatctgtgctggtcctgttgtccctgtggaaagagtaactcgcatcagggcacacctgacatcatttttttctccttagcacccacagggctggacacagagcaactcacccagccctctctcggctttccctttctcttatcagtgaggggtctcttttcttatccccacctgccctactgtggcttcagggccaccttgcttcctacagagcctctgtcagccatgagatccagtcccatttctggtgaccacagactcagaggtgaaaactgggagcagcaacagccggaaggaggccagctagagacgcgaggagagagagcactgggagcagcaacagccggaaggaggccagctagagacgcgaggagagagagcactgctccatccttgtcaagtggtcgcgagtggtctggagaaccccaacaatgggcatattttctttggttttcagtgactacttgaagagaaaaatttcctgtctgtggctttcagtaacttgccctcccttctaatacagcttccccctcaagcaagttcttgaccccagccctccggtccagagaggctgtttctgttctcccctgccccgtgagatttctgcctgaaagccccaccatctcctccgcatctcacctcctccacagccacatggacctcttccctcttgaaaattcctgcacggtccagagtctatacagccccacttagaatgtgatggcgctgcctggggctggtcagccctctccttactcccagcagtggtcttgacctttaactagtaccatttgcaccacctgccaggcattgtcctgagtgttttccacacacaactcattcggcagatgagaaaccaaggcatcaaaggacagacttgcccaaggccacacagccagttgggggcagagccagcacagcactgtcaccagggcagacaggctctagaaatgcacgctctctgcactaagccctgctgcctagagcacatgtgcgtcatctccctggcaggggtgcaagctcctggagggtggatgtcacgcatcgagtacccactggcctagcaaatgggtgggtgcatgacagaagctccacaggcacctgcagtcctgtcttattggcctctggctcagcatgaggctgccttgggggagctctgccacgtgtacttacttgcaggggagcgggctggcacctgggcacaggtgtagacatggctgaaacgccggcctgaggaggtcaggtaccagtgctggatggcgggctgggggtcgtactccgtgacggccacgccgttcacagctgtcatcatgagcatgttgagcacctcgttggagagcttggtcctctcatcggtcctgattcggttcatggccttgaacccccgctcacagcaagaggtggagatgggcacacagaccaccacggccatgagcttgcttagcagggggaagcggcagtgctgggccagggcgtttttgcagagcatggagaacgggaggtgctgggcaatggttttcaggcccagccactcctccagcagagcttcctcactgtatcctgttgggagggagcactcgaaatacctggccaggttgagaatgtcatcattcccaaaactggcaagttcaatcccacttggccaggccatggtgtcaaacacctccatgttcttcagctgtgggggtcggtctgcgtcaaacctctgctggaggtactcaatccccgtcaggactgtcctctccctatccgcctggaaccgctgttccgctacctccagtttgtccaagcag

SEQ ID NO: 96960 - DNA, 31683 bp, Homo sapiens
gaggggaaggggtgggccctgaaaagaaggggataccattttctttaaagaggaatgttggaagaaaggaaggaatttaggaagaaagagataatgacatatgcatgcagatatatctaaattttcaaagaaattcttacctaatagggccagttttctttttcagcaaggttatctgctgagaggtgggaatgctggtgttggcttgggtgggagtaaggacttgaaaatgtaaaggaagcttgaaataactgttaagaggaaagaggaagacagtggaactgaaataagctccaagagtgttgagtaccctctgaactgaaatcctacactataagcctccccttcatctttctcataataataatggctgacatttattgagtgctttatacaaggcactgttctaagtgcttttcaggcattctcatgtgatttttacaacaatcctgttagaaagttattgttattatccctttcttccagaagaggaaattgaggcatagaggattagtagcgcttgtatttgatgaatctcttacgtctgcagaaatggattccttttcctgaggcatcagagaagacagaaatttaatcccaactcccggtttctgaaccttgagagcctagagtctagggttgctaaggagggaatcttaccatgccagtttgtgggcatgatggtggcatggagggggcaggacagtgggatcactgttgctgtcagcttttgacaactacatagggaaactcggatattcttgagtgatttttccagcatcctgactagaaagacaagtgaccgatagtgatttgtcaggtattgtgggctgagattgtgtcatctgagaggtgaataagaagagagaccttgtccctgttcctatcacctagaaaaggagaattttttcttggcagagagacaggcagatctaaaaccttatataataacataatgattattaactcaccttatgtgttttctcagtttgtgtgacagatacaatttgtaggtaagctgtatacctgacttgagtgaaaggagagagtgatgggatggcgtggatggaagagaaacggacttaccttttcctgctgcagccactgaagcatcatctctgtgtccttccttttgaggttgccatggatacgcctttgcatggtggtttgaggagattgatttccattatgatcagatgatgacgtgggtttaaaaagagaaaggatggaatgctctgcttttggggagtggccggcgagctgcccaaaaggcagagcccagtacagccgatagggctgtggctttgttggctgctttggcttttgctgaagttgtgaaatggtgcatctctctctttagagcgcaggctcagggttccctgtctacagggtcctagtgccaggaacttgctggttgattcagggggaggaatcagcaggaacttcgaacagcctaagtaggacttctgataccactgagaggattgaggttcttgagtgcagggctgagtgcctcttgccttcttgcagaagttcctatattgaagataagtgaagcatatagcatagcttttcttcttgacttttagaggtctgggcccttggaggtgggcctggaagtcactggatatttctggggaaaggggacattttgagatggagtagagctgcattcagagtgggagtgggtttgtagacgtttttttagggtaatgaggagctggagaagggaaggaagtccgttgagtgtgtaggccttatctatgaaatccgcaaggcagatactgagtaggacctaggaacaaaaagctctgtgtacgttgtcttctggggtcctgtgaatatctggaatccagctttccaagcttccagtctcccagcctccatttaccactcagtaagcagaccttttcctttctgactcctgaaggacttaggtccacgtttatctcttccttactagtgctttcagagatgtatagttttgccttgctgtcagactgcctgggtttcagacaagctcctctaggagtgggaaagcagggaaagcagacagttgggttagcccaggatcaaggtttgataaggtgagacaagaggagatcaaggtatcaaaggatgctggggtgccagtaaaaacaaggtagaaatggttcagacaggggagaaatggtagaggtggaaaagaggcttttcctcctcactttctcctttttcattctccaaaatcttattttcctataatttcctgaaatttctctaagactattggcagacacagagattattatttatcagacacagagatttttcccctcctctcttctcatttttctagatattttagtggtatttaatatcattggagaggaaaatggattagaaatccaagaggtgtctgtctcctccctggctggggtaacattaacccaggattgtcctatgggatatgggcctgggcccggtaatgctgtggaaggagcacctacctgtagagatattcagatgtgcccctctgccattttttggctatgagacttgggcaagtcatttgacttctgagacatagttctgtcatctgtggaatggagagaatggaatctgttttggctacatcacaggttcatttttgaaggagatagtgaagtacatgtattcgtgtatgcaattaagttttccccagagaaggccctaagaacaggacgcattttctctctcctaacatgttgtttctcctcccatttttttcagttctgttaatgtttcaattattacatttctcatgcttgaaaactcctgagtgtatttattcatttacttattcatgcattcattgacccatctatttatccttgcagcatttgagttcctactgtgcgcaagtcatcgtggatattcccttaaaataatgaatgaagatgatatctaccatttgttgagcacacagacattgtgctaaacgctttacttaaatcttatttaatcttcaaaatgtccctgtgaggtaacattatttcttcctttttgcagttgaggtaaccgggactcaggaagttaaatatcttgctcagaggagaaccaaaggtatattcaggtctgtctccagagcccatgtaggcctgctgcctctttcctcatgtttgatctattacaaggccttctcagggcttttttggtactgtctctgaactggcctctttcttctcctcctgatcctggttcaaaccttccttaccctgtgtcaaatgttgcagcagcctccttgctgttattcctgtctttgccaggttgctcctgcctgcactccatcctgcaggtgtcatcagtttgatcttcctaaaatagttttcactatgcagtctcctgctcaggaacaagactgccttcctgttattattggatcaagtccttctctgtctgcctgatgttaaactccgtgcctacccacagttacctcccagtatgttgcaatgttattcaataaatgtttattcaataaatatttgaccatgagctacttactggctattggatcataaagaggaaaaggtgtgggctatgcttcaaaaggcttatagtttgatagaataaccatctacaattcgttacttcagctaagctagggttctttactattcgctagtcaagcaaagttatttctgcctctgttcatactgtgttcacaagttacagggctttgtaggcctttccacatattttttatttttattttatttatttatttttttttttttgagacggagtctcgctctgtcgcccaggcgggactgcggactgcagtggcgcaatctcggctcactgcaagctccgcttcccgggttcacgccattctcctgcctcagcctcccgagtagctgggactacaggcgcccgccaccgcgcccggctaatttttttttgtatttttagtagagacagggtttcaccttgttagccaggatggtctcgatctcctgacctcatgatccacccgcctcggcctcccaaagtgctgggattacaggcgtgagccaccgcgcccggcctccacatattttttaaaattcccataattcaaggcatgcttaggtactccctttctttctagctcacctctctcctgtctataatttcttatatttattgtgtagatgtatataccatttagtatcatgtcaggtaattctttgcagttctataatttctgtactttttacaaggtgcttttttttttttttttttgagtctcagtctgtcgccctggctggagtgcagtggtgcgaccttggctcactgcaaccttcacctcccggcttcaagcgattctcatgcctatagtctctcaagtagctaggattataggtatgcgccaccacacccagctcatttttgtatttttagtagagatagggtttcaccatgtcagccaggctggtcttgaactcctggtctcaagtgagccaccggcctcagcctctcaaagtgttgggattacaggcatgagccaccacacctggcctacaaggtacctgtatatgctttagcttttttgaacctcatgatactgacgtagatatggcagatattattttcatttcataggaaaataaacagattccaagaaattaggggactattgatacctatgtggttagtgagttgtgaggctatttttagatctgagctcttttgaattttttaaggcagtgtggcctacaggaagagcagggccttggaagcctagatatgtctgtggtaatggtgaggggtagtagaaagcacagagggctctgggtcaggttgtttccagttttggctctactcctcacagtctgtgtgtcttcagggaagttgctcagttctcaaagactcagttgccttgtcagcatcatccctggccaacctctcaatggggttattgtaatgtctatatatgatgacattgttcttagctaacttttatttagcacttattaaataccaggcggtgtcctggatgctttgtttggattatctcagctaatcctcacgatacctctctgagatatgttctttgttacttccctatgacggatgaggaaattgaggcatagagatgttaagtaactagaccaagtttatgtagctaccaagtgataaagccaggaaagtagcctgagtctagaaccagtactcaaccatggttctataaaatgtctttttttaaggtgtcctatagactgtaaagtgctccgaacatgtgaggtccaggctgcaaggatgtgcctggccctgcccacctgtgtaatggcgaatagggaaaggagggggcgacatggagattttgcagggaggagagagattatttcctagggggtctggccaggactgaagatttggaattgtgttttggggccatatttctgaatgttggctgtcattctcctgttgggctacctggcctatcttaagagggtagagcggggtaaagtcactgttctgccagtgaagtaagcccagtgcagaaaagacaggcgtccctaggcccaagggaactagatccataccatactcagtggagccataggtcagaccccaggccaaccttgttggctgtgtaggggcagggaccctggtcttttggtttctagcccatgatagatgggccagtgaatgaaagcagtgtggtaacatagtcccttggagacctctcattagaatgcataatctcattaaattaaacaattctaattataaaagtaatacatggttactgaagaatttttgtgaaatacaaaagcgtagaaaataaaccatttcattgggtctgagatgctaggaggcaaggccaagagtacaaggggcagatgactgaggtggactgggccttgtgctacaagaagaaagaagggctctctgcttttgactactgcctttagtaatccagttgagtctgatactcttgtgttttacaacctggccccttataacaaccataaagggtgaagggtgactatggcaacctttgccagccttgtgggagggggctagggtacttggcttgctttgctatgtgtgtgaagttgccttcattactgcccttctcttgctgcctcctgggcagggcctgcctcctctggctcagtgtgagattgaaatccaggccctactcacatgaatttggaccctgagtccagagtttagagaggggagggagagagaagagcaccagaaaggtagatgagagacccttattttggctgtgtggaggctctaggcagctgatcgctttgaagtgtcacttgatgcttatgggcctgctgaggccttacatcctgggggagaggggaacagtgatggtgagtgggtacagactaggaggacgtgtcaagactgcttccagccctaggacagtgtattcaagagttgagtgctgagggtctgtggcgtatgcccagcccttagttyctggcccacgtgaagcaggggggcactaggacccagaggctagcacggttcctgacaagtctagagcagcactagcgcagagtgagactcatcagctggcaagcaggattctgtgtctctgggttcaggaatcctcaggcagcagaggggacttgctcctcagcccccatcactgcccccacccctacccgtgtaggccaccgagtgaggcccatggactggggagggctgtgcctgacgactcctgtgtccctctatgagggcccagcgccctgaccctcctgcctaggtttctaccttttctctctgtctttggccagctgggggagggggtagaggccgggtgagcaacatggcacagagcaagaggcacgtgtacagccgggtaagtggccctaatctgggatggccctggagggctgctggggaaggcctggctgcctgtggacatcattgctgtgggggctggggagataggctggagctcagctgagggcactcagactgtgttttctaaggagccctcgaagccctggtggtgtaaggctggacaggcttccctttacagagttgatccctaaatggggactagcaaggcctgacctctgactctaattggccctcataccaggggctcctgagggggtccagactatcctggggactcagaatggggatgatggctcagagaggtcttacagtgaagcctttcttaagagctgctttgttrtttgttacttgctttctttctcttctgagatagaatctgtagctactgttgtggccccctggttctgagaggcttattggggttggaaagtgggggagtctctgactttgggttcagccttttatatcactggcaattccttttattgtcaggtccatgagagccatcctgctgttccaggtgtgatttggggtcctggagcctctgggaactacatcctcaccttcctggatgagctgtttggggaagggaattaggcagtgataggctgggaggtgtcctggctcttccctggctctgccagggctcccttctgaagctattataaatgagagtatcagaagggtctcccatagagtctttaggatgatggtatcacttcatcatgcctcattcatctgtttgctgcaaggcccctggttcatggagttgctgttgctaaaaatgacctaagtgtgattttcttctaaaccatgggcctatttgggacctaattttctattgtgttcagtcatcatgggtgtgccgaagctaagagctgcccaaggacagtgtcttagtctgttgttttgccttgcccatctgtggagtgataaaccattcatttggaccactgagcagagtcttggggacagagcgaggggtagatccacccaatttacttggcctgtgttttcctttttatagcaacatagcatggagaagaatctccagagcttggggatagagagttgaccaaacaagactcaggccaggtagaaggggagttgaatggttgaatgggctgtggtgaagcatctggggtttcatggtgggtttgtggatgggggtgggaggagtcagatcaggaaggagaggtggtgacttaagggtctggaaggaggcacaattgtgtgcctctgaaagggtgaggcctaagaaaaccatttgaaacacagaggagacaagtgacagtggaaggggaaacaggattctgtaggatcacccactgaattgcctgtcttcccagctcagactcctgagtcagggcattgggttgtggggagcctggtctaaactgagttatttgcttgatcttatttcccctcctgagaagagaattaaggagacagtgctcctgagaaagcagccatgtggtgacattcacagactggtcaatgaattctgatttgttataaaaaatataaacttaaaaattctagcagattccagaggaatttggagaaatcttagaatatcattggcattttttcaaaggggaatttgggggtccacccaattctgtaaatggggtttaagaaaatgactctggttgtttttcagtccagcatcttggctgaggcatttcttatacataagaatgccacctttgatctgaggcctctaactgtctgtgtttacctktgtctttcagacgcccagcggcagcaggatgagtgcggaggcaagcgcccggcctctgcgggtgggctcccgtgtagaggtgattggaaaaggccaccgaggcactgtggcctatgttggagccacactgtttgccactggcaaatgggtaggcgtgattctggatgaagcaaagggcaaaaatgatggaactgttcaaggcaggaagtacttcacttgtgatgaagggcatggcatctttgtgcgccagtcccaggtattcacgcccttmttttgtgtctgtgcatgtgtgcacatgtctgtcgcatgtgcagctgatgtgttggtacttcgttttcctgagcatgggcataagcctctrgttgggagagtggaaggtagtgggggagggaagattgaagatgcatccttagggaagctgccctgtactcttggtttgcttggagcctggggaggggcccatattacagccgtccttgatctggctrtattgaaactattgatctggctatattgaatctggcctcagatccaggtatttgaagatggagcagatactacttccccagagacacctgattcttctgcttcaaaagtcctcaaaagaggtaacaaccacccacttaaagttgcctccccatagccaggaggagtccccaggacttctcctcataacatggggccacagtagatcctaagatttttttccgtcactaccatattcccttattatatctccccctacctctctatacaagtacacactttgtttctgtttgctttctacagagggaactgatacaactgcaaagactagcaaactggtgagtgatttgggggtgggaatggggaataataaagggaggggaaggagaaagaggagggatacccagtgctaggcaggtagaagtagtaggtgagtctgatttgccttctagtctctccaacttccctaagaaggaggctttctggggattaattgctgtgttagagttacagtaaagatggtagaagggaaaaactcataggctccagaagttcagggtcaaatgagattgagctgagggtgataggaaggacaggtctggccctagtagtgtagccaacttcctaccttttggtacccaaagatgccaacatctaaagggtctgagggtaaggttaaggtagaagatagaggaagaagcaatctcctattcacaagtgaatggcaaggagccgggccctctgcctcctgttttaagctggatgcagagagtgcttcctagttcttctctgctactctgtgcaggatgtgtgtgaggtggggctgcagactctgcagcttctctgggccaaggtgtgaacatcctggaagctgatctttgaggggctactcatctcaccctgactcccccctacccgcgtctaacctgtgtaagcccgagttggtcttaacacctatgcccaggacatctgttctctaactctgccctttcctactcctcatgcagcgsggactgaagcctaagaaggtggtgtgtttactatttgtgcctgggtggatgggggccatgagccccttccccagctgtcctgcatgtccctgggctgctgcatgcatgtgtgtgtgaccttgggctgggatggccagaggaaatggtggccttggctttcagagttcctttgaagggkgcaagaacatcaggctcagtgtccatacccaggtagcactcattagggatgattctctctgccccaggactccaagtcaaagattccccaatcaaaaactataagcatttgactgtaaatagcagcagtgtgaaatagatcatttactgggttacagtgtgttctcacttagcccgagcttggacgactgtggaaggatagactgggggaatggggctgaggaaggtaccaagtgagggggttttgcaggaagatgggaggtcagggaacagagcctaggaagaacagtcccaagttggaaaacctaagagccttcatgtgcctgcctgtggatgggcacagccataaatatccccacaccccacaactctgccccatcagtctgtccctgtctccttcctctggtggtgtgcctgaggcctacctcctaccccttgcagcctttcatcaaccatcattggagtggggctcaatcatgtcacgtcccctccccttcccaccatagactctttaaactcttagatcactgccatgaccacttcctcaaaccagcccctgccttgggcctctgcccaagctgtttttgacctgcatgtgcctgtctggcctgtatgtactgtgctgtatgtacaattctgtgatttccttgtcgtcagcctatctcaggccattctgacattgcatggagagctgctggattggggctgtgggagggaagaggaaaacatctccttttccagggggaaaccagctcctggttggtgatgggtcctttggagtcttgccatggtagagaccacatgctggtacttgctttggtagggaatggggatataaggaaaataatgctgtgaaggatcctgggcccatttcagagtcatagaaacttggctttgtcctttgattattgtctcctggttggggcttccatttcacctcaggccttgaatagagaagagcatgaaactatggtctgatatttatggagttctggccccagcctggtctgaccctgggctggggcctgagcaatgcccaaatccaggggctttggcagctgcctggggaaatgtgaaaaagcccagcctaggccacccatgctgcccttctgcactcacgttggaaagtgtcaatcagacagttgagtgcccccaccccggagcaccccagtcttcctctccagtagttatttttcaaagcagagggcccctgctctcacccatgtggatcagggagctggttccagagcaaaagaatatgctttgaaggggaaggcagaagaaaactcagatgtctctgcaaagtgcctagttctttttggaaaccctttagagacaggctttaacctgtctacaaccaggggatggttggagaggagcccaacagtcattagagctgctgctacccagatgcgtgttccgcagggtttcgtagtcactgtgtgtgctcctcagagctgaagcctgttgctggaggggcactctagatgtgtgtgccagatgagagactgtaagggtgttgccaggttgtataagagacagaagtggagttaatggggctgtgggtrggtgggtggcgggggcagaatgtgagtatgatgagagagactgctggagcagagaggccatgtgtccctccccagtgatgccctggccccatagaatgccatttctgggatagcccctggcccagttttttggagcacgctcttgggggtgggcaagggagggaagagaggagccaaaacctgttctttggagaaagaagcaggacaagctctgcgcatgactgtcatgaggaggaggagccagcaaagccctagatggttgctaggtgactgaggagcagtggctccacccccatggagcagaggagggtgggtgcatgacgtcaggtggagctggtgctgcggccactgaggctgccatcagcctaagctggtgaactgggccaggcaccgctccggtgcctgccggagcctggcgatccagctgcacgtctgcgggggcctctgtgtcagagcggcggccgtttgcaggctgggaagctgccgcaccgggaggctgagactgcattgttgggatttgatgcactaatctcctgtctccgccgcctttccctctgttcggtctcttgccctccctcccttcgtctgtccttcctccgtgtgtttgtctatcctcctctgtccctcctctttcctctccttgctttctttggttttctgcaatgatgagacaggcaccgacagcccgaaaggtactcttgcttgctctcgtcctgctgctgggttgccagggcaatggtggcagcaggctgctggggtgggggtgggggctgattgacttcatctgtctacctggtcggggaggcgggtgaggacgaaggtgggttagggagaggtgtgtgtcaccactatgccccacaccctgggcatttgcttactgccttgcctgcttttggctctgcctgtgttccaggccttaacacccagtggcctcacaggcttgggcttcaggcagcctctaccgcataccggatctgggagggtttcctgtggtagaacctagggaagcaggcccaggtatctcagtgcctctagcaggcctgcctgcctcacccaacctttgctagaatacctcttggttgttctcccagtatcccccaatccccaggatttgtatcagggcactttaccagggtgggatggggaacctagaatagtctttgacccacagctgtggaagcttagcccagggtagaagaggtgggaattggcctcagtgtatgctggaaatagggcccaagccaaatcttgtcttggctagagcagtgagatactgggtagcaagaacactatttggaaattggagttaattgtccacttaccattttgcagtaacctgaaggggctgtagtttctctgtgctgctgcccacccccacctcctttcctacagctgggtggggttactttgctgagctctgggcttctgctaatgcaatattcatggtcctgacacctgagccctcttccctagtgatcgggactgctgcaggatctggttctggggaagggggttgggggagggaggacagcagcattgttctaccctagggacctgatctcccatttctgggcttagattacgctcgkcacatggggtttctagggagttctgtgtagagtctagcacttgaaggaagaggctgacctgggaaagtccttgggagtggtggctgggcggggcctctggctctggactggagttggagagatcgttagcaggaggactggtctcatgggaccttctcactagctgcttccttgttctatggctcagcctagagatggacttctgggatttctggggtgtctgaaggggtgaggcctgcaaggattggacaaaagtgggagcaggaaccaaggggaacaggaattctgggttcctgaagtaggaatacagtgattcactgaagggagaaggggatgggatgggggggagggtggctaactgtagccccattcctgttatttcttctgctctcattgctgtcccttttgctctctgtctttctgccattgtcctttctttcctgactacttctcttctggctcctgttgcctgtccagaccacaactcggcgacccaaggtgagaaaacaggcccctgtgtgagccactgctgagtgtacacacacgtttcaggcatgtggatgtatgagggcacgtgtatgagcaagtgaaagttcgtcatagtgtatcctgggttctcttcagaggaaagggtgggggttcgcagtgctggcaggcacctcctggggaaaatggcttttggcttttaggaggttgtctaagccagtagcttgaatgcaaaagagaaatgaatggggttgtggtggttaatcaaagcaggctttcttgaacaagggaattttgaccagttttgatgggagggattggaagaaagatgaacttggccatgtaaaatgtcaggggataaggaggtgagtgtgtctgtgacaggccttgggtggggatgtctgaggattgcacatgatctctgagtgtcagcccactgggagaccttggggctcagcactttgagcacattggcaggcctgtctgctccagggcttgaacttcaggtcagctcctctgcccaccttctcccctgccccacaggggcatggatagtgttgccagatcgggggagatgacgaagagttgtttcaagggggagtctaggggtacaactttcaccttggcccttttacctgcagggtcctctgaaatagactgagagagggagattcagcttgactcccaaagagggcttarcaggggtagagagcctggcacccccacttttggcccaaccttctgtggaaattagattgtactttttccgtctaggggtggagggcatagacctggagcaaggatgggactgagagtataatggagttgctagaatgatcacaagtgggtcatagatgggggttctagggaataacggattctgctcttaagggtagtgccagagctaggaggaatgtggagtcagtgccaagcgaggagccttataatcttatgtctttctcttatcttttcctccctctctcmtctgcctccatcctccccctgtcctttgtcactatctctctctgcctctctgtatcattttccttgtccccttcattcttcttttctcactgtgctttgayactctctttctgctttttcccttttctgtctccttcccttgccatattctcatattctgtttctgttcctcttactacccctatcctctgctttctttctggtctgcctctaccctttctgaatagcccacgcgcccagccagtactggggtggctggggccagtagctccctgggcccctctggctcagcgtcagcaggtgagctgagcagcagtgagcccagcaccccggctcagactccgctggcagcacccatcrtccccacgccggtcctcacctctcctggagcagtcccccckcttccttccccatccaaggtaaggcctrgggtaggggtaaaggagaatcaagacacccagaggcttgtggctacccgctgtgtcttgaaaatttcctggggttggcaaagacctagaacttggatcagaaagggtgaggacatagcctatggatatcttgctactgactgagccatcctttcctttcttgcccttatgccatactttccccatatatactgtgctacggtttcctctcagatgttcttatgccactgactgttggccaccctggggctgggtgatgtttgcacactttcttgtgttctttgcgccagctcagtgttggtggagaggaggagtgggctgtgcacagaccgtgaggcctctcctttgcaggaggaggagggactaagggctcaggtgcgggacctggaggagaaactagagaccctgagactgaaacgggcagaagacaaagcaaagctaaaagagctggagaaacacaaaatccagctggagcaggtgcaggaatggaagagcaaaatgcaggagcagcaggccgacctgcagcggcgcctcaaggaggcgagaaaggtttgactctggatgaagggggtggctggggcagcctgagacctaaggaagcatgctggaaactagactggagctggagcctggaacatactgtgagaaaggcctggggcatctctgtgctkgtaccccctcccacctccacttcttcctcaggaagccaaggaggcgmtggaggcaaaggaacgctatatggaggagatggctgatactgctgatgccattgagatggccactttggacaaggagatggctgaagagcgggctgagtccctgcagcaggaggtggaggcactgaaggagcgggtggacgagctcactactgacttagagatcctcaaggctgagattgaagagaagggtaaggggcccacagctgctgggggccaaacggtcaggtgagaaccatgcctsraagtgttaatgatcttctccaggctcagatggcgctgcatccagttatcagctcaagcagcttgaggagcagaatgcccgcctgaaggatgccctggtgaggtagggtcttcastgcttgcctctgatgcttactcttgtgtctccaaatgtgttagagcacccatygccagagactctgacacgtgctttcctccttctgccttcctcacatccctgcaggatgcgggatctttcttcctcagagaagcaggagcatgtgaagctccagaagctcatggaaaagaagaaccaagagctggaagttgtgaggcaacagcgggagcgtctgcaggaggagctaagccaggcagagagcaccattgatgagctcaaggagcaggtctggggagcccagcccctcacccagaatcccccacctgactctcctatcagttgatgcctcctctttctaggtaccttccagcagcccttctccctatcctccccgtaacayaggtggatgctgctctgggtgctgaggagatggtggagatgctgacagatcggaacctgaatctggaagagaaagtgcgcgagttgagggagactgtgggagacttggtaagagaagagcagacccctgacatctgacttggacctgctgagaaaaagattgacatgtgacccttggcctttgagcagggtgtgcggtgagggacccagcctgggcttgctaccctgaccctgccttttttttttttttttttttctgagatggaatctcgctctgttgccaggctggagcgcagtggcgcaataatctcggctcactgcaacytccgcctcccaggttcaagcgattctcctgcctcagcctcccgagtagctggtactacaggcatgcgccaccatacccagctaatttttgtatttttagtagagatggggtttcaccatgttggccagcatgatctcgatctcgacctcatgatccgcctgctttgacctcccaaagtgctgggattacaggtgtgaaccaccgccgctggccgaccctgcytttctttagcccmaactatggtgtggtgtcctaggaagcgatgaatgagatgaacgatgagctgcaggagaatgcacgtgagacagaactggagctgcgggagcagctggacatggcaggcgcgcrggttcgtgaggcccagaagcgtgtggaggcagcccaggagacggttgcagactaccagcagaccatcaagaagtaccgccagctgaccgcccatctacaggtacatgcccactgtttgctctctgcccaccatcaccccagggcttccttatgacccagctgtgcttcactgtctctcctcctaggatgtgaatcgggaactgacraaccmgcaggmagcatctgtggagaggcaacagcagccacctccagagacctttgacttcaaaatcaagtttgctgagactaaggcccatgccaaggtcaggaaagtgtgtgggtctgagggagccctgcctgggatgaactggtatggggtctgggcttcagattcctgggggaaggggtgctttgtgtsgtggtttggaagactctggcctgggcttgccctagaagcaagggatctactggagcaaggcatgggaattttggggctctttcagctctggctaagagtcctcctccctgttcacctcacaggcaattgagatggaattgaggcagatggaggtggcccaggccaatcgacacatgtccctgctgacagccttcatgcctgacagcttccttcggccaggtggggaccatgactgcgttctggtgctgttgctcatgcctcgtctcatttgcaaggtatggccaatcaatcacatgttccacagaaatctagtgaacttgccatgarccaggcattgaagatgctgagtgaagacaacagagtctctgcccacaaagagtttatggtatagtggaggaacacagcaaagtcacygattaatatatattacaaatggtrtgttttcaaggagagataggttctgtgagagagcacaattagagatttgatttagaggtgagcagggtgtgactgagggaataacattgtctgagggccaggaggtgcctaggggttaaccttggggatgatgggcaggatagcattctaggtggagagatagcaggagtggcagctttaagtcaggaaagaccttgattccaccggtyccactaccctttcattttcacatcctgactcctcasaacctccagtaatcacatcactaccctttccccatgcaagattccycacccaggtaagagctatttctgctttctctcccatgtgtgtccatgctccccacatagttaagctctgagtactatattcctgagtctctgttctccatcctctgctctgaggcccaggttcctggtgctttttcccacaggcagagctgatccggaagcaggcccaggagaagtttgaactaagtgagaactgttcagagcggcctgggctgcgaggagctgctggggagcaactcagctttgctgctggactggtgtactcgctgagcctgctgcaggccacgctacaccgctatgagcagtaagtgactcctgactccctcaccccagggtgggggtccaggattggccagaactgagattgcctggcagactctagcctcayagtgcccttctctggtctctagtgccctctctcagtgcagtgtggatgtgtataagaaagtgggcagcctgtaccctgagatgagtgcccatgagcgctccttggatttcctcattgaactgctgcacaaggatcagctggatgagactgtcaatgtggagcctctcaccaaggccatcaagtactatcaggtgtggggcaagaatttgggcttggggcaggagrcagggaagctttcacttgatgggggctcttactaatatattcaaggttgtatgtcccatgcttgctgcttgaggcctggtttgctcttagatgaactctccatatgatgcagctgcttgagggctttggattctcttgtacctccagagacccatgatgaccarggctcaaactacagtttgggaagaacyccccacccgctccagggcctaaaagttgtctgtctgttatctctcctcagcatctgtacagcatccaccttgccgaacagcctgaggactgtactatgcagctggctgaccacattaaggtgaagtatctgggccagtgattgagcccccgtggagatcagaaatggagggcatcaggtcaagagatcaggcacccaagaagtgtcacataagactagggcagagttaccaaagccatatcagggaaactagaggacctacttatgtatgggggtcagcagaggatggggacttcttaragatgttgataaggcagaagggctcctgctgggggctgatgattgcatgcttctatcctcacagttcacgcagagtgctctggactgcatgagtgtggaggtaggacggctgcgtgccttcttgcaggtgagaacacatctagatctgtgtgagctcctcttctttcttagtcctcacttccttactccgagccttaatgctaacttggttctccatccattttctttttcctgagtagggtgggcaggaggctacagatattgccctcctgctccgggatctggaaacttcatgcagtgacatccgccagttctgcaagaagatccgaaggcgaatgccagggacagatgctcctgggatcccagctgcactggcctttggaccacaggtttaaggctgcaactggggaagggaaggaaactgagtagaaacatgaagggtatagcacttgaagatctggatctggttaggggacaaaaatggttttggggtagctggaaactgtggtgctgaacccagggttgactcctgactctggcctggcacacaggtatctgacacgctcctagactgcaggaaacacttgacgtgggtcgtggctgtgctgcaggaggtggcagctgctgctgcccagctcattgccccactggcagagaatgaggggctacttgtggctgctctggaggaactggctttcaaagcaagcgagcaggtgggcctggatggctgggtagaaggtgtggggagagttagtgaccagtgtggggcttttacttctgcccttggctcctgcagatctatgggaccccctccagcagcccctatgagtgtctgcgccagtcatgcaacatcctcatcagtaccatgaacaagctggccacagccatgcaggagggggagtatgatgcagagcggccccccagcaaggtaggtggagatttccttggagaagttgcagaggcytgtaggagtaagacttgcagagctactgctagttgtgggaggacggggagacaggaggaaggcatctggagagcaccatcctgcctagaaggcagggttttccctgtaactggatctctctgtaaggagcacagtgatgatctcttctctccaccctcactttctcaccccctaccgaccattccttagcctccaccggttgaactgcgggctgctgcccttcgtgcagagatcacagatgctgaaggcctgggtttgaagctcgaagatcgagagacagttattaaggagttgaagaagtcactcaagattaaggtgagggtagtgtaggctcaggatctgggggccaggaaattggtwkgactcasgaaagcagtgagtgttggggatcgggaccaagacggcttgggagttaaggggagaagtggggcctgcaatcaatgggagctgtggtgagccctcagggaacctactatctcatggtctagcccccagtttccagggactgtggggrggatgtcagggatctagaagttctgtccttgtccagggagaggagctaagtgaggccaatgtgcggctgagcctcctggagaagaagttggacagtgctgccaaggatgcagatgagcgcatcgagaaagtccagactcggctggaggagacccaggcactgctgcgaaagaaggagaagtcaggcactttccctggggccttgcttcctctaatcctcccactgctggagctctctgcctcctaacccatacccctactcaggttctcttatagtgagactccccattttctttacccactgccaaccccattgcatcaccccagcctaagcctgtgctgctctgccctggcttctcactggcagggctattccaaggacctctcaggactgaatagtcaaggagtgctttagagaagggacactgccaaagcccagattctctttcacagagagtttgaggagacaatggatgcactccaggctgacatcgaccagctggaggcagagaaggcagaactaaagcagcgtctgaacagccagtccaaacgcacgattgagggactccggggccctcctccttcaggcattgctactctggtctctggcattgctggtggtgagtactgtggaataggcagcactagcacagaggagattgtcttctctcctgtccttggcctcattttgacctctgccccaccccccttacccccgggtattcagccaggaacatgcttacacagtttcactctgtgccagttttcaccaagttttcccttccgctgaagatgtgtgctgagtttctctgggcaaaggagggcattactaaattgttaatgaggctcagaataatgatgacagttggtctctagtagatgtcctttctggctctgtaatctgacctttctgcccagccctatatcccagagggttgtcagccagcagcaggctgggctgactctcctggggcatccagccctgcccgatacctgctcttgattgcttctctgcttggacactgtgttttctcactgagttcatgtggcttcattttatgrtgtggtcatatcttccactgctgaattatcccagtttcacttggggcttgtgttttgacctttgtctagtcactcagtatagtcagggctcctcacctagagtttttctggttaccagttctagcctccccagttacctgactcaggaggtggctgctgctgtctttgttctcctctgccctatagtttgttttgtttactctccagtttctcacttaaccttctcacctccagaagacaggctttttgccctggaattaaacccttagggcctccagactttcccagctgctcctgagtcttgtcagctgacctcacctacatagagtctttgacaaagtctctgttactgacwccccttgatcttgggaggtgaccaagtaccttcttgacttkaggctcttgtggtacagacagctctgtgttctttggagagagtttccaggattactactttgtgttgtttttagcactcttgaaacaaacattagcactctttaaacaaacatagttctgaatttatgaaacttcccaccaaaaaagaaggtcttttgcctcagagcaatggggaatccttaggagcaagggagtgtgtttgcatccccaacttaagctttgctgctggtgagcactaagggtgcagacatattggggtctctggagcattctccgtgcccttcttggagatggcatctgagacagggaggcaggaacagcctcatgttccaagtactttgtacagtgcacactctctttgccactgttcttcacacattgtaccctgtcttgtggcctcactcctgtttggtgtctttctttaacacttatctgctcgtccccaaagataggtggcagagagtcttgttagagaaagtatgatgattaggaaaagggttttcctgcaggttgtgtccaggattcctctggtgtgtccccgtaacccccaaatcacctaactcctctctcctcttttcctgctccccsatgggctatcccgagcacagaagaacagcagcgaggtagagacccactctggccgggggttaccaggctggtgggagttggagctaagggagcagggtggagggggaagccaggactggagatgggtgatggggggatgaggaaaggggaagagtaggaatggagcccaattttcaaccctttccacttggggctgatgagattttttatggtccccacaggagccatccctgggcaggctccagggtctgtgccaggcccagggctggtgaaggactcaccactgctgcttcagcagatctctgccatgaggctgcacatctcccagctccagcatgagaacagcatcctcaaggtgagggagccacggggaggactgggatgggagatggagcatatttgccccattgatgatagatgacaggggcctcctagcacctcttaccactatccttcttttttcatccacagggagcccagatgaaggcatccttggcatccctgccccctctgcatgttgcaaagctatcccatgagggccctggcagtgagttaccagctggagcgctgtatcgtaagaccagccagctgctggagacattgaatcaattgagcacacacacgcacgtagtagacatcactcgcaccagccctggtatrtacctgccaacccccaagatgaataaaactgccccctccacttggcccarggatttakcccctgctcaggtggttcccccaccacagaagctcttcccagcagtgttctttggcttcactgttcagtttgtytgattcacccactctctctcaagtacttgttctgttagagagtcttatacctgcacccctaacccttaatccagtagaactgcctgmctgcgccttggtgggcctcaccagctttctctccccacagctgccaagagcccgtcggcccaacttatggagcaagtggctcagcttaagtccctgagtgacaccgtcgagaagctcaaggtcagctcagtttgccaggcagagctcacttcacagcataaactggtggagccaggcacttgtggagttcctctgagcccagccctgtgctagacagcaattggggaggagatggaagggaaggcagggttcttgccttggaagctcactgtctcagtgcaaacagaagacagattctcataacaaaatggataagctagggtaatctttagagtgactggttcaggctttagcttccatcagcgctgagatcattgtggggtagaacggttgggcatggcttcccaagagcggtagaatgtgagttgggccttacaggatgaggacttgcaaagtaaggaggagtgctggtgtggggatggggttggagatgagagcaaaagtatgttgatatagaggactaagtccctgcccccytggtattagtgtctctgtgaaaccacrtgktcttgtgctagcctgtgggggtcccataaatgaacccttgtsttcctctccccttccctaggatgaggtcctcaaggagacagtatctcagcgccctggagccacagtacccactgactttgccaccttcccttcatcagccttcctcagggtgagggggagcatggggtggaggatgggacagtgtggagagctcaggcgggcccccctctcctccagaattggaggaggcctttggagtctcaggtctaacaactgcataccttgggttatctggccaaattttacttacaagtaactcagaagtgctyacagtgctttgaaattccaatattttagcacctaaacaccttccgtgacttttgacaccaggagggcctcaaaactcccttgtcagattatgtatccccattcttatttgaaaaatgtggtcacaatagcccaggatctcagaagccctagtcacccaggagctgccttggtctcagtgctcagggaccccttcagtggcccacagctsaagtgagcccctgacctggagtctttttctcctcatcaaccaccaggccaaggaggagcagcaggatgacacagtctacatgggcaaagtgaccttctcatgtgcggctggttttggacagcgacaccggctggtgctgacccaggagcagctgcaccagcttcacagtcgcctcatctcctaagcactcctttcccctgctgtycccttcgaccctcagccctctggtgccgctctgcccgatgcacagccacctcagccagcccccaggtagaaacgtgggttaagctcttcctgccccgttcagcttcactcccaccctttcagcgtcctgccccttcaccttgacccgggttcccccactcccattccctggcctctgccataatttgttgttcaactgctccctccttcctgaggggcctcagggcttgtggggggtaggctgagaccccaccaccaaaggttaagtgaggtccccttgattgaggacttcaccccttgattaaagcaacttytgcttcagtgcttcctgtgtggtgttgagagtgggacttgggccattaagctcacagcaggagtggaggagaagcgatgctgaggaagctttggctgtatcaaatttgaggtctcctcttcgtagtgaccagaagaatgctgtttctaaaattcatgtgcagtaagttactctaaccaaggaggaaagggctagacttaggactaggtacctaagttcatttatggagtcaggagggctgggagggtgtagcctctgccaaccctgcctctgcttcctgtagcttccactgctctttagtccaatttttggagctggagtaatgatatgatcaccaccccagccaattttctgatgtactggccagtcttcccataagacctggggtctctcagagggaatatttactaaataagggaaaactaaagtggcatactagtaaaggataggaggtacaaaagctactcccaaaccccaccataaattagtatcacctggggagtttcttttaaaatgtaacagatttctggtcttgacccagacctactgaaaatacttgcagagttgggactcattaggctggtaaacagcaccccagcattgtagatattagccccagtttagattagttggctagctcctttatattctctttttttccctcttggggagagaagtccagttcagactcccaaaaggctctgatctagatgcagaaagagacccttgaccctgcagagtgctaggcctaaactaggccagaccctctgctcttctgctttctgtcttgaggggaagggcagacaggaggaggggtgcttgaagttgggcgtccaggggccatattctcaatgactatactgtctgggaggtcagtgggttatggcgtttgaatgcctgctctgtaccttggctcttctcacctgggattccgagagaaaatgatttgatgacttttcttcaatactctcaatgatggtacacaaccagtgtcattccagatgcataggatgtaatgcattacatatgagggattaattctcacagaactggttgagaagggttattattgtgtcttgaaccagagagtcttcacctcacgtctccaaattgggctctgctagggcaaggaaatcacagaccacactgtcctttccttgggattggattctacccaagctgctgacctgccttctgattggtgtggttaagacaccgaggccaagcaacttctggtggcactttgaaaggagaatggggctttttgttccatccttttcccttggtggcagtttctcactacttaaactgctgctctcttgaatgccgaattcattcacccaattatttgttggctatcaccctgtgagtgccccacaggtatcttaagagtcagcatgtccaaaactgaaatcatctcttctgtgtcctacatgtgacaagccacaaacctggatatccttgactccttctttgatctctttagctaatttagttatccagtcctgttcagtttgtccttcattactgtctctcaaatttttccactttttttacatccacgaactttgtctataaataacttcttgctctgggcacttcagcagtttttaaactggttaccctacctccattgcctttcttcaaccagttctacacatcgatatgagggacctttccaaaatgcatactgggccatgtcactccccagtttaaatcctgaaatgatttcttcaactagatttaaaatttacataagatcctgaaatggttcctctatgtgtctagattttaaaatttaaactcactagaatggcacatgagaccatcaatgatttgggtcctgtccgcctctccagcctctcccgatgtgccaggtggttcagctttagtgaacccctgcagtttgcttgccacccggtgctctcttaggcctcttcccaccacccagaatgccatctacctccttccctccactctacctccctgccctcgccccatccccattcctcagctgacatcctgtccatttattaagatagctctggcaatgccatctcaggaaatttccaatccctatggcctgttaggtgctcctcttcttgaggcagcaaaagataccgaccttttttccaggtgtgcttggatttagttgctttgtgactttggcaaggtttctaatctctgatctgttttcttacctgcagaatggaaaaatgatatcttacagggttgttatgaaggtcaaatgagatagtgcatgcaagcatcaagcactgtgctggcacacagtagccttgcttctcttctccagtatgtgctcctactacgctactttatgccagtaagcatctgtttctattttaagtgttagttaactcctctcccacttcagacaggagttcctttagggtgtcttccatctctgcatcctgccaaatacaagtaaagggcacgtatttgaggaggaggaagatgacttttattttggacatgagtttgaggtgcttgtgagaatgtacaagcagagatgtccctttggcagttggaacctgctgggtctggagctcagcagggatgtccagattgaagataggaaaagtttggggagtgagttgggagtgtatcaatggtggttgaaggcatggtttgggtgaggttactgtctgtattcaagttactaagaaaaccgaatctgaggcaaagctagtgttagcactttattggagggtgaagtctcagagcagcgagagtgagggaaaggaggaaaagaaaatcaaaggttggtgttagtgagttggctcctgcctcacaaagacagctagtcacttgcccatgttggatgtctctggatagactacacagaaacaccatgactggctagaacattgtatttggattgatggaggggaaattcacctgttctgcttcctgcccatgctttactgctcaaagtttgccatggagccagtgttagctccccactttcttgctgggatgatatttcttggccactgcgaaagccagatcccatgccttgcggcatggcatttaatctaagtcctgcaatggcaaggggaacagaatgtggtcaccggcctgtgggagttagtcagcacagagcaagcagctggagacgtgggagtcaggtgaggctgagagaatctgaagcagcaagttacctcaggagagtattcagagggaagggaaggtagagccctgggaagccctgagagttaaagagcctgcagcctgaaggggcatccactgcaagcatagggcccctgtagaaagcattgtcacagagccaagggaggagagagattgagcagctcagagggcaatcaagttctgggaagtggccattgtgattcagagatgcctgatgagctggccagggcagtctccatggaatagaggaaacaaactgggttgtggtggcaagaaaggggagacagcagctcatgctcactgtgtgtcctgggtagcatccattcatggggattgtggagaatggatagccaggcagatgaccaggggaatgatttctggaaactggggatgtgatggtgggggagaggcctggcgaggtgctctgtgtaccaaggatggagtatagcatagtaacagccacctttgattcatccaaagccagaaatgccagtgtgacaaaaccaagcagaccggcagttggcaggggcagggtatgaacattctcaactctgttccctaggagcttctctcttttggtgggttttgggcagtttcctagggttaacgttacctgccccagcatggaggcagctttgtgaaataagaatagggcttatattccatctcttccgctattgagctgtctgaacgtggggaaggtgcttaacctttcagcttcagtttctgtatttgtaataggccaatagcaccttcctcaggtgatattcttaggtaatcttcagggagaaaattaaataacatagcatgcttgatacaggtatttaaaaaaggatacctggaagaggctgatactaaacaaatgaaaaggaaacaaaatagaagcacattcccaagatgtacactgtgacacacataaccatcttttgagccccaaaggattggtagccctggccaggcgcggtggctcacgcctgtaatcccagcattttgggaggctgaggtgggcggatcacgaggtcaagagatcgagaccatcctggccaacatggtgaaaccccatctctactaaaatacaaaaattagctgggtgttgtggcgcgtgcctgtagtcccagctactcgggaggctgaggcaggagaatcacttgaaccccaggaggcggaggttgcagtgagctgagatcacgccactgcactccagcctggcgactgagtgagactccgtctcaaaaaaaaaaaaaaaagaagaagaaggataggtagcccttagtgccccagctttcagcttgtttctgtgggcagctactgtcttattttctaccatccaggcactgttttctcctccttttagcaggccaaggctgagagagagagtctaaatgtggtggcacgtccctcaccccactcccacaatttgcattcacctgtttggttcacattttcagtgctctgcctcagtggggagcaggggtggggcaacacaaagacccaaataggctgctgggtaatcctagggaatgtacaaggatgtacaaggccccagagctgagtctaccctacacagccatgaggcaaaaagtgaattaggaacaagtatgctctatagcccaggtactctggaagttttatagcacaggtgaccttggcccctgtcaagtataggcccagggcacctggagaacacttaagtctgagggtgagtggtccctcctgcttctctgtggttattgtttcatgtagccagcttttctatgtgtatgggtagcatgaccattcatctagcctccctccatctctatcatccgtgccacccgaaacaggtattgctactcccagggacagaggtcctcagaggggcagcctgggacgtttggcctacattccttttccgaaggctggggagtttggatgtgggaattggactcttgctcaaataacgggtaccagtgtaaatagatgtctctcaccctctgttttgttactttttattatggaaaattttaacatacaaatgagaggagagtgtaatgacttacacatacaatatatgttcatttcatggttcatcttgtttcgtctatatcccctttcctcccccttcttctcccagaatgttttgaagcaaatctcagacatcttatcaccttattatttcatccaaaagtattttagtatccctgaaagatacagctcttcaaaaaagaaaactacaataccattatcacacctgaaaagttaattcatcagctatccagcattcaagttaccttggttgtcttataaacattttgttttgttttacagtatgtttatttggatgagatttaagacaaagacaatacactacaaatagatgtcttttgagtctgcttccccctattttctaattattttactaatacagtgtttgctttatatacgttcttcttattcaaatacataacattatcaccttgataatgcaaataacacaatatggaggaagattgagaacataggctcccagtacttagtcactgggattatagagattttccttttagtattttctatcaaaatttaaagatgtcctgccatggctgtgcaagaatagaactgtctggaatgggagtgcaatgaaaaaaaaaatggattcaaagttaggaaaagatgaaaagatgtaagtcaagaagagagaatatattttgaaactaaatagaatttcctggccaggcgtcgtggctcatgcctgtaatcccaaccctttgggaggccgaggtgggtggatcacgaggtcaggagtttgagaccagcccgaccaacatggtgaaaccctgtctctactaaaaatacaaaaat

SEQ ID NO: 96961 - DNA, 133123 bp, Homo sapiens
ccaccacccccggctaattttttgtatttttagtagagatggggtttcactatgttggccagactgatcttgaactcctgaccttgtgatccacccgccttggcctcccaaagtgctgggattacaggcgtgagccactgcacctgtccagtttttatacatattaacatagtgatattggaaattcatttttcagtggaaaaaaaatgctctctattttggaaagtaggtagttgggctcctgttttaaatgaagacatgttatctgaaaaattaacatgctgtgtaagttcagtgaggaggcaaggggagtgaagaagggtgaagagaccagaacatacccattccactaccagtggacatttgggttgcttccgagttcaggtacctccaaaccatgctatataaatatcctcccttgttcatgtgctttggcacgcatatgcaaaagtttctgtaaggagttaaattgcttcgtcattccttatgagtattttcatctttattaaatattgccacattgtttttgcagagtggctgtactggtttacagcctcatcagcaggataggtccccttggcgggattccagtctgcccctttggggaggagggtgtagcagggagagaaataaggctggcaaggaatgagaaagccaggcaggagaacaccattagtgccaatccaaggagttcagactgtatttgactgcattgggaagctactggcaattctggaacagggaacaaaatgcaaaaacagggttttgggaaggttagtctttaaagctgtctcttggtttgtgttggcagttggtagtgatagtggtggggttgacttaggccagcagcaggactcaagctcacaggagagagatctgtagggtgacagcacaaaggggacagtgagcacatccctgggggcagaaaaccagagcatcccagatctcccaactcttatccttaaataatccagttagacacacacactgctagtaggtgtgtgaagtgctacagccactctggaaaacaatgtggccgtatttaacaaagataaatatgcacatactgaatggcccacaagttgtaaaatataccaagcaaaacaaacaggaaaaaaaaaagaggaaagaattgtcaataacaccagatgtaatagagaggtctatcaagcaaagatctgaaaagtgtccactgtctaattgtccacttggcaattagaagtttgatgatgagctttgccacagaaatgtctgtgaccagtaaggagcagaaatcagaacacagtggtttgagggatgagtgagtggtaagaaagggaaactgggcacggggcctactatcaggttggttggctgagaacagactcaagcacatagaaacatcagtatgtgatcaagcaggatgggtcccctcggctggatttcagtctgcccctttgggaaggagggtgtaggatggtgggtacagggtacataattttacaaatggtgatttaacacttgggaaaaacaagttaaatcctcatattacaccatataccaaagtccagatggattgaatatttaaatatacaaagcaataccggaaaagaactagaagaaaatttagaacatacagattttctatataaagaaaatttattttgtatataaagttggggatggctaaaacttttctaagattgacaacaaaactagaaaccttaaagaataatatggataaatttgactttattaaaatacacacacacacacatcgtattaaaccttcctgtaagaaaaagaaaaagactgcaaacaaaattgaatgacaaatgacaaacagaaaaatatctataattgggaggccgaggcgggaggatttcttgagcctaggagtttgaggttttagtgagctgtgatcgcgccactgcgttccagcctgggtgacagagcaagaccctttctctaaaaacaaagaaaaagaaaaatatttataacataaataagtaacttttacaaataaataggaaaaagaagctgggagtggtggctcatgcctgtaattccagcactttgggaggctgaggcaggtggatcacttgaggccagaagtttgagaccagcctggccaacatggcgaaaccccatctctattaaaaatacaaaaattagcctgacatggtggcgcatgcctgtaatcccagctacctgggaggctgaggcatgagaatcacttgaacctgagaggcagaggttacagtgagctgagatggtggccagtgcactccagcctgggtgatagagtgagactccatctcaaaaataaataaataaataaataaatagaaaaaagaaacacatcaatagaaacatagatatgaataggaaattcacaaaaaatacacttaccaagttaaatcaaccttaagtaaaaaattcgttcaagattgtaaagtgaactgttaacatttacttctctttcctccctaagtccaactggaactacattttttaaatgaaaaaaagtaaagtatgcaacctcatgagagaacttgaaaaaaaaaaagtaaaaaggaaaaatatccaaagcaaaaaaaaaaaaaaaaaaaaagcattccaaagcagtgctggaatacgaggaggggtttacagtatacttctttggacctgacgcctagcacttttcccttctgagagaaaatctgccatccccactttagtcgcctggttcatgtgggaaactgaggcttagagacagcagagctggggagtggcagcaggatattgtggcaggtggtggcagtcggggacttcaggctgtggtctcacaccgccacactgcctttcccttttctcacagagaacattcaaatggctgtctttctctggcaaggtagaaagcctctcaaataagtaaggaacatgctttggttaacagctaacgaggcattaggtctggacagggagacaagcagtgcagcagccaaatcccagtggacactagacacgaggaagaaagcacggtgctgccagggcaggtcctcctccctccttcctccttcctccattaggaggattcctgagcctgcaaacctgttccctttgtgcatcctggagggacagcccctgccccataccttccaataccctcaccaaaccagatgaagctcaccctcaaattcctgtgtgaagtgagagacaaaaaaaccccaaacctgaagtgtctgaaataaatgtccaaattatttgaacaaaacctgggtaggtagaaaccaaagggtttcacttgaatgcttggcagtaacgtctcaactggtctttccacctgtgctacaatccactgtgaagtccattattccattcttgtaccaagtccccttccacattcctttcacttcagacatgtttgctgatgtttacacctctccatagactacccagcctatcgtcgcatgcccaaagctttatttccccaaacctgccctgtgccagggaaactgctctccagttctcaggatatttatgctatgttctcccacctcttatgtctatattttttgtggcttcttccctctgcctcagataccccttggtagttctactgttctaaatcctacccctatcctatcccttcactgcatctccaaggccattttctccacaaagcttttctttaacacatggggctggtaggtaagccatgaacatttgtggaacaaggtaatcctccaaacaagggtgatttttctttcactgaacccttccctccctttgtgcttctttttggagcctcacactcttctgaatttgttgaatccccaaccagctggaaattccctaaggcccgaaactgtttctggcctaggctgtgctgatcttcctgggactaaggggtttcctgggtcacagatcttctgtgctaaaaccaggaaagcctctggtgacccagcatgtgttgatctccctagtcttgcctgtctttgattccatggattattaacagaaactataatgttgggttaatgtgttggcttgggcatggcctccgaaacatgttttttacatgtctgccaccagcaggctctagatccaggaatgaggcttttccactaagggaaaactccacgtgatctaggaagaaagtgaggatatccaaccagatgataaatttcctatctgaaagagaaggtcaaccctgaaataaggaggctgaagacccttagagaagccacagaagagactggaagaagaggggtagagttgcttttttaatggggcttccagctcctacttttcttcctgtctgtaagtctctgagcttctgttccagctctgtaaggttggggacgagaatgctctccccactggactgttgagagttcaatgaggggaaatgtgtgcatataccaggccccatgctgggtgcccagagacgctgcgccttcctggcatgcttctcttccccatcgctcagcaccgcgtccctcactccctccactcccgattctcacttcctactcactggcttcttccttcccatcttcctccaaacttcccattttccactatgtctctctcaccgtatctttttcacttaaacaaaaatggaattcataaaaacagaggccaaaagtcaggataaacctggaaaaatcaccaagtacgcaaagtttttcttgcaaggtttggttttttcaaatgccttctttgttttccttgcccatatccttcttcggagagtcaggatttggggtttgcagagctgtgtggcagtggaatgtggaatgttctcctgaatctcagtcccatgaagaaaagaggcaaaagtcctgacatctttcctgaggattgtctgatttaaaagagctgattctccccaggcaaatgacttacctttgttgtgctgggacaagctgaacaggcaaggaataaacctccctagaacacactgattagattagccagtgagaaccactgaagacgcagacattagattaaaaaacagaaaaatgaatgttacttttacagtggctatgaatagacaaagactttttggtttgaaaatagttggtgaggcaatagaggaggggctatgttaatagcagagatagaaaaaacgagaggtggatggttccaactgcaaggtccaccctaaaggaattggagtcagggcccaggagccacaggccactgcactggggtaagtagagtggattttacataaataaagttacagagtggttgtaggttctggtttggagatgtgagtgaaccaactgaatagaataggcagattccccagcccaccaagagtcagatgagaattttattgctttttgctaaaggcctgtacaagacttagagcaaagataaggagtaacctgattgttgaaactaatctataagtattccaacatagcaaaggacaagtaacggaatgacgaggttttcctgtagtagtgttgcgattttgttctgctgtgtccccctactccagtttcctctgtgaggggagcgtgtagtgtgtgcatatctgtggaatgtcagacttctaaagtcaggggctgagacctatatctagttagacctctgtgcatattcttgagccatgggagtctcagtggttgatagtacttcacacttcttccagttcaataagggttacctatggtgtctcctctgagtctcctaggagtccagaaaacatgagacttgtataagaatccacacttcaactaagctttctggcccaaagaaggcattgttaccaaggatctgtttcttgaggtctttagggagtgagagggaaggaacgcatgaggaaccagagctagtccccatctctctccctagaagtgacagactgcatagctcttatgtatcaggagtcctggagatcagctggctttccttaaaaaagggtcatccagccgtgatgaaatcctgacttagaaacccagtgcccttagctttgtgggcttctgtccctgagaaatggtgttttaccctccctccaagcaggcatcccaggatttggaattcagctgtgagctcatgagctgatggatgtttccaggagtaccctgaagaccacccaggtatgctctccccacctcctttattttggatggaccagtctaaggagagtcatcttttcccacaccattggtggcactcaktgagtggcttgttgcttgactgaatgcctgcccacaccctctccagtcaagtttatcttgagtaactaaacacttagcaatggagacactcatacatctccactgcactagaagtagggatggtggccatgccaacaaaggagataactttagcacaaaggatgtcacaagaaacagatagtagagtgtgttctccagtgttatcatttcccaaaccagaatcaactggtcttgggtttccttccctcatccttcatctgtagaaaactttgtttcttgagctacttcagatctacttccctatcttaagaggtgggctatgtgcttcttctgctaatttattatctcagaagtacataatttgagcaattttatatagttttgargacaggagccctgtaagagtctcttactcagaaatggattcagcttggtttgaggtttaataggtcattgcaatgctcccttctggtatcacaggacataagctgggttgggcggagtcccccttttgtgtcttagccttcctctccttactccagagtaagagcagccctgatggaaaaacaaaattaccatccatgcctacttcatttctgcccctcttactctaagtctgggcaatccgcaacatctttttatattggacttcctagatcacagactctttttttaggaagagtcaattcaagccacccaggacttatgatcccttgctctgtgtcgggcacagtgtgagcacagtaatggcatgggctgcctgatgtggggcagtccctcttggtcagcaattcactcagcagccatctcagtgccccctgtgtaaatttgaggcactttgccaggctgtgggaacagtgtggggttaaacagcacatggtccttgccctcagaaagcttaaaatccaaagtcagatacaaggttatttaacagatgcgtgttaattaacaattaaagctaatgtgcactgttccattgaacaaacatgacttatgtggtaaaatcagaaagcagcttgatttttgtctcttactgctcttttacatttactctttttttttttttttttttgagatggagtctcgctctgtcgctaggctggagtgcagtggcacaataattggctcgctgcaacctccacctcctgagttcaagcgattctcctgcctcagcctcctgagtagctgtggttgtaggcacccaccaccacgcccaactaatttttgtatttttagtagagatggggtttcaccatgttgaccaggctggtctcgaactcctgacctcaggcgatccacccacctcggcctcccaaagtgttgagattacaggcgtgagccactgcacccagcctcttttacatttattcggtgggactagctcttgctttgcccctgaatggaatttaggcaagtcacaaggttgttccagccacccttggtctcagtctcattttaataattataatttccagtcctacctaaagataccacttcaatcttgacttggagtggagcctcttctggtgctgctaaagaacagaggcccgtggtggatggtggtctggatggggagtccctggtttccactcttcctcacttatttagctaaccagggtcctcaaccccgtcagggttgttgcctggaagagaagaggtgagaagaatatgaaaactatacgtttgtgatctccagctcaccagtggaacatggtgattcttttacagattcttgctgtaactcctctgttactcccctcaaaggccagctttttccacccctgtaggaaattcctttcctacacccaccccatttatctcatcctcatggccccatgggaatttctctgcttctgcccccacccatcatctctttcctgcccatttctcctccatcttggatgaagctaccctcttcccctggtcctggttcagcctttcatcgctgctcagtaacatgaacccccaaaaagccagccagcaaagcagagcaggcctgcctagcatagaaaatgccagaatttggagaacaaaagygcttttttggataggactgttttttgttgttgctcatacaacacagctctttgtgattaatctacatttaacatagctccaatcaaagtgataaagaaatatttttattaaaatgatttccttttatggcaaaataagcataagattgaccattttaactatttttgaatgtacaattcagtggcattaattatattcacattgttctgtaatacaaccatcaccaccatccatttccagaactttttcatcattcccaactgaaactttatacccattaaacactaactccccatttctcactgccccaggccctggtagccattaatctactctctgtatctataaatctgacaattctaggtacctctataagtggactcatacagtatttgtcgttttgtgtctggcttatttcacttagcgtgatgtccttaagttcattcatgttgtagcatgtgtctgaattttattcctttttaaggctgaatcacgattgtatgtatgtaccacattttatttatccatctgttgatgaatatttaggttgtttctaccttttagctattgtgaagaatgctgatatgcacattgggatataactatctgtttgaatcctggttttcagttttcttgggtgtatacccagaagtggaatttacttaattgttcttgaatagggaatacctctgtatggtggacaatataaaaggtacaagaagtcatagagttccctgagccccgacctccaagttcccctcccaggaagcatcactgtaaccagtttctgtgacctcttccctggagagaccatactgtacccataggcaccctctacacaggcatgatgacagccataagcactcttctacactttccctttttcctacttaacaatatttcttttttaaaaatttaaaaatctatttatttttttcttcaacttttattttaagttcaggggtacatatgccagatgtgcaggtttgttacataggtaaatgtatgccatggtggtttgctgcacagatcatcccattacctagatattaagcccagcaaatattagctgttcttcctgatgctctccctcccctaacaatatttctaaaaaaatcattccatagcaccatttaaagaatatcctcattctatttaaaaggttcatcgttttccaaagtagagacaaaacttgtttttctttctttcttttttaaaatcagtcctttattcatggacattcaggttgtttccaatgttttgccactgtgaacaatgctcggatgataacagccagcatttcctgaatgcttaccatgtgccaggcccttgttaaaatccttcccatgtatcatatttaattctcactacaactgtgacataagcacagggaggtgagtaactgtcccaaaccacatctctgtttttgtccacaggtgggagtgtaagataaccttccagataaagagttgctgctaccaaaaggtatgtccattttatttatttatttttatttttatttttttgagatggagtcttgctctgtcacctaggctggagtgcagtggcacgatctgggctcaccacaacctctgcctactgggttcgagcagttctcatggcttagcttcccaagtagctgggactacagccactacacctggctgacttttgtatttttttagtagacatggggtttcaccatgttggccagactggtcttgaactcctggcctcaagtgatccacccacctcagcctcccaaagtgctgggattacaggcgtgagccactgtacctggccaggtatgtccattttaaagttatataaatacagccaaactggctgcatcgaggctgtgcttatctgcatctcactggcaagtagatgtatgagggcccattgccctcctctctcactgttgaaaaatttcttgatatctgccgatctgaaaggtaaaaaatggtatttcattgtggtgctgatttgcattttaattttacttgtagatttttaaaataacacagttacaagattcaaaatttgaagagtacaagagtagagacaaacccccatccatgtgtctccccagtgcccagttcctgtccccaaacaaaatcaggcctccatttgcctccatttctccctcctatgcctatggtcaaaacctgggccacaccattatccttagctgctccatctctgaaatattaaattcaaacattctactctgatctcgccactgtcctattaactaccaagcacctgaccctctcttgaygccccacctgccctttaccttaccttcctttcccatccagctgaggttctctgccctccagaggctccatgtcaggcgccactgggctccagccacacctgcctggaaagccttactttctgtttcacgatacctagttcagagtcagcccacccatgggatcactctcatttaaagatcttaggcagaataaccacataatttactgctcaaaatgggacccttttgagaatgaaaggagcacaactaattatgaagccaagacaacaggggcagatagttactgtccaaggcagatcgggatgcaaattcaagctcaatcttaaggaacaattacatttaatttcggagcagagatcaataatatgtgctgagccctgcgaatgatttaagttgctgcctttgtccgctgcccaagcttctcttctaaatggattttttaaacagtgcatttccctaacactattttcttaaaactttatcctttagaataccagtttcggcccataaactcaagtgtgtaaaaaaattagtttgtttataaaattctccttcatctgtacttgagccccgctctttaaaaaggtgctgacccttaatcccagtcagttctgagtttcctttgcagtttccattttgggtttggggtggggtggagtgcagggttctagactctcagtgacctacaaagggtcctgcccttcatgtcatctatccttgtcccatctggtcctgggtcgttggtgcctgcaggttattgtggaggtcaaagtcyctctccacctcttcaagcagcctcactcagggagcttgcctggggtcctcttggcctagatacacccagcagctgttctgttccctgctctcagatccacagattgtgagggatgctgctttctctgtggggctcagtccagggagcggggattgggacctcagcctccaggacctagcaaagtcaatgtttctcaacttccctccagcctttgtccttgccctggggaattattcttggatatgagtgaggggcagggaatgccttgatctttctcatgaccattttctcccacactttggtctaggtctaggccagaagtctcttctattcccctaaggaaagaggctccttacctcttctttctgttttcacacaccttccctgcagcaatgagcatagaatggcctggctatttgaggcagggaagggagagaggtaargggagtatcaggctggagaaggcattggctaatatttcagaacataatcttgcaaggcatataaaaatatcttatacaagatgtgcttcctgttttaactattatgattttataatttttcagatcttgtaggcaagactccctattcccatcccccaggccagggcagccagttatcagctgtgtgaacttgggcaaattatgttatcctctctaagctttagttttttcgtctgtaaatgaggataatagtagttcatatcagtgcttctacttgccaagcactgctctcaatgtttcatgtatgttacctcatttaatactcatcataaacctatgggatagctgctatcattcccattttacagatgaggaaaccacttctcacagttgtaacttgcccaaagtcatgtgatctcctgctcttaatcacttccccaacctgtctttcataaatattaataatgacctcagccaggcgtggtggcttactcctgtaatcccagcactttgggaggctgaggtgggaggattgcttgagcccaggagttcaagacmagcctgggcaacatattgagacctcatctctacaaaaaattaaaaagtagcctggtatggtgtggcacctgcctatagtcccagatatttgggaggctgaggcaggagaatcgcttgagcctgggaggtcaaggctgtagtgagctgtgatagtgccactgcactctagcctaggtgacagagtgagaatgctgtctccacaataaataaataaataaatgaaatgacctcttgaggttgctgtgaggattaattgaggtaaggtatgtaaagctgtcagccctgagcctagcacatagtaaaaactcagtacattctaagctcatactttagccatgattttttggtcattttcattcaaaatgcccttggaattgtatttaaaatatatataaatgtctgaacttaagcatatttgccctattcagttttcccatccagaaatatgatgtcttattatgtgtttcttagcaaagttttgccacgtgtcctcatataaaacatgcatttctaggcgagtttatttctagatgttttagggtttttgtttttattgaaaatgaaatcttttcctccattgtatcttttgatcagacagtgctggtgtctccaggttcttattagttaatcagctcccagatgtctctagaggctatgtctttccatagccctcttattttaggttgacatgaagatcatttggcccagccagtgacatacgctctgagagagaggcacaggggcacagggtgagaagtagctttccagggtagctcaggttggctgaggtgatcagagaactgtcctttggctaaggaagtacagcctggggagaggggaaggaaggggccagcccttgcttggctgcatgctgtttctgggtccatttggggatctgtctgaagaacgagttcctaggtacccacatttcctctgtggcctcaatgattcccaatagtgtgtgccaaatgatggctccagtggcagctctgccaaggcccaagatgcctccgtgggctctagcttgcttaagtagagagactgtcatccagcaatgtctcattcttcatcatgtgattaagagcaggagatcacatgactttgggcaagttacttacaactgtgagaagtggtttcctcatctgtaaaatgggaatgatagcagctatcccataggaagtggaggatacataatctgtggcgtccctgaatcagctccctgcctgactccactgcagacctccagagggcagcagagagcaggcaagacgggagaacaggacttggttcctggagaagcaaaaaagactctctgctcctgcaagctgctaggaatactgctcatccccctccccgcctcctcaggatacacatgtgagcttcttcctgagggtgtaataattataataatattattagttaatactaactattccctgtgggccagacattgacctaaggtttcacattgattcagataaccattgaggtagatataattattattcgcattttttttcagttgaggaaattgcagtgaaaaaaaaaagaagttgtccaagatgccacagttagttgagtcaggatttggacccaatcatttatgagccaggctctattctaggtatcagagatacatcagtgaataagacaaactttctgccatattggaggaacagacaaaaagtgaacaaatgaataaacacatactgtggttttggatagaaatgccatttagacaaataaagcagagttaatgaccagagaggggcattttagatgggctggtcagggaaggttttcttgggtagatggcatttgaccaaatagttgaatacacgaggtagcaagtcaggctgaagattagggaaacagtaagtgcaaaggtcctgaggtgggaatgagcctggggtgttagaggaacagcaagacttgcgtcgtggctgctgtagagtgagccgagtccataggccacagcagcgattgggaagtagataggggtggtgaagaaagagaactcctccacagcatcacctgggcttggcctcttacaatgtctcagcttctctttaacatatctctcaccttttttcaccttcctgcagagtgctgacaccatcacagtatgttcccttctcaaccctggacatggttcagaaacagctaaagcagacaagaatctggggcagccaatattgtaccacctgccaaagcttggcacaaacaatctggaagccaaaaattgcacatactgtggtgagtactgcccagcctgtggggaacttcttgtgggtaaaggttctagataagcctgccagggcccccaaatgaatccttagtcccattaacaagggcctaagtcccgcaggcctttccagggtaggaagctgctattttcttcaaagaattttgcccccatgccatggtcctaggtcagacctacctaaatcctttcagatgtcaaacccaggtagggttcagatggcatttagccaggagatggaagggaatccgtcccagtgagcagccatcactgtccaccaggtatctgaagaaaatggaggcacagaggtcaaacagtcatccctcagcatctgcaagggattggtgccaggaccacccgtagatatcataatctgaagatgctcaagtccttcacataaaatgtgacctatgcaatcctctgtttatcttaaatcatctctagattacttcgaatacctaatacaatgtaaatgctatgtaaatagttttttatactgtattttgggagtattattttttattgttgtattgttatttatttttattttttcaaatatttttgatctgctgtttgttgactccttgggttaggaacctgtggatatagagggccaactgtactaagaatctttagctccctctcctggcagatccctggcgagtgaggtgggcctatgttgagtgctccttttgcctgagtgagagcctagaaccagagactgaatgccctaatccaggatttcttgatcatggcaccattgatagttggggtcagataatttttttgttgtgggggccatccttgtaggacgttagcagcatttctgaccactacccactagaggccagaagtactctccctccagtagtgaccttccctccagtataaccaaaatagatccagacattgccagatgtgcccaggggaagacacctgtggctgaggaacactggggccagttctttccctttccccaagaccagtgcatgagcctcagctgttaccactctggtggtgaggaagagttgacagtatcccccaagcatttacttcagtgccacagctgagtggctggcttggcatgtccttggctgtaacatggaaggaggccagaggacagggagcagagagaaaaggggtarccatatcttctctcaacattttttggcttacaaaactaaaccacagggaagggcagggatgaggttggccatacacatcacaggactaggtctttctctccctcctcatctctctctctctttcatgcacatacatgcgcacacacacgcacacacacacacacacacacaaatggacacccctctgccattctgtgtattggcttttctctctcccactgaagacaggctttttccagagacaaaagagtactttgtgcaggaggaaaaagttaacgaatggactgattttgcccaagagattggcagggcaggaataagaggttatgagtatcaatgagagaagagaggaaaggattcattatgatgtccagaccagaaggggaagtaaatgaagccatgaggagctggtatatggggagaagaggaagatgcctgaagatcaaaggtcttcatgcagttgaaaagcaggaaagaagggagtcagagcttgggaagttatccattaagagtcccaacatctgaccagaactgtcaatgtatgtttattttgcttcagcgataatttcacttagacacatagaatcgtagggcagtagagtttcaaagaaacttaagagatccttgagtccaacccagtctatgtggactcttttactaattcttcagtgctggactttgagaatgagacttgttcacaacccctctgtgcttagaatcaaatgagaaataagatatagaagtccagcagctggaactaaaataaatttatgacagctaaagctgattggagaatgtggttttgaatgtacagttgggcttcctaattctttccctcagaatgaaacttatctacccagaactggaagactcccctatcccacaacgcaagaacctgcccttcctagggcaggttgaaaagaagaggagaggagggaagcacaggccttctctgaggaggctgttcccagaaggaggaaatccagaagaacctgagtcatgacatatgcccattttatgtgctccaattctccaagcacacgaaccactcatcctctgctagatagcatgagtttagaggtagagcagtaagtggagagtacttttctcaaggctgcagcaaggacagaagttcccactttataaggtgaggcaaaagtgcttggagggagagaggtagatttccccctgacaaatgccatttaatagagcaaactctgctccaagaacactgaggcccagagaggtgatttcccaaaggtaccatggctctgaaagaataagggtctccagactcctaatggtgaaatttcaccatttcacatgtgtaatcaaaggaggacaggttcttccacatttatcagcataatagcaacaacaatcttctatttcttcatgcacaaggccttctaactccttccttcatcactatcactgcctccacatcctccatctacaccttgccacctctatctacacatcacaccctcatccacacctcaccactaccatctacacctcactaccctcacctatacctcaccacctacacctaaaccacacacctccatctagacgtcaccacctccatctagacattaccacctccatctagacctcaccaccaccatctagacctcaccaccctcacctatacctcaccacccacacctaaaccacacacctccatctagacctcactacctccatttagacctcaccacgtccatctagacctcacctcctccatctacacctcaccaccaccatctatacgtcactatcaccatctacacctcaccaccctcacctatacctcaccacctacacctaaaccacacacctccatctagacctcaccacctccttctagacatcaccacctccatctagacctcaccaccaccatctacacctcaccaccctcacctataactcaccacctacacctaaaccacacacctccatctagacctcaccacccacatctagacctcaccacctcctatacctcaccacctacacctacaccatacacctccatctagacctcaccgcctccatctagacctcactgcctccatctagacctcaccacctccatgtagacatcagcacctccatatagacctcactgccaccaccatctagacctcaccaccctcacctatacctcaccacctacacctaaaccacacacctccatctagacctcaccacccccatctagacctcaccacctccatctgacatcaccacctccatctagacctcaccaccaccatctatacctcaccaacctcacctatacctcaccacctacacttacaccatacacctccatctagacctcaccacctccatctagacctcaccaccaccatctacacctcaccaccctcacctatatctcaccacctacacctaaaccacacatctccatctagacctcaccaccaccatctacacctcaccaccctcacctgtatctcaccacctacacctaaaccacacatctccatctagacctcaccaccatctagacctcaccaccctcacctatacctcaccacctacacctacaccacactcctccatctagacctcatcacctccatctagacatcaccatcaccatctacacctcaccaccctcacctatacctcatcacctacacctatatcacacacctccatctagacctcgctacctccatctagatatcaccacctccatctacacctcacgaccaccatctacacctcaccaccctcacctatctctcaccacctatacctacgccacacacctccttctatacctcaccatcaccatctacacctcaccacccttgtccacacctcatcaccatgtatacctcatacctccatctatacttcacaccaccatacactacctcaccatctccatctccacctcacacctctgtctacaacttaccacctccatctacatctcatcacttccatgtaaacctcaccacctccattcacatatcacatttccatctacacttcaccccccatctacacctcacacttccatctacatctgatcacttccatatacacctcaccatctccaccttacaccaccgtcaatacctcagaacctccatctataccccataccaccatatacatctcaccacctctctctacatgaacctcatcatctctgtctacacctcacacctccatttacacctcacaccacctccatctacacctcaccatgtttgtttgtttgtttgtttgtttgtttgagatggagcctcgccgtgttgcccaggctggagtgcagtggcactatcttggctcactgcaacctccgcctcctgggttcaagcaattctcctgcctcagcctcctgagtagctgggattacaggcatgtaccaccacatctggctaattttgtatttttagtggagatggggtttctccatgttggtcaggctggtctcgaactcctgaactcaggtgatctgcccgcctcagcctcccaaagtgctgggattacgggcgtgagccaccacacccggccaatttactatctttatctacatttcattacctccatctacacctcacacctctatctataccccacatctccatttatacctcatcacctgcatctgtacttcataacttcacctacactttacaccttcatctacattgccaccgttttactgctacttctacaaccaacacctctgcctctatcattttctccatcattcctaccacctctccttttgtcagcagagagccagcagccatccttttggctggagtgacaggtgtgaactaggagcctacctgcatggctgtagtctagagaggtcttcaaggtctttgaggttaaaaaaaaaatgtctctagcttttggtgtcacctgatctctccgaaaaggtcaccttggagcattttacaaagattgggttagagatgcctaaaaataagtacacatgtttatgtaaactcattgaccacaagtacagactgccactatttccaagccatgccctaatctgacagctgaacatttaggtacttgcaatgtgataagatcctttatcaacatctcagcagtcctcaaagctctaacaacttaaaagttggagacattaaagtgagctgtaattttgagccaactggggtcatgccagtacataacaacaggcccacgtatctgtaggttcctggaaatgccactgcccctctctgggcctcaatttttcattatataaagtgggcaaccttgagataaggctggattcttcaagttctcttccagctctaacatccctccaagacagaatccaaaaagaatctgggttaaaaactatgcagggagataaaatagcatttcagaatcaaggctggaatataccactgccataaaaagatcaccaagttaaaattcaagaagaaatttagagcaaaggcatctgcctatgatcatggccagctctattcagaccctgctataccctggtctgtcagtcaaccaggcatccatccctgaccctgcaggagcgtccctccccccaccttggtcacatggctggccgccactgagcctcagaagtcaatctccaatgccccaaatactgttcagcctggaaaccacagagagcccttcttgccacccaacaggaacagagcaagtggttctggcctccctgggatttggatcctggtttccagagctaagaacacaaaggtaagtttgcagctggaagcttcagagaaagtagacagagctatgcagataagggaaaatgtgtttcatagcatgaacacagagtatttaagagtaagcttcacacacactgaagaggagaataccaggaaagctgggcaaatcttccaaatgagtataggatatttggttttcctttaaaaattatactgtttttatcaccctggccttgaggtttttgggtgcaaaaccactccaaaktaacagaaatgacaggaaacttgttctgtctgacaccatggtaagttagttctatcttgttctcatctaatagaactgaatctttctcttctagtacgtaaatttctgttgtctttgtcaaatgtgttagactggctgaaatacttatgaagtagcaaaaaccctgagacttacctctttcccagaaaaccatgggaaaataaattatatctgctaatgtagcatctcaggatagaaacagaataatggctagtctcctttcattacacatttttgtttttaggttttggatacggtacctggttttgctactgctagttttcttagggatatttgtttgttttgtcctttctctcctggagcatgcgtgggtgtttcagtctgcagggccccgaggcaatggacaagctaggggttgagagggtagcctttccctggcttctagcttagctttctaaagcccagcatgaccccgtgtcattcttgtcgattcagttcacaaaataatcccagataagcccttggggaagtccttttctgaaatactctgggctgtcagaagggtgcatcagacaccatgttggctggtctagagttcttagatatcaaggtcaagtggcttaaaatatggggtggaaagaaaagctccccaaaagctgaccagtgaatgtggcacaacctttttactagttaccttttttcccagagacatggatgtctaatcttaaggattcattactatgctttactcttcttccctagtaatgaaactattttgttctgttcccagtgtctagtgcaaatatctggaacaaagtggatactcaataaggatttgttggattgaattgatgtgtccttgtggatagggaaggggtgggcacctaaacaccagatgattctatcacaagggctctgatgactaaaacgtgtcatacatctttaaagctagctgtgtcaccaccwccttgctgctttgggcatgcagtctgcttgggcaaggacccctgtgtgtctgtttgctaggatagcactctgatccttggtcttacaggcttaaggtgttttgtttgtttgtttgtttttgtttttgagtgcagtggtgccatctcagctcactgcaacctctgcctcctggattcaagcaattgctgtgcctcagcctcccgagtagctaggattacaggcgtgcaccaccacactcggctaatttttgtatttttagtagagacagggtttcaccatgttggccatgctggaatcgaactcctgacctcgtgatctgcccgcctcgtcctcccaaagtgctgggattacaggcgtgagccactgcacgtggcccaagtgttgattttgtcagtagggttttggattctcagggatcccagatgtgatttcaggctagtggtaggggcaatgaaatggaaagtgacttttgactcaggacagaagagaattttgtgtgttcccttactgtaaagccatgctcaacaccaaggcgatctatgatctaaagatggatgggggaataacagtgagctagttgggcagggaagagactggtgttacaggtcctttcatttgctgcatgccagaggctgatgtgttgctagcacaattcctttggcaagatattgtagtggatgattgtactggttagtactctttggatacaagtaactcaaatcagctgaagctagttgaagagaaaagagggtttttaaaatttttttatttttttaaacatcaaatgcctttttaccaaggagggacttattataataccagggaagtcttgtggaccggagttcagccaggcctcaggaagggcctggaacccagaagtggaagactgtcagtaacccataccaggccccctctgtttctcacatctttatttctctttcgtctttctccctccttccttctcccttccttctcccttcctcctcccctcctttcctttcctttcctttccccttcccttccccttccccttcccctttccccctcccctcccctcccttcccttccttcttccttctttccttaggtttgagaatcaaaaagaatccagtttgaaccctggctccaccatggctggttctgtgatccaggacaaatcacttaactcttagtcttcatttactcatctataaaatgtgggtgaaaattatatacctcactgaattatagtgaggattcaataagatgatgaaagcaaaatacctgacattcaactaatacacattatatgaaatgctggaggtagaaattctgttgcatgaattaggctgggacttttatggtgggcagtatagttgccagtcagagcagagctaatccaaacacttccccagggccaacactcagcttcagatggatggactcctttgaagatcatctcagggagtttgggttcttctacttctgcatattcctgggagggagcttctctcaagttgtgagaagttgggatctagcacagaggacatgaagcaggaatggtcttagctagtccagaactggaaggtatgcatctacctgaatattatagctacattatagctccatacttctatagtttgtagagttctcatctgtgtttgcatatgtattgtcatttgtcagtgacaagcaggcatttcattatttttccaacaaactttcttttccaatctgagaatccatagtacttcaaataggaaataacacattttaaaatcatgttggaaagctctatttcattttcattagtcaggcacttgtgattgcaaacatgagaagcccaactcaaacatgagaaaaaataaagtgaatttaacagctcaacacaactgagaaggacagttcaaaattaactgactcagggagtcacagtgttatctggactctgtttctctacttttcttgaatgcttccctccatgtgacaggcaaaatagtaacttccaagcttatcagcttagcagtgccagagtgagcagagtttttggatgaatcaagcagaaatgtcctgggaagaattctgattggcccagttaaggacatgggatcattcctgaaccagtctctgtggctggaatggggtgtgtttgaccagcctgggtcacatggcctttccttcagaggcttggggagacatggagtctccccctaagacatttgaaggtggttgtctatgggaaaaaaaatctgttactcagcttctctgtactcttcacaccatactggagtaggaagatatcagctttttaaaaatcaccaactgacccaatttaataaaaaatataaattgggagttactttcttaaaatagaggttttaaatgtggtccctggatcagcatcatcagcagcaactgggaacttgttggaaatgtacatttccaggccccaacctagagctatggaatcaggcactctggggatgagacccagcaatctattttaacaagctttctggagctgctcacacgtgtaatcccacctactttggagactgagatggaaggattgcttgagcccagaggttggaggctgcagtaagctgtgattgcgccattgaactccagcctgggcgacaaagcgagaccccaactccaagaaaacaaacagaaagcagccttctaggtattatgatgcacgctcaagtttgagaaccactgccttaaagggttctttgttgtgtaattctgctaagtattttaaacatgattcactttgaacaaatagatttaaccattaattttcaaggatacaattatcacataaagtaggaacacatggcatattaaattatttactttaaaacgtttaaaataaaaaagctataatttaaaaatcaattaacacatgtaagagctttccataaaaagcaatggaactccattccagcttcctccatatgccacagttccacttcccaaagataaccactaggaattcttttagctttttctcctggctaccttttaataataatgatagtaataattattcctgctatttattgaagttagatattagccacttacaagtgaatatttaactatcttacaaccacagacatctcttttttatcctcccaatgtagaatatcatcaccatttttagttcattcaaaaatcagtgtttatactcatgattacatgccatgatcacattttattccttgcagagttttaatttttccctggtatttctcattgctgtcttttttctttgcattttctgtcactttcttgagttgttctaaaatccccaagagtgtatcaaatcttttacatttcattttttccctgagtggctcgttccaaagcctcattttctagctcttttgaggactgattgatttttgaggacacagctgtcatctggggactgctcttcattattctgattttatccactctctcctgcatctcattgtcttctccttcttgattaatgatgggtaacttttttaaagaacttcctaggaagttatgaaagagaagtaaaatgattttttacatgtctggaaatgtcttctacccctactctggactggtagtttggctgggtggagaatgttaggttggaaacattctcccttggattttgggtggctttgctcattatcttctctctctcttttttttgagacagagtctcactctgtcacctaggtggaatgcagtggcacaatctcagctcactgcaacctccacctcctgggttcaaatgattgtcgtgtctcagcctcccaagtagctgggattacaagcatgtgccaccacacccggctaagttttgtatttttaataagagacggggattcaccatgttggccaggctggtcttgaactcctgacctcaggtgatccacccgccttagcctcccaaagtgctgggattacaggtgtgagacaccgcaccctgcccattatcttctcttatttaacttgctgaggaggagtcttctgctagtctgatttctattcattgacaggtgacctgtttctgattgttttactctagaagtttttgggatctttcttttcttcatagtcactgttctaaaatttcataatgatctagcaaagtgtgaggagtttttttcccagatattttctgtgcagagtgctcagttgacccattttgcctgagactattatctcatagtgttggggagacctcttagttatttttaaaaatacttttaaaaatttaataataaaatacctcaaatgtgtacaatatgacaaatattgatatattactgtccagaattaacagatgttaacattttatcatattcgtttcatatctacatgtatatctatcatctatccaaaataccaaagatcatcaagcatcattaaccttatccttccccagaagtaacctgaagttggtgtgtatcattcctctacataattttatgattttattacttataaatgtaactataatcaatattggtagtgttttgtttgttttaaagttttatgtaaataatatcattttcttttacaacttccttttgttctcattatgtttttgagatttatacatgttaatacataaaaatctagttcattaatttcaactgtccatagtcatccattatgtgtcagttaggaaggcctcagctaaaagtaacataaaacttggctagcagtttaaatatagagattttttttttttttcagataacaggaaatccagcaataagcagtccagagctcagtgatattctcaggaacccagatttgtcttatccttctgccttgttcttagcctgtgcctttggtcttcatacctgtcacctcattgttgcaagatggctgctttatctcaaagtctcaaggtccgtgcaagaaagcaggagggtaaaggacaaactgtgcattccaactgtgtcactttcaattaggaaaataaaagctttcctgaaagtcttacccaatggacttccacctaaatctcattggctagaatagggtcacatgactattcctaaactcagtgactggctaagggcaaccagaataccgtgaatggtttatatagatcccagctcatgcctgagcctagggaaggtgactactggcaatcaagggccctgtgtctctacctgaacaaaataaagttttgtaaataggcaagcagaagagggaatggttgttggacagtgtaggagacatgctagatgactacccaatgcgcattctccctttttcccttactgacagactcaatattattttcccagtaaaaacttactttcccagagtcctttgtcagatgacccaggtgtggttttcagtaaccacatctgggtcacctttgtcaacacataatttttagtagaagtatatcccaaatattgtgctgaacatatactcaaagttatttgttgttatctgaaattcaaatttaactgggcaaactgtagtttcatttgctaaacctggcaactctatccaggaaggaagaagaaggaaaagtgaagaggctttcttctgaaaatgctttatctaggaagggactccttcctcaggttctttctcctgtagctcttcagccagagagagctgaagggtgtctgagggaagtgtttctttttagttggccatagtgctactgtggctggagcagaagtcagaaagtcagagcagaaaggggaatgggcatcagggaagtaactagcagcatcctccacaggtgttttatactccccaaatagttacatccagtggtgatattcaaaatatttaacaaccaacatggcactgacattgaccaacccaaatgaatacctgatcactaaaaatggacaccaatcataaatagcagccataccaatgcgtatcggtggaatatcaaccctgtttctattgctgttttcaggaaaattaacactcacttgatttattatgactgtgtaaatattgctcacagttgagtatagtgtaccatgattacttttcctttctatgactattcttgacaaagtttttgtatcctcttgcaacagtcaaacacatcaagaccatttttcagatccaggtttttttcctgaagacatcctgtccagagcctgctctaagatgtgcctgttgctctctggactgctgcagggttcttctccggtgactttcctttgcctatcttttgtggtgaatcccgtttcccagacttaatttctttcttagtgcaagtccttcatcttgctagagttcctccttcagtcacttcctgaaaaaaaggtgcatcgaaggtaaatttttgagatagtttatgtctgaaaatgcccctattctaccctcccacttgattgatagcttgattgggactggaattctaggttggaaataattttgtctcacttttggaagcatgacttcattgtcttgtagcttccactgtagtgattgagaaatctgatatcaattcttgtttcrgattcttggtagatgacttatttttttctggaagcttttaagatttctttatccatgaagtcctaatgcttcataatgatgtgacttggagtggattttttaaaaattaattttttctgagctgatcgaaagttctttcaatcagaaaattcttccagatctttcagttctggaaggtattctcatgttatttcattggtaattttctctccactatttttttatctctcttttgggaactcctattattttgatgtttgggcctcctggattgatcctctggttttcttgttttgtcatagtatttgtttaatctctttttatttgtgttctattatctgatatactccttcaaatttatgttccaagtcttttattgaaaattttcttctaaggtatttttaatttcgaaaagttctgtcttattctttaaaaacttataggttcataggtttatagcattctgcttttcttgtcgtcatgaatacaatgtcttttcttgtctctgttgtgatttcctctaatttggtcttgagagctgtctctggagagtagccagaaaccaagatagccactttctaggagagctctaaccaggaggagagtaaggtttagatggtcaggtgagaccaaatgaaaccaaaatgcataaaacagaagaaatttattatttacagatctcaaagaggttaggggtggctgatgggaagtcaagacgcagtaggatgttcaatcagtgaatggggagagagagagagagaaaaagagagagaatgcactatattgcaaacaatcatatagggaggggaagttttaactaggccaaaggagtacaactaattgggtttcaaacaacttatgtcaggccaaaaactggatgccaagaaagcaactatattaaacaaacctatgacaatctccttgaagatattaactatctttgtttttgtctttgttttgtaatctttgtacaggggtcatgcttatcttttattattccagttttagtatatgtgctactaaagcgagcaccagctacatagttttttaaagaacctaaatgttttaaaatatatatttagggagtacaaattcaggtttcttacatgcatatatttcattgtggtgaagtttgagtttagtgtactcatcacccgaatagtgaacagtgtagcaataggtcacttttcaaccctcacccccttcctaccctcctaccttttggagtctccagtgtctgttatttcactctacatgtccatgtgtacgaattgttagctcccacttataagtgagaacatacagaatttgtctttctgtttctgagttatttcactgagggtaatggcctccagtttcatccatgttgatgcaaaagacatgatttcattttctatgactgattagcattccattatatatatataatgtaatgtatatattacatttccttatccaatcctccattgattacacttaggttgattccatatctttgctattgtgaatagtgctgcaataaacatacaagtgctggtatcttttttaatataatgattcttttcctttgggcatataccagcagtgggattgctgaatcaaatggtagttttatttttagttctttgagaatcctccatactgttttccataaaggttgtactaatttacattcccaccgacagtgcatgttttctctgcggcctcgccaacatctgttatttttggacacttttttttttttttgtgagacagagtctcactctgtcgcccaggctggagtgcagtggcacaatctcggtctgcaacctctgccttctgggttcaagtgattcttgtgcctcagcctcctgagtatctgggattacaggcatgcaccaccacacctggctaatttttgtatttttagtagatacggggtttcaccatgttagccaagctggtcttgaactcctgacctcaggccatcccccccacctctgcctcccaaagtgctgggattacaggcatgagccacctcgccaggcctagactttttaataatagccattctggctggtgtaagatggtatctcattgtggttttaatttgcatttctctgatgattagcaatattgagcattttttacatgtttgttggccatttatgtgtcttcttttgtcaaatatctgttcatgtcctttgcccactttttaatggggttatttgtttttttctttttgagttgtttgaattcctcacagattctagatattagctctttgtcacatgcgcagtgtgcaatatttttttttcattctgtaggttgtctgtttactttgttcattgtttattttgctgtgtagaagctttttagtttaattaagtgccatttgtctatttttgcttttgtgacatttgctactacatagttttaatggtttctttggctgcctacattgctcctgtttccttggactttttcttttcctgtttgttttggtatctgtcattctggtgattcttggctggctgttcatgttttgaagtggagctgccaaacagctgccatgtggccaggctggacttgttgaatgatagacttacagtgggcaattggatgcagcccttgccattttgtcagaggtccccaaaatgttggaatctggaagttctccaatgtcctgcctggagggcctaaacttcattagggttctaggagtccagcaggcaaagggctgaggggctaactgcatttacttaactcctttttgtttccccagtgaaattactcctttttgccctcagctgtccagggatcttctgtcctggctttagtctcctacagggcccctccatattctgagtagaaagggcattataggagactrgagcctagaggagagacctgaggatttaacctcagaactccttatgaagattttccaccatctcccctgtgttcagcccgctctgcatcatggtcttgagatatccctattgcctctgatgtcctatttctatctttgagaaacattttgtatatgtagaggctgtctaatccttgaaggttcagataaaacatttaaaaaaaaaactatctgttcctggtgtttatttttctttgcattatagaaaaattttcaaacacaacaaaagtaaaataaatgatgatgaccctgttaacttaaagatcacatgatctatgcatttggagagaagactttatttcttgtaaagggttacagcctgcaaggtggccatgttacaggatgggaaccatagcctcagggttagatcagagacaggcacttcgaaggaggaggggaaaggcaggaatttaagttgactgggttggctaaacatgcatattcagtaggttacaggaggatctatgaatattcatgaaggtggtcctgatgcatgtgtattgaacaaacatgcatattacrcatgcccatgttcaccttgggatggagccataacatttaaatgtattacattaggcattatacgttagaaggtctttgtaggacacaaatgcgttcaagtgcacagcctctgtaaactgaccagaaccagtccatggttcatgatcttcttatcaggagggagttactaaastcagtcttttgtccaatcaaagctatagttatggcttatggagcagggggttggttagtcagcatctgctggtagatgtgctgcaaattgttctaatattgcttgtctcaaggccagtgcttgcttagctgctagaggaaaagaaaaaccgtgtggcagttaggacacagtttattcttcaagtgtaggcgtgtataacttaacccttgcctggcctggctttaggtcttgtttacagtttggtaccttattgccataaagggtctgttctgtcagtcttattctcaattttaacataaatgctggtcagttatgtctacactgcaaaagggagatgatataaccaggtgtgtctgacctcctatcctgtcttggccaggattttggtttttaatgtatctctgggatccccttggccaagagggagtctgttcagttggtggggaggcttaggattttatttttagtttacaactctttyttttttttttttttttttttttwacaactcttttgtagcataacctagcttcaataattatcaatacatgactgattgtggtgtctttcctacaatcattttaattgttattggttaatttaggttttctaatttttttaaaagtcaattttgatacttctattgtttttgtagagaagtatccatgtattagccttgtggctgagggctatagttccagaaacagattgtccagatttgtttttccatgtgggtagtcatttaagctctctgtgtctgggtttcctcatttgtaaaatgggaataataatgttatttatgtcataggattgttgataagattcaattaaatcatacatgcaaagcacttctggcacatagcaatgttaactattcttattatttaagttttaaaattaattggcatgaattttttaatggaattataatttttaaattctcaactatattttatgtccctttttcagtcctagtgttgtttacttaaaaacaaaagcatagattgcttttgttttttctttttcgtagagatagagtctcactctgtcacccaggctgtaatgcagtggcacaatcattatggctcactgcagcctcaaacttctgggcttgtatgattctcccgcctcagcctcccaagtagcttagcactacagcacaccatcacacctggcgcatatatatatgcataatatattacttttatatatattattatataagcataataaatttacttttcagaggcttttctgtgacgtagtatatgtgctctctttgtaaatgtgtcatttgtacttgaaaaagaagtgtgttctctgcttgttggaaattattcttcaatttgtttatatgtccttttttttttttttttttcttttcgtaagacagagtcttgctctgttcccccggctggtatgcagtggtgcaatctcagctcattgcaacctccacctcccgggttcaagagattctcttgcctcagccttcctagcagctgggattataggtgaatgccaccacatctggctaatttttgtatttttattagagatgcagtttcactgtattggccaggctggtctcgaactcctgacctcaggtgatccacccgcctcagcctcccaaagtgctgggattacaggtgtgagccactgcacccagttatatgtccttttgtcttagttttttatctgtattaaaatctcccattatgactgtggatttgaccatttctccttgaaatcctaccctttttaatgtatacattttgaggctgtgttccttttactttatagtcatgaaggtgaaggaggagaaggctggggtaggaaagctggaccacactaaccacaggaggagatttccggatcagaaaggtgaggtcactttgaggacttgatgcaaatctcaggaggcactgagaattctctgaatgtctttatgacagctctttcagcaggagagtctagggagcaggtcccttttcctgactcatccacagtgtctccttgaggctggtgggaccagccttcatggtatccccaggtgactgcatggtcaagctggagacaggaaactgccactttgcctatgtggattagaatatagcttccccaacacaaaatgtaactcacctaattttacaagatctgcaaaccataataaatgccaaatatcaacattttatattaatagattcccaaactgacagcacaattaaaaccagtgcaagaggatgttgaggtggcaggtatttctgttgctccagaattgctgactttagctgcccaaagcctcctacacactacagagaagaagccatggggcttatgaaaaggcaatcagatgggcggctactgccatcgttaccccagccccacttgaaggaaaataccaacctcgctgcccacctagaggctcggtgagctgcagaatgtgtagagccactctggagctgtcaagcaagaaaaatgccctaaagagttgctaggagaacttggcacatgtcctgagccaaactgcaagatacttaccgtgagaggagaggtcttgtagagccacagaggagaatgtagacttgggggagggcaagccactccccacagttcaccagctaaatcaccatgctcttttgattatgatagaagccaagaaaaratgggacaatttagattcagaacagaaagtaaaatagttttttgacagccatctcctctgatttctataataaatatactcttcctgtgtatagtcccttacaatttgcataatcatgttcttatacatgatcccattctatcttttcagaagccagtttggtagagaaaggattttcattcccacattacagatgagttcaccgagtcccagagaagcaggatggccacagatcaagtaaaggacaagccagggagcacctagggcagctgcctcttgggttggggcctttctgatatacctgcttcttttcatttccattcctggcctcaagggtggagaataggaacttgctgttggaagacccaaatatrctaagcccttagagtggaactacttacctctaagtgctagtgtctactgcttatctcaaattgcagcttgcttaaacaatgcagtatagggaagggaagttccaccatgatgtggggaggtgagaggaggaagaagggaaactagtcattctgacacccgtgccctaggaagtgaggccatacttcataagaatctccacttcgttttcttcatccctgttacatccaggagagaatgggatccagaagagcatgcagtggggtgagctgggactttagacagatttggacactgacatccaagtaacctgacccctagtacctaggaatgcaccaaccagagtagactcataaaacatctgtctaaagcatattcaacatctctctaaagcatattcaacttctctctaaaaggcttagacatgcttctccatagttcagctgagaaacagtatagcgttatttgaaagtggacatagattagttctaactgtatattgcaaagtctagggcaaacactagaattttttaagggatataatttatacactcagagatgagagaaaacagaatcatataaagtgctcagttaaaaccagaggaggagctgggcatagtggcatgtgcctatagtccaagctacccaggagacagaggcaggaggattgtttgaggctaggagtttgaggccagcctgggcaacacagcaagaccctgtttcttaaaaaaaaaaaaaaaaagaccaaaaagggggaagattaaaaaaaaaaaaaggacaagtgccacaaacacaaaattgttgtaaacatggtagatattaatycactgatctcaataatcactttatttatttatttagagatgaagtgttgctctgtcactcaggctggagtgcagtggtgcatcttagctcactgcaacctctgcctcccaggttcaggcaattctcatgcctcagcctcccgagtagctgggactataggtgcccaccaccacgctggtttattttttatatttttagtagagatgagatttcgccatgttggccaagctggtcttgaactcctggcctcaagtgatccactcacctcagcctcccaaagtgctgagattacaggcatgagccactgcacccagccaataattacttcaaatatgaatggtctaaacatatcaattaaaaggcagaggatgttaggcaggatcaaaaaacaagacccaactatgtgacaagaaacctacattaaatataaagacacaggccaggtgcgatggctcacacctgtaatccccatactttgggaggctgagattggaagatcacttgaggtcaagagtttgagaccagcctggccaacatggtgaaaccctgtctctactacaaatacataaattagccaggcatggtggcatgcacctgtaatcccaactactcgggaggctgagtcaggaaatcagttgaacccagcaggtggaggctgcacagagcaagactctgtctcaaaaaaaatgcatatacacacacacacacacacacacacacacatatacacacacacatatagagatatagatagataggtatagatatagatacagatggattagaagtaaagggagggaggaagatataccatgataacactaatcaaaagaaagcaagaataggtatcttaatttcagacaaagaagaattaagagcaaagaacatctctttaacagggataagggagggcattgcatcatgataaaagggtcaattcttcaggaaaacataatagtccttaacatgtatgtacctaacagcagagcatcaaaatacatgaggcaaaaaaatgacaaaactgaagacgaacagacaaatcagtgattatagttgtggacttcaatacccatctaccagtaattgacagatccggcaggcagaaaatcagtaacgatatagttgaaaggaacagcatataaatcacctggatttaattgacatttatagaatacttcgtccaacaatagcagaatgcacattcttctcaagctcatgtagaatatccaccaagacagaccacattctgggacataaaacacacctgaacaaatttaaaggaacagaagtcatgcagagtatgctgtaacaccacattggaattaaactaaaaatcaataacagaaagattactggaaaatcccaacatatttagagattaaacaatacacttctaaataatatatgagtagtcaaagaagaagtcttaagaaaattttaaaaatattttggactaaatgaaaatgaaaattcaacttatcaaaatttgtgggatgcagcaaaagcagtgcttagaggaaaatgaataacattaaatgcatatattagaaaagaagaaagatctaaaagcaacaacctaagctcccatattaggaaacaagagaaggaattgcaaaataatcctaaagcaagaagaaaaaagggataataccaaatagagcagaaatcagtgaaattagaaataggaaacaatagagaaaatcaatgaaactgaagctatctcttaaaaagattaataaaattgatgaatctttagccaggctaaccaaggaaaaaagrgagaagacatacattaatatcagaaatgaaaggtgatcattattgattccatggacattaaaaggataataaaggaatattatgagcaactctgtgcctacaaatttgataacttaggtgaaatggactaatttattgaaagacacaaactactaaaactcacacaggagaaataaataatttgaacaggcctattactattaaagaagtaatagataataataattaacaacttaccaaaaaaaaaaaaagagcaacaggccttcatgatttcactagtgaattctaccaaacatttaaggaagaaaggatatcagttgtctacaatctcttccagaaaatagaagcagaaggaatgctttctaactaatcccatgaagtcagcattatcccaatacaaaatgagataaaggcatgacaagaagaaaaactacacaccaatgtcccttatgaatatatatgcaaaaatcctcaacaaaatgctagcagatcaaattcaacaatgtgtaaaaataattatacaccatgacccaaaaggatttatcccaggtatttaaggctggtttagtattcaaaagtcaattaagataattcatcatatcaataggccaaagragaaaaatcacacaataatgtcaatagatgcagaaaaagcatttgacaaaatccaacacctattcataataaaaacttgcagtaaactaggaatagagggaaatttcctcaacttgatttttaaaaaatctacaaaaaacctatagctaacatcatacttaatgatgagaaactgaaaactttcctgctaagatcaggaacaaagcaaagagatcccctttcaccagcccttttcaatatcatactggaaattctagctaatgcaataagacaaggaaaggaaataaatgtatatagtttgggaaagaagaaataaaacatctttgttcacagatgatataactgtctatgcagaaaatcccaaagaatttaccaaacaactcccataactaataagtgactgtaacaaggtctcaggatgtaaagtcttaggatacaaaagacagttgcttttctatataccagccattggaatttgaaatttaagacatgatacactagcaccaaaarttttagacataaatctaacaaaatgtatacaggatctacatgagaaaaactataaaagtaatgaaagaaatcaaagatctaagtaaatgaaaaaatattttggccaggcacggtggctcatgcctgtaatcccagcactttgggaggccgaggcaggcagatcacgaggtcaggagatgaagaccatcctggctaacacggtgaaaccccgtctctactaaaaaaatacaaaaaaaaaaattagccgggcgtggtggtgggcacctgtagtcccagttactcaggaccctgaggcaggagaatggcgtgaacccgggaggcagagcttgcagtgagctgagatggcgccactacacttcagcctgggtgacagagtgagactctgtctcaaaaaaaaaaaaaaaaatttcatgttcatgcgtaggaaaattcaacattgttgtcagttctccccaacttgatctatagatgcaatataatcccaataaaaatcttagcaagttatttttttggatgctgacatattgattctaaagtgtatatggtaaggcaaaagacccagaatagacaacataacactgaaaaagtacaaagttgaagaactgacactactcaacttcaaracttactgtaaagctactacaatcaagtgtgatattgtcaaaagaacagacaaattgatcagtggaacagaataaatagcccagaaatggacccacacaaatataatcagctgatctttgacaaagacacaaaggcaatttaatggaagaagaataatattttcagcaaatggtgatggaataactggacattcatatgtttaaaaaaaaaaatgaatccaggccaggtgtaatggctcatgcctgtaatcccagcactttgggaggccaaggcgggaggattgtttgagcccaggagttcaagaccagcctgggcaacatagagattttgagactactaaaaattaaaaaaaaaaaaatagctgggtgtggtgatgcatgcctgtgatctcagctattctggaggctgaggtgggaggattgcttgagcacaggaggtcaaagcttcagtgagccatgatcataccactgcactccagtctggatgacagagtaagactctgtctcaaaaaaaaaaaaaattcagacatagtccttacacctttcaaaaaatcatctcagagtggatcttaaacctaaatgtataatgcaaaactacaaaacttctagaagataacatatgagaaaatctaggtgaccttaggtctggtgatgagtttttagatacaaccctaaaagcacaattgatgaaaaaaaaaaaatgataagctggactctgttaaaattgaaaacttctgctctgtgaaagacatttaagagaatgaaaagaaaacccacagaccaggagaaaatatttgcaaaaggcatgtatctgataaaagacttgcatctgaaaataccaaaagaacttttaaaactcaataaggaaacaacccaatttaataatggacaaaagatatgagcaaacacctcatcaaagaagatatacagatggcaaataagcatataaaaagattctaaatgtcatatgtcagttgggaatttaaaattaaaacaataagatccactaacacctattagaatggctattttttaaaaaactgccaataccaaatgctgatgaggatgcaaagcaataggaaatgctcttccattgctggtgggaatgcaaacgatataaccactttggaagatggtatggcagtttcttacaaagctgatcatagtcttgtcgtccgaaccagcgatcatgttcctaggtatgtacccaactgagttgaaaattatgttcacatagaagcctacatatgaatgtttagagctgcactattcattatcaccaaaactggaggccaccaagatgtccttcaataggagaatggatgaacaaactacagtacattgatcggtggaatattgttcagagatagaaagaaatgaggtcatcagcaaagcctgagtcctttcctctcactctcctccccggacagcatgagcttcaccactcgttccaccttctcctccaactactggtccctgggctctgtccagccacccagctacggcgcctggctggtcagcagtgtggccagtgtctatgcaggtgccgggggctctggttcctggatctctgtgtcctgctccaccagcttccagggtggcatggggtctgggggcctggccatggggatggctgggggtctggccagaatgagaggcatccagaacgagaaagagatcatgcaaagcctgaacgacctcctggcctcctacctggacagtgaggagcctggagactgataacaggaagctggagagcaaaatccgggagcacctggagaagaagggaccccaggtcagagactggagccattacttcaagaccattgaggacatgagcgctcagatcttcgcaaatactgtggacaatgcccacattgtgcagatcgacagtgcccatcttgctgccaatgactttagagtcaactatgagacagagctggccatgcgctagtctgtagagagcgacatccgtgggctccacaaggtcattgatgacaccagtgtcactcggctgtagctggagacagagatcgaggctctcgaggagctgctcttcatgaagaagaaccacgaagaggaagtaaaagacctacaagcccagattaccagctctgggttgaccatggaggtacatgtccccaaatcttaggacgttgataagatcatggcagacatctgggcccaatatgattagctgcctcagaagagccgagaggagccagacaagtactgctctcagcagatggaggagagcaccacagtggtcaccatgcagtctgccaaggttggagctgctgagatgatgctcatgaaactgagacgtacagtccagtccttggagattgacctggactccatgagaaatctgaaggtcagcttgggaaacagcctgagggaggtggaggcccactacaccctgcagatggagcagctcaatgggatcctgctgcacctggaatcagagctggcacagacccaggcagagggacagtgccaggcccaggagtacaaggccctgctgaacatcaagctcaagctggaggctgagatcaccacctaccactgcctgctggaagatggcaaggacttcaatcttggtgatgccctggacagcagcaactccatgcaaatcatccaaaagaacactacccactggatagtggatggcaaagtggtgtctgagaataatgacaccaaagttctgagacattaagccagcagaagcagggtaccctttggggagcaggaggccaataaaaagttcagaggttaaaaaaaaaaaaaagaaatgaactatcaaaccttgaaaacacatggaggaagcttaaatgtatattgctagttgaaagagccaatatgaaaaggcttcataatatatgattcctgtaagagtgaaagaaaggaaagaaacacgaaaagtggctcggcagtcaaagacagttttactttggagaataaacctgagaggggtttctggccgatttgggtcagaagcgctctctcttacagactaagactatttattttagggtaagagaacttaccacaagcttggaatgtttctgtttggggaagaagttttggtggtgttggaatgtctctggtcagagaggcagttatcctggggctaacatctctctggccagaggggaggttatctcagggctggcatgtctctggtcagggaggggttttgaatgtttctagttggagatgttatttgtggcttatggtcatgctcaccttagccattaggctgatgccctttggatttaggtggtttttgatcaaggtgaactttagaatggcagtgcttgtccaacaagatggcaatgctcctgctctgtcaattccaactctgtgatattttggaaaaggcaaaattgtagagatagtaagtaaaaagggggttggagccaggcacggtggctcacgcctataataccggcactttgggaggccaaggcgggtggatcacaaggtcaggagttcgagaccagcctggctaacatggcgaaaccctgtttctactaaagatacaaaaaattagccaggcatggtggtgcgtgcctgtaatcccagctacttgggaggctgaggcaggagaattgcttgaacctgggaaggggaggttgcagtgagccaagattgtgccactgcattccagcctgggcgacagggcaagactccgtctcaaaaaaaaaaaaaaaaaaaaaggaaagaaaagggagttggagggaggaaggggtgggatgaagaggtgaaatacaggatatttagagtagtgaagctattctatatgatatataattgtagatgtatgtccttatgcatttgtcaaaacccatagaagtatctatacaatagaagagtaaactttaatgtaaactatatagttaataataatgtgtcagtattggctcattaattataacaaatgcaccacactaatgtaagatgttaataatagggaaagctgtaggggcagaggtaggattagggtcgaggtaggtatattgaactctgtgtgctgtctgctcaataattctgtaaatcttaaactgtcctaaaaatctattaattattttaaaaattgttgacttaagacaacactgatgttaaactgatagcaatgtcctatctgagaggtgagggaattccagctacctctgtgtgctttgcccattaccctgggtttcaatagtaatcaggcttattagtgggattctgaattagggctcttggtaactttagttcttagaaattttagtttacaaagccagctttgtgaaaccctcaataactcacttttctgataagtagtctatgtagtccttgattgttagtaaaaatggctctcagtagaaatgcatatgactttctcataacaatcaaagagggcacttggcattttgaactacatctgtgacccactgagggactttccccttaaccacgtgtcataagccatatccagtaatcactgttccggacaagcaagaacgggggaatgggagttctgctcattctaacagaattctaattatagcactgagggtattccctccagcaactgttgatttggttcattaatggaacttggtcaaacccaagcctcagggcaatgaccccatcctggcactccatgtcttccattttgsttctgcagcccaatctctttgtaactgatgaatattatgaaaaaatgccaattttcagtaaccctgcctccsctgtcttttgtgccgtgtccacagaatgccctcctatccacattgggcttccagtacccacttaccctcaaagaaaaactgaccagaagggacatctttcaggcctgcaaaaagtccactggggcctgcggccagaccagccacagcaggaactgactggcccagggagtggggcaagcagccaggacagcagcatggatcttatcagcaggactcgtgagttccttgaggggtacattctggggagcyatcctgctggtgtgtccagatgggacccagcagggcaggggggattttctggagaatgtgggtaacgctccacatggctcagcctaacctctctggccccctctgctctgcttccattgttggccaaccttcctgctcactgacacttttggtcagactgacaccctgtctttctctggggactttgagacctcgactctgatccattctatgttgatttcatggtttgattctcagaattatttccctcatttccaaattccaaggaccatacggtcattgccctaagaaccaataatggacatgcggccgggcgcggtggctcacgcctgtaatcccagcactttgggaggccgaggtgggcggatcacgaggtcaggagatcgagaccatcccggctaaaacggtgaaaccccgtctctactaaaaatacaaaaaattagccgggcgtagtggcgggtgcctgtagtcccagctacttgggaggctgaggcaggagaatggcgtgaacccgggaggcggagcttgcagtgagccgagatcccgccactgcactccagcctgggcgacagagcgagactccgtctcaaaaaaaaaaaaaaaataataataatggacatgcttgttttgtatgaggcattgtgctcagtaaattgaagttcttgttacattagctccaccctctctcctcactggagctgaaagacctggtacagaattgtgtagtcaccctgcacggtagcttgcaagacacctaggaagctttcttccaggacaacaaagcccccaggccttcctctgctccttcagaaaatagttctgggctaattaaaaatcagtcttttgctctttcctatggaaagaaaatgatcaatcttaagaggagtaaaaaggactggaatccttagagcacaaatgtgacattttactgtgactttactgatgtttctggggacgtgatttcactctcagcatatcccaaacctgcctaataaacagtatgaatttggtttctactatatatagctcactgtcttgagtgtggaaaagttggtttattataccatctataccttccaaggagtgtcagaggcagtgactgcatcttagtatcctggcaggagacctgatgcacctgctctcacaggccatgggagctacccccaaccctgcagagccctctacaacccccatcattggcattaggttgaccagggcctgtggcttttacagagtaaatgtgcctttgtaggagatggggtaatggtaaatcctttggaggagtccagtgtaagagatgggctatagttaaaatacaacacacacacacacacacacgcacacacacaccacatgcacaggcatacacagacacacaccacacacacacaaaaaaacacttccacatgcacacacacacacacacacacacacacacagtcctgctcaggagtgggaacatcagagaccaagaggaaagcaagcctgctgggaagacctcttgcccccgtgtgggttctggatgcctcacacatactgacatggtctctgagatgttcccctgtcacctcaccacctctcctacattcaggattgaggtcgtccttggaaggtggagtctgctgggtccttcctgagccagagaagaagaaagcagtttagatttggtgccctctgctcaaagagtttagaagaggtgacatagaacatcacagaagtagttatagatggtggatttgacattgctttggtggtgtcttgttcagttaagtggacactgattttaaatgcaaaccaaaggaaaaagaatgtagaacgctttggcatatatatatttttgagacgcagtctcattctgttgcccaggctagagttaagtggcgcgatctcggctcactacaacctctgcctcccaggttcaagtgattctcgtgcctcagcctcgcgagtagctgggattacaggcacgtaccaccacgcccagctaatttttgtatttttagtagaaacagggtttcaccatgttgggcaggctggtctcgaactcctgacatcaagtgatctacctgcttcagcctcccaaagtgctgggattacaggcatgagccaccacgtccagcccttttggcatatttgtaccaaatatattggtgcatttccttcaccgtctgctcttcctatactatgtgtgtgtgttactggcttgttcccgacagggctgtggagtaggaaagggagaatgggagagcctaggaggacagggaattgtaggccatgtctcataagctggagtaaagtaaaaaccccttttaaagggaaaataaagtcttgtgtacccatgaaaatgcatttgtatatttgtagggccccaggaagccacatattccaatttgagaaataatctaactaattagggttttattccataaaaatatcttccaattatgaattataacccaaattttgctgttccatctaataaaaggaatatttttaagattatcaaaatggaagcaaaatttaaaagttcaagtaaaacctttctacccctgagaatacattccagaccccagttccagacactccggtttaaggaagccacaaagcctggtaacaaagtcaccaaccacagtgatttttctgcagcccatgggcattgagttggtttctgctgttcttcacggagtggaagtctcaaccctcagtctttcacttctaagcaaaatgggcattgtatgtgtgatacagatataaaccttgctcttgccacatctcagggatagtgccaatgccctgcagaagtcaaaataaaacagcgccagaatcattttacctgcctcatctggataattgtctgaatctcccacttctctttgctgtaggacacctgaccacatatgtttttcctctctgagtgtcctgtctgttctgtaaatccatccagacacctaggcagggggcccagctggtctggctgcatagcccagcaggaactcccacttcagagaacaggggcatcctgcagagtatgaggggcctgggccaggcagggtggctagatgtgtctgggcctgagggtcaggcacactatgcagatggaggattgagcagagaccccttcagttcctgccttacagaataatggcaaagatccaataagacagtatatgtgaaggggcttggtacctgtgaaagccccctgagaatgatagttcaatatcatttttaactaaatgtataatattaataatcataactataaagttgaaacaaaggccaggtagctgacttttattccttccacagagacccacgagggtggctttaatatatgctgcaaggttcctaacctccaggacagttttgaaatacacaatccagctgcctgacgtgttagrtgtgaatggggcttgggtgtctgtacttttctattaagttccagtgtacctggttaaaaaatacactatcctaaagaaatttgatgcttccttgaaccacatttagcttacagaaccctgtgaagtccctgctttaactctagttgaggcccaagtaactgctggtcctcattcccacagcaggtcaggggcaggaaagaggccagcccaggcatccttgtccttcttstactggctccatgcgctacatggaaagcagccccttgctgcaaagttgctctctggatcatgtcagagctccttggagaaaatatcttgcacctggagatgacagacccacaaacagataagcataaattggtgggaggtgcgttgatggaggtctgcacaggaaactataggaggagaaacaggagcacataggcctaggtggtgagtggtggcagagggggcagcacaggcttcctggagcaggtgacacctgtcatgagtcttaaatgataggtaaaaattagctagaaaaggcagctgggagaattaaggaaaaggaaattcatacatttctcttttctagctttattgaagtataattgacaaaattatacatgtttaaggtataaaacatgatttgatatacatacacattgtgagatgattaccacaatcaaattggttaacaccttcatcaccactcatagttacctttgtgcgagtgtatggtaagaacacttaagatctctctaagcaaatttcaagtatgcaatacagtattattaactatagtcaccatgcagtacattagatccctggaatatttttatctttgaccaacatctccccatcttccacatccgacccctggtaaacactgttctgccctctgtttctatgagttcaactttttcagattccacatataaatgagaacatgcaatagttctggcttatttcacttagcgtcatgccctcccggttcttccatgttgaaacaaatggcagaatttccttcttttttatggctgaataatattccattgtatatatttgtatatgccacattttctttatcccttcatctgtcagtggacatgcaggttgtttctgttttggctattgtgaataatgctgcagtgaacatgggcacgtgggtatcttttcaagatactgatttggcttcctttgggtgtatacccagagatggggttgttggatcatatactagttctacttttatgttttgaggaacttccatattattttccataatggctgtaccaatttacattcccaccaacagtgcacaagtgttcccttttctccactttcttgcccatactagttatcttttgctttttgtagccattctaacaggtatggggtgacatctcactatggttttggttttaatttgcatttccctgatgattagtgatggtgagcactttttcatatacctattggctatttctttgttgtattagtccattctcacgctgctaacaaagacataactgagactgggtaatttataaagaaaaagaggcttgatggactcacagttccacatggttggggagggctcacaatcacggcagaaggtgaaggaggagcaaaggcatgttttacatggcagcacgcaagagagaatgtgcaggggaactgctctttataaaaccatcaggtctcatgaaatttatttatttattgagatggagtttcrctcttattgcccaggatggagtgcaatggcrcaatctcagctcaccgcaacctctgcctcccgggttcaagcaattctcctgyctcagcctsccgagtatctgggattacatgcatgcaccaccacacccagctaatttttgtgtttttagtagagatggggtttctccatgttggtcaggctggtcttgaactcccagcctcaggtgatctgccttcctcggcctcccaaagtgctgggattacaggcatgagccactgcgcctggcgagatttattcactatcatgagaacatgggaaaaacccaccctcatgattaaattacctrccaccaggtccctcccatgacacatggggattataggagctacaattcaagatgagatttgggtggtgacacagccaaaccatatcatatgtcttctttagaaaaacatctattcagatccttggcctttttttaagggtctcactgtgttgcccaggctggacttgaactcctggtatcaagctatcctcttgcctcagcttcctgaggcactgggacaacaggcacatgccactgtatctggcttcctttgcccatttaaaaataggatttttttctttttgctattgagttgtatgagttccttatatattttgggtatgaagcccttatcagatatatggcttgcaaatcttttctcccattctgtgggttgccttttcattttgttgattgtttcctttgccatgcagaagccttttcatatgatattgttgcactagtttatttttgcttttgttacctgtgcttttggtgccatatccaaaagaaatcactgccaagaccaatgttaaacaacttttctcctgttttcctttagcacttttatgttttgaggtcttacatttaagcctttaatccatttcaagttaattttttgtcagtggcataagatggggtccaattttattcttctgcacgtggatatccagtcttctcaacaccatttattggagagactaatcttttcaccttgtgtattcttaccactcttgtcagatactagttgaccatgtatgtgtgcatgtttctgtgctttctattatattcccttggtccacgtgcctgtcttaatgccagtaccatactgtttagattactatagctttgtaatatagcttgaaatctggaattacatcttctcaattaatcctcacaccaacagtaaaagggagatattattatccccatcttcagattgtgaaactaagattcaaagagatgtagcataatgcagatgttaatcagtgaatgtgggaaataaaaacagatctattgactccaaagactgtgcttgccctttcactacattgctttcctttataagatgtcattggtcagtcaccatattggaccctggctgataatgatgtcctttcaagtagccaaattgcctcatgttgaaaggaatagataggtaggaaataataggccatagcagttggtttatttattttctctctctccctccttaccacaccttcccccaatgtgaatatattaataatttaggaagtcaatacttagtagccaatcaattttgactgaagcagaactcatatgatgaatagaatcatcaagctgtggtgaaagtcagtaggagccagggtttctaccctggggggaaaaaatgtgttttctggctgtgaaaacctcttgagaggccattaggagaaagaggattagaagcagctttagaaatgtggttgcacttccacttttctaggctgctaataagaactggagccagtttaagagaaacaaggtcagtcaagcccaactggggtgtgtagaccctggagtctcagtattctcatctggagagtgaaagattgttgcagggtggccaattgtttcagtctgcccaggactgagacttgtcccaggatgagggaggaaggactttcagtgctaaaaccagatcggtcctaggcaaactgcatggttgttcatgccagattgctacgagttgttaaatgagagataaatagatattagatacctcacatggtgcatggtgcatggtaggcacttaacatatagttggttcactttatacacattaacccaatttaagagcaccacgcccaaatctttttcctctaaagtgggcatttgtttgatttggctgccctcgttggtactgagaagcttatgagatccttctgatggaaggagtgtgaaaaatattcaagccttcatctatttgccaggtattgagcagcgctgggatcaccaaaagatcaaaattaccctaagatgagaagtaaaggagagaaaggctttctattaagacactggaacctcacaaggttccaaagccttaggaccaaagacatgtttcatgttgtctttcttttctgataagaaaggagccaagggttaggatagaaaataagtttatctctaaaacatctcctgcactaaggagtccctgaggcaggccacgtttcaaacatgggagcaaagacaactggctttcttttttttttttttttttttgagacagagtcttgctccgtcacccaagctggagggcagtggcacgatctcggctcactacaacctccgctccaggttcaagcaattctcctgcctcagcctcctgagtagctgggattacaggcatgtgccaccacacctagctaatttttttttttttttttttttttgtatttttagtagagacgggtttcaccatgttggccaggctggtttcaaactcctgacctcaagtgactcaagtgatccacctgcctcggcctcccaaagtgctaggattacagacgtgagccacagtgcctggccgacaattggctttcttttagggtttgaaactttaaaattggggtggcttcctcacctttgtctacttaatttggatcttgaaggaagtggtgaagaggggagaagtgagaaaagagaaaaggaggaagaaaaaggagaaaggataaagatcattctagaccttttatgctccccccaaccctggggctggggaaggaagacaaattaaaattacctcaaggaagtctgtttctacaccactctcttcttgccctttaacaccttaaaaccaagatcgccccgaattttcaacatatactgcattccctccctagccaagagggctgttctcctaaaaaacaaaaacaaaactcaagcaaaaaaccctaccaggagagaatcttgagttagtgaccttaagaccttaaggggaaatgggttgagagcctgaatttgcaagtgaaccaatgaaaatcctaatataaagtttttataaccttattcgatgtggttaactaaaatagactccagcctcctcgccacattctagaataggcccacacctttgcttaaatgtctgtgaatttccaaaggcttctagtctcagcgttgccctggctccaagtccctgcttggtggactcagtctcacagtgcttcacctttggcatctgttctctgctttcacctccaggaaagcccaggtatggagttctgccctgctgtggtttcctcaaaattggtcgtttaaggcacataggtgagcagcaggctttgttgaaggttcagaaccatggagggggtttactttgtagagatactcaattttttctttttcttttttgttttgttttgtgttttttgtttttgagaaggagtctccctctattgcccaggctggagtgcagtggtatgatctctgctcactgcaacctctgcctcccagattcaagcaattctcttgcctctgcctcccgagtagctgggactacaggcacccgccaccacacctggctaatttttgtatttttatcagaggcggggtttcaccatgttggccaggctggtcttgaactcctgacctcaaatgatccacccacttcggcctcccaaagtcctggaattataggcatgagccactgcacctggccgagatactcaatttttaaaatgagatattagatatccctgttcttaaaaatcctctggccactgaaggtttccccttggccaccttcctctgtagtttcaccttcctaccatatttttggcaactcccaccccccatcactgccctcctgagtctcctcgtatctccttgcttctcggtttctgagccccctctcctcagcgccccctctccaacacacacacactcactccactcactttacctgtcatatgatttacctcggtctctctcaccttagctcagagcccattttcacccaactggactcataatgtgttgaactaaacacaaagaccatctatcagtctagcgcttatgcagcataaaagaactgaaagagggccaggcatggtggctcacacctgtaatcccagcacttcgagaggctgaggcaggcggatcacttgaggccaggagtttgagaccagtctggccaacatggcgaacccagtttctactaaaaatataaaaattagccgggcgtggtggcagacacctgtaatcccaggtactcaggaggctgaggcacaagaattgcttgaacactggaggcggaggttgtagttagctgagattgcgtcagtacactgggcgacagagcaagactgtgtctcaaaaaaaaaaaaaaaatccaaaaaactgagaggcctttaaattttcttctctcctttctccgtccccactggcctctgtcagatgaaagaagcgggatcaagattcaacttcctactgatatcattaggctccatacccctcttggcttggaaggaaaaagcagagcaactgttcagtttgattttaaatgacagcttcttcattatactgcatttatatctaccaaaacagaacaataaggacaacatgcaaattgaagactcttggtgacatttttaaatcttaaatcatgagtaataattgccttttacccttttggttttccagaaacgtctgattctccttcccttgtgcgccaatgagatggatgtcgttgttctctttttgctgttgggtcttataatgctcgggrcctttctgatttcacactgaggttgttgcccttcccaggcctggtaggtccagagtggcgtagggractcagatgggaaagacggagggatctcttacctgaatttctcagctagccttgactgagtctcccctgacccccaacatacttaggccttctccagccttggctccatccacaagcacttttggggggctggccatgcacatgccaggctctgccagcccctctgacccagctgagcttcctcccttatccaaggtcacggagtgtttcctttgcctctctttctttctttaggcctgccctgcctttttttactccccgctcttttacttttcacatgactaggcttaatctaactattcttatgacagtgactcaacattcttttataacctttacacttatggttttcaagaaggtactcagaaaaaaatctccacactctagaatttcatacaaaggggactcatgattaagaaggtaattttatcacaatgccagaaacctatttgaactggcttggggaagcagagagagaaggggtgtggggagagattgtttatattacaagaacaaaggagtttctcacagtcccaaagcaaaacgaagagccgggctcaagtgggtgagcgcagtgccttctcagccccctctctgggtgtacacagccctttcccacagcttygcctctaggctgcttcctctctttgcagcccagccctttctgcctcttccatttaccagctctgtctcccagaaaccatcaggaaaggcccagctaactcagagacccaattcaaaattcacaggcttgggacaggtgtccaatgaaccattcctgctccaattcattgtggccaggagcacaggtcacatgtcacacaaatacagctgcccagggtcatccttatgggaggaggggacatgggctgggcagacattccaaagccacccaccccaggaaggattcccgtgaacacagcaagtcagcagattctctcctcttcctctctcagagggcacacttggagtttgtatacagccttctagaaaaagaatgttattgcccatgaaactaggactcagggcctccaagacctacttcacacagytggcaagaatggttttggctcctttgggttccctctcccagtccccaatagtcagtggcctggagtcacccgaatccccccatccctgccccctctgcttcaccctcagctccatttccttgttcttggctcctctcttgctgaggccagcctcagcaaatatactcccgagtgtcaggcagtcaaatccattcacccagcaaatatgcattgagtacacatgctgtgtgaacccatgtcaggggccagcagtgcgatgtgaacaagataggccctgacctcacaaagctgaccgtgtagccacccatcagggagccgatgagagagagaatgtctgaaaggacttgcccagagctgaggaccccaggatcgtgtcctgatgttgacttccagatggccataatggctcccagatctttactaagagttgaagtccacactgcttgctagtttgcaggccactagatcattttgtgctaagtcagtccccacccagtaaaagcatgattctttgtgtggctttagtgtgcctcctgaagcggtccccatggaggttatgtttctcccagcaactgctgttagaatccattcctatagttgggctggcactttgtgactcttgctgttagctatagaacagaggggctattacctgtggcatttctcattatgtggattaacttctgacgtgctgcacacatgtgggatccgcagggcattagagaaaccctgacccagtggcccagcatgtggtgagctaaaccttctgtgggcagaagggaggggcagagacagcgtaggggcctgggatggagggccagaggtagcatgggaggagcatggagtctagaagctgagaaggattgggcccttggaatgtttagagggaacaggctggtaactggtagtaacagaggaagcatctcacctgctggcatcaacaataatagcaatatcacctattgagtgactggtgtacacgagtgctgtgccagccagtcacattacatgtattatctcattgaatccctgccacagtccagtgaggggggcgtgattattaccgcttcatagatgaggaaactaaggctcagtgggagcttgatgtcttgccaggatcctactgctagtaatagcagagtctggagttgagcccaggtctgggctcttaaaacaccacatgaataaagagggtctttttgggatccttggccatctttttttgggtattgaggccacccacagggcctgacttggtgtggcctgctgtggccactcagaaggagctgggtcaacctcagccacagtgcagtggaagctgcagagcctgggaccctcaggcagggcctggtgtcctctgcttctgttttctcagctttaaaacgggcatacttgtggccacgtgtgatggctcacacctgtaatcccaacactatgggaggctgaggcggaaggattgtctgagcacaggagttcaaaaccagccttgcaaaacatagcaagaccctgtctctaaaaataaaataataaaatgggcgtacttgatcctcgagcctcaggtatgaaaatgtcaccagtggagccagcctcaatggggcagtgtagggggagaatgtcagatgtctgttctcccccaggctctgctaacctgtgttggggcctagggggcctatggggtaaactgggtcttggttttctcatccgtgaaatgaagggtttggacttgaccatcactaagctccctcccagctctaagacttagtgaattcagggtttgtaactccctggagcagccaccactcagtgacctccaatcaaccttggcacattctaagtactcagtaagcacttgttaaaccaaacccaggagattaggagtttctcagaagagcaaaataattccccagtggagtttacctcacactctgaagtgacgagcttccactgtccgtgggctctcagaaaacacctgccgagtggtgacacttggcactttgcctgagaggtggaggaacaggaagtgtatcaggagtttgggtttaaagttggggaggaaagaaaccagctacatagcacattatcgagcactgcttggtcagtgtgagaccccacagcaaacactcccctccagcaaccccactccacctttggggctgtgtggtggagaggaagggccctgctaggttcctctccagccagctcacctgccaccaaggctcctaaggaggccctggggaatctcacagcacatcctacccctgcctttataaaggggcctgcagagaggatcctgggctctcctagagaccacaggcacataggaagcactcatggggaagggggtaaaggggcagttttgccagtcctctcacaggtcctcagctgccaccacccctgctgctgtggagacccggcttcctgcttgaggttctgcwgcagccactgagcctttctctctctagtgcacctgagatttctctctcaccctctcacttctctctctctcttgctcacttctctctctctctctctctctctctctcacttctctgtctctctctctgtctctctctctctcagatctttaattaactcagtgtagcttttctctctcaaacacttttgcataatctttctcacacttacacttaccacacctatattctctctacatatagcctctctctccacctccccagtccttcacacattccttttctctctctctttttctcccctcaaaccccccttcttctctccccacacctcccctggtgcttaactggaaacaaaagtgagtttgttgtgtgaagaagaggacctgtggaagtagcagccagggaggcagcagcggaagcaggctggggccagaggcagcatcgacagccagggaccccagcgctcagctgttccagggagcaggtaatgccccaggcagaactggtttgcatcctgctctctgcctgtctcctctctccaggacctgtccatttatttgccttcttgtctggccttgaaggggaaaggggattccagacttakggaatggcaggcacaggggcccaaggagtagcatgccctcctcttcagggatgtggtctgctgtggctggggtcggggtggctgggtgagggacatgctagaacctagaaaggcaggttagggctatattatgaggggtggtttgagccatgtcactgacccctaggctttaggcaatagagagacattgaaagtttttcaactggtgaataacataatcaaatctacattttattttattttatattttattttctttttcatgccatcctccaaggtacatcaaatctacattttaaaagagtagttactgatttctgatsccagggagaattggtatggcccctcagaatcaagcagtcacagttttctcaattttaagaaaaaataaggttattttctcaattgttggttttttgtctataaaatttctttaaacatttggtgtctgctagcaagcgccagcaatcaataagacaatggaaaggatgtaagttaaaagtaataggctgggtccagtggctcatacctttaatcctggcactttaggaggctgaagcaggtggatttcttgagctcaggagttcgagaccagcctgggcaacatggtgaaacctcgtctctacagaaaatacaaaaattagccaggcatggtgacatgagctagtactcccagctgctctggaggctgaagtgggaggatcacttgaacccaggtggtggaggttgcagtgagccaagattgtgccactgcactccagcctaagcaaaagagtgagactctgtctcaaaaaaaaaaagtaatagaaaaattgagaaatttaaaattcatttaaatacatgagtccatgagttctgtagataatagtgtgttctgctagtaaaatgatttctaactcatatgtatagtgttttatggtgctattcaaagagaaccatgactcccaggagcccattgtgtgaacatgtttgaaatgttttaaaagcacactctactgctacatagggaatgggattaaatgggacaaccagaggcaatggcaacagtaggtggctattgcagtgataggagcagatgatgagagccagaaccaagatggtggcaatgggtggggaaaaaaggagagagccaaaaaatgtttatgaagcaaatgaaagacattagtgtccagttggacatgaattgtgaaaaagaaggagcttcaggaatgagtccagcattgtctagatgggtaggtggctagaggtgctattaataaaaacagaggagagcagggctgggttgatgggagaagggatgcagagctgttttgaatatgttgaggttgacttgagaaggctgccgagcttccaraaggagcagtccaattgtcagttggaatgttcaatacacatgggtgtattgcctggacacaagggtgacctcatttataaaatgacaccacaaataacgtgagctagcccagaaggagtgtggagagagaagagagaacaagatgaagcagaatcctgggcaagatcaagatttaagtgttagccaggcaagaggaactagggaaagatattgagagagaatcttcaaagagggaaaatatcaagaaactgccacgttataagagccataagtcacatttcagttcagagcggcgatgatcacctctgaagttccagagagataagccagaccatagcttctcagtgctgttggtttgattgattttattagcttattggtttgacaattaaaataacaagagggatctgagggcaggggttgtgaatttgggtgcatggcaataagtgagattaacgggacaccagtaagaagtagtggggactgtggcaaactaaaaagcatatgtttacctaagaaggcaccatcatcaactctcatggattgttgccaagcaggaacgtgggcacagtgatcagaacatctgacttttcaagaaaagtcagagatctggatttctatatgaaatcttacaattctttatcttagcaatactttcaaaaaatttcatactctgcgaggcctgaattaaacacacctttgaactgtcagtttgaaacctctgcctttgtcaatgtcyttagcgtggtgggggctgagccagtggcagcaggccgggaactgattgggcaaggaggagatggagaccatgagcacagaccactactttaggaagtatgggtaaaagaaagaagaaggcaagcaggagagctaaggagacaggcagggtcagggaacctgtcttgggtaggaagagctgtttctaggctgagagaaagagggtggagagagggaagttgaagatccaggtgaagaaagactagctgatgaaataaggatctgaaagagttgaggggatggaagaaaggatgttgatggatttcatgcctggaggcctttattctcttggtgaagtggggtaggagttgaatcaagaagcttgaagagaggagcaaaggttagggacagccttgagggacacagtgagggcgctgacaaggatgcatggaaggatgccgcacttgagacttgctgaggggaaacccttacagtggggctcatgggcctggrtgtgggtgttggtggtgaggggctaagcagctgttaccttccaagccctgtgtcaggcatttcattctcttacctgttgtattcctcccagcagtcctgctcactcaactgagttcgcttgtgaataagtggcagccccgagactcacacccttgtctagctggattgggattctatttgattccaccacactaccactccgtgctgccatccccaccccagccatcccccagcccaagccctcagacacacctgcagaggagactgggccagtgaattcttgtttgggcattgcctggctggtttgattgggaagtcaaggggaaagaatggaggatgtgatgaagaaaagagtagaggtccatgaagaaataagtgaggacagaagggaatgatgaactgaggaaacaggctggaggaagggaagacctgatgaggcccaggagacagtgaacgagagattgcgtcggggcagggcagtggggttcctgaaaatttcaatatgagtgtgaagatgaggggaagggaggtgaggtaatgatgactccagggtgtctagcctgtgcagtggggtgggcagggatgcctttagtcatggcattggtcaccactttgacatcatgccatctctctgtcccttgctcacgtgctgaaccacactcaccagcacgtttccaccacagggtgtctggaacatgcagagcactcttcctccagatctgcagagtggctcgttctcatttttcaagtcacagctccagtgtcccctcctcagagagtccttttgtgaccatgctatctactgtagctcccctggtcattttgtttattttagacaacttatgattgaaatggtcatttatggatttgttgacttgtttattctctgtctctatcactagaggacatgctcaagagagcaaggacacataggtcttcttcatagctttatttggcacatagtaggtattcactggagagagagagagatgaagaaaagtaaggaaggaaggaaaagaaagaaaaagagagaaagaacacaggtgaagtgtgtttgggagaggaatgtcgagttttgaggtgcctgggagacacccaggaagtgacttccaatgggcagctggaaagcaggctggggcctcaggaaatggactgccatcttgcccaggaagaaagtgggcccacatggtacaagggtgtgcaagctgtccttttgcatggctgactgccttttcaagaccagtgttggaggatggcttgcttggggcccggtgggaagaagaaccccctcgggtggtaagctgaagttgggtcagagtgcttctcacttctctcttcagttctggttcttgctactgccctggcttcgaccatttcccatcattcttcactgccagctgcaagaccctggatctgaatgcagactaaatcttttcatctcttttatcttaaagagtatctcgcccacctctgattcatggttacaggaggccagcatcacccaggagctggacttagttttacagaattagaaaatacttttcccttgtgcttgcctcctactccatttctgttggccttgtggtcctcctgccttccatgggacactcagcagacctgctgcccctcttttgcagggtccccagctgctgagcagctccaggacatcctgggggaggaagatgaggctcccaaccccaccctctttacagagatggatactctgcagcatgacggagaccagatggagtggaaggagtcagccaggtgaggcrgggccccacgagggaggtgggcacttcagtctcacacagcctgggcttgcctgaccctcctggtgggaagtggcaccttgtacyttgagagyttcctggtccacaaagaccctcccagctgccttccttggtgtccagaactaaggagcaaacagaaccttatgaattcctcttcatcctcaaataaattaaagttcaagtgggaagatagaacagtcatccatgaaactctgagagtaatacaagggcatataccattgtccctccatatccatagggcactggttccaggacygcctgctgatggcaaaatccgcatatattcaagtctcccagttggccctgtggaactacctatatgaaacaatggcccatatatgcaggttttgcatcccatgaatactgtatttttgaccccatttggttgaagaaaacctgtgtaagtgggcccatgcagttcaaaatccatgttgttcaggggtcaactgcattcttctcgttgttgttgtttttccagagacagggtctcattatgtcgcccaggcttcagtgcagtagggtaatcatagcttactgcacgcaggctcaaactcctgggctcaagtgatcctcccgcttcagcctcccaagtagctggtacttcagtcacatgccactgcatccagctaattatttttattttttgtagtgataaggtctcacttttttacccaggatgttctttaatataaaatggttcaaggtaaatgctgtaaaagggaaagtaacaagcaggctggggtagacagcgagggcttcttggaggaaggagaaggtgtgccaggcacatcaagtctgaatggtgggaaaaatccagatggagagggctatctggcagagtttggggctgcagagttggagccatggagaaaagcgtgtggagcagagagcactccatatatacggagagcagaaactggaggggagccgcacggagaagtcgcaggagccaagggaggggcagggtaagaatggttggcactgctcatatccccagtgcctgtgacaaaggggccttgggacttaactggactgttcagcagtgcccaatgctcccaagagcccaaggggaaggaaggctatggtaagaggcagcgggagggaccttcggacaggaagacagactgccgatatttctccaccttctttacatgatgccactctgcccccaggagaagaatttaatttgatttaaatcaactttattaaattaatatttaatttctttcattagaaataaggaataggccgggcgcggtggctcacgcctgtaatcccagcactttgggaggccgaggcgggtggatcatgaggtcaggagatcgagaccatcctggctaacaaggtgaaaccccgtctctactaaaaatacaaaaaaaaaattagccgggcgcggtggcgggcgcctgtagtcccagctactcgggaggctgaggcaggagaatggcgtgaacccgggaagcggagcttgcagtgagccgagattgcgccactgcagtccgcagtccgacctgggcgacagagcgagactccgtctcaaaaaaaaaaaaaaaaaaaaaaaaagaaataaggaataagggctaggcacagtggctcatgcctgtaatgccaacattttgagaggccaagacaggcagattgcttgagcccaggagttcaagaccagcctggacaacataggaagacctcgtctctacaaaaataaaaataaaaatagaaaattagctaggcgtggtggcacacacctgtagtctcagctacttgaaaagatgaggtgggagatcacctgagccaggggaagttgaggctgcagtgagccatgattgtgccattacactccaacctggacaacagagtgagactctgtctcaaaaaaaaaaaaaaaaaggaataagatttgtcaggtcgagtgtagctctagagtaccacaaaccattgtaatatctaaaatattttcaytcctcgaagaaacagtttttgcccccttgggggcaattatgcccaagttgagagtgcatagactcaaccgtgcccaggtctgtctctgcatgggggccactgtgacacccagagcctgacagctgcccccaaccatggcctgggctcttccctcgctcatctccctcactagcctgggtagttgctgtgcagagccagaaggcacaggtttggacacccccaggttttccccactccacgtaccatgtatctggaagaaaagccactgggtgtactagtaaataagtccctgcgggcctcagagaggaacaaatccccagctccacatctgggcccggtccctgtgtggaagccattgaatctcttcctatgatgccgttctttgaacacttacggtgctgatcgattcacggcttgtctcctgcaagttgcacagtgaccctgagtgggtggaattttcattatccctattttatagataggaaactgaggtgaaggggagcaagtagctcaccaggggtcagagcatgtaggtggctgaatatggattccagtccaggcctgtctgacttcccacttgagggataatggactttgtcttcctttcctcattttctcagccctttctctttctgtctctaacttccagtgactgttttgacttccagggaagaacataggtctggaagcaattctgttggggtcagagatacatggggagagctgcagagcccaggatgcctatccaagatygacagggaagggggacatttcaaatgaccaggacccaccctgggttattatgtcttaacacctctgaggggccagggcctgaagccactgcccgccctgaacgagggcctctcctgcccagagtgagcaaatagagaggaggaaatctgggcagggccttctcagaggcccaggaaggggaaggtgccttctccacaccctggacagggtctgcatccagaagccctagccatggttgccaggaccagaccctccacgagggcctatcacacacacccgtggagcccttgccaagaaggccttatggcccccagagacctgactatcaccaaaggcaaaccacactgtctctattctctcagagtgtggattcacaaagccctctgcactccagacccagtgaaggaaccaagaaactgtagatgaggatgtttctagaagggggcttctcctaaaacataaaggggtctggcagttaccatctgcaaagtggtaggtttccctgcaaagcaggctttctgaagatggcatctgaggaggtcctggaagaaaggccatcaggacctcaggataacctggctccaaccagcagtgagaagaaagcaatgactagaagttaaagtggtcgaacccaattctaggcagatcccaaagaggagtagcttgaaggccagcttgcggacaggaaaatgtgggaagagagtagctttctcgacttctgctccacccttttctactctctacagctaaccccatctggtttccagataactctccaaggtatgaccagcaagcccctagtgaagtcagaagaagggtttgaccatcagccaagaagcccaccatgggcctgaacagttttgctgggccctcctccaggcaaactacaaggttagaggtgcttgggtcagagctgtttgaggcttgtcacccccacaaaaaaatagcagtttcttcagttgacaggccagtggagccactcagggaagctagagatctcagatgttttgagaatctaagaatcagtaaatcataatgggttctgggccttcttagagtaacaggagaaaatgatagggagtaggggacagcccctcacacagacactcaggctccaagacggttatggtccacaatgcccatgtcaaagagaatcggggaggggacgctttaataaaagtatttaatttgctgcagggagtgtttgctttattgagttaggagattaacagagtgaaaatctcaaatccgcaaggaattttccctggcagtgctttgtcgggagttattagtttgggggatgtttcaggcccttggaggagtcactcctggagggatttaaatggctttttgagctctgctgagcctagcaccatgcacataatggggactgtgtgtgcagcgtcatttctaatgtgatcaatgctggtaggtcaggctgttaataagatagatttttattaactctgtctctagcattcccatgagggaaatgcagctggctgtttgctgataatgaccttgcctgaagggagggctggatcagattgggtgggggcgaccacctgactgtgagcaaactatttacccagaattctatcctctctcatgcccacctctgcctgactgcaagtggaggggctgggaaggagaatgacctgggttggaacccacccaagtgtggagggccctttggggttactcagaaataaccagagcttagcgcctcccaagagctgtgaaagcaaattccaaatccaagctgcttctggtctcaactcagagcagaccataaacacgaacctgccagaagattcttatgagacacatgctctgagaatgttcctgcagtgaccgggaagggcaggagaagtgggtcagttgttgggtcaaaccagatcagtatgttttcaaaagccctgaatggttctatgcacataggcagggatgctctcactccatacaggatggagaaagctgaactatctgtttcaaccctgaaatcaccctcattaagatcctgtatagtccaggcacagtggctcatgcctgtaatcccagcactttgggaggctgaagcaggtggatcacctgaggtcaggagttcaagaccagcctggccaatatagtgaaaccccatctctactaaaaatacaaaaaaattaaccaggcatggtggtgggtgcctgtaatmccagctactcaggaggctgaggcaggagaattgcttgaacctgggaggcggaggttgcagggagccragatcgtgccattgcactccagcctgggcaacaagagtgaaactctgtctcaaaaaaaaaaaaaaaatcctgtataatgccctcttaacatcatttcccatcttagtatggggcagtaggcatccccagccctctggtctcaccacccatctggaatcaaccttccagtggagccagagctgcccactcagtttgaaggagagtaggatgctgagctcccagtgcagaaatcaacaaacttggttcattcatcaactaatatttattatctgcaagccctgagcctgctagagatataaaaatggaayatggcagatgctgcccctgctctcttgggctctcagtctaattggacactgaggcaaataagggggcatttggtaatgggggcactgtgaaagcagagcataggggcatctaatccaggcaggaggggtcaaggaaggcttctaggaggaagagatgttcacawtgagacctgaaggatgggtcagagttagccaggagagggtagggaagggggaagaggcctctggaatagggcaaacagacacatagaggaaaaggcacaggtttcctgtggctggactgtagaataggaggcagggaatggcagggctgatgatgcagattctatgccagccatgttgcagtgttggaacttggtgctgagagcttcagaggaccacagaagggttctaggtgggaaaaggacagaatcgtgcatatccttaagagagttcatctcactttagtgtggagaatggataaaagggggcaagacttggctagttaagaggctggtccaagggagagatgctggcagtagggatagagagaaggggtagattgagacaaaatttaaaaggtacaattgacaagacttgataacagatggcacgtggggacagatagtcagggagacacccagaattccaacctgagctagtgagtacctcatggtagcagcttagaaaacacaaatgtagtagtaaagttttattacattggatatttttaaattttgttttgggggcagttgataatgagttccattttggacaggttctatttgaggaaactccaagtggagatgtccaggggtcatcatgtggccaccgtgtctggagttcagtagagaagcataaatttgtgaggcatcagcatctaggtggaaatcaagcccacagaaaaggataaggttgcccctgaggtctgtgaagtgagaagagagcccaraacagagcccctaggaacttcagtatttgcaggatgggcagaggaagaggaacccacgaaagagactgagaaggggcaaccaggaggttaggaggggaatggaaggagggctttgtcctggaaatcaagggctgagagacattcaagatgaagggaggggataagaagtaccgcaagaactgaagcgcatccgcaggatggacctactcccgcagtctgaggaggggtagggcagaagccagagggcagtaagttgagaagagttaaaagtaaaaagctgggttcacctgacagttcttccaagatgcttgtccatgaagggcaggagtgaaggaagcctcttaaggagaacatgggccaagggagatccttttgtttttgagggtcagcgaagtctgagcacatcgtaggcttacaagaagtgtccagggaaaagagagtcatttaaagggaaaagaagctgagggaggctgctggatggagcaaggcggccctgggcacaggtggaggggctcctagcagggagttgagggaattccaggccggtctgtggtttgaggagacaggtggggtggaaaagcgactgtaggagctgcagatggctggtatacatgagccaggtaagcagctgcaggctagcagccatcgctctcttgttttattgcagtggagtcacacatggagatttatggtcagatgaagatttttaaggttgtttgacttccaccttctgctgatctagtgttctgaataattatactctttgtcattatccagctgcttttatgtccagtatctaacttggtccttccctctctctatgctagtccaacactgacacttgaggcttatgttggtgaagtaggaaaaagggatttttatatgaatcagaacctggatcaagccccaggtaaaaggttccctgaagtctcagaggccctgggttccatccagtgctctcacagctggcagtgtaacacagaatgagggctatgctaggggctttcatccctcagggacttaggataacttacagttattccagggtggagctgcaaaagagaccttcaaagtcctgcaatcagacaggggaagcacaagtccacacccatggggacagccaggcagtgacacaaggccatcacgcggttgacccaggatagtacaatcagattagttggccagtgagtgagattggaaggctaattaagtgaggagagatgggagggactggagcactcaggaagctcttcccagatagggcacaactggctggcagctcctcagaacccttggagctggtctgcaggagcaaacacctcccccaaccaaagtcatccctggatagctcactcagttgcagctgtcagaaggggaataaccccaccatcagaccaccttcatgtcaaaacccctacttgatttacctattcatgtatatttttatatatccaaatatatatttaaactttttattatgaaaaatttcaaacacaaaaagtagagagaatggtccccatcacccagcttcatcaaagtttcatatttatctatctccaccactttttttgtttgcttttggggattttttttttgttgtttgcttttgctggggtattttaaaggcaatcctgaatgttgtaaacatttcagtacacatctttgtgaattagacttcattgtaaacacaatgccgttatatttcctaataaaattgagaaaaattccttactataattggttatctagtctagattcagtttctcttactgtctcaaaaatatcatatttctgttggtttatacaacttagaatcaaaacaagatctacacattgattttggtggttatatctcctgtcttgttaggatcacagccatcagactccagagatgccaaaggaagagtcctgcctaaaagccctttggcaacagtactttatttttttttttatttttcagtctctgagacggagtctcgccctgtcacccatgctggagtgcagtggcacaatatcagctcactgcaacctacgcctcctgggttcaagcgattctcctgcctcagcctcccgagtagctgggattacaggcgcccaccaccatgcctgactagtttttgcgtttttagtagagatagagtctcaccatgttgccaggctgttctcaaactcctggcctcaggtgatccacccgcctcagcctcccaaagtgctgggattacaggcgtgagccactgctcctggccggcagcagtactttacacgagagtcaagagccccccacccagcatctccatctctggctcccacagcctaatcttgagtgagctgttggggactgtttgcgatgcccaaggggagagaaatgccactgtcatcgtcaggaggtttggggctacaagtaacagaagcccactcaggctaactcatacaaatggagggagcatcactgggacactgggatgacttcatagtccccaggggcatgatctctcaagggctgggtctgggaagctggcctgtcctctttctctctgcttctggtctctgcttctctcagggcatcttctttactcttctgcaaccagcttcttctgcttgtccctgcctttggccaatcctcagcttccatgttcacatccaccctactcaagggaccatcccacagcgattccaaattcttcatggagaatctgatctgtccaactttgattgccctatcactgggacccagatcagaggtaggaggtatggggaggactcgctatatcctagagagcacatccccatggaagacagggagagcagacaccccaaatatgtctttcatacctgtagtaatgaagatatacacttaacgtaagcaatcctttggccacagttctgcctctaataccaaccagaactttcagaattcttcaagttgcctatgagagtataggtggtgcaattttacaaactcaaactcatcttcctcttgaaggagagagagaccacaccccatctctgtccatggagatctgctgatgtaactgcagcactacatcaatccctagagcagcggaaaggtggaagctctaacttctgagtctaggagagctttggagaggttgttttatccacacctttcttctttcattccaaaaatagttgaggggatgttgtgttaggtcctgtgggagaattaaaatgagtaaaatatgaatctgttcttaaagagcttatgatctagtacaggtatcagcaaacatgttcagttaatggccagacagaaaatattttaggctttttgtgcacagatgatctcttcccctgtccttttatttcccctcctctccccgctcctcttctctttttctctccttctcctctcctttctctcttctgcctactctttctccttctttacaatgctttaaatatataaaaamcatgcttagctagctggccrtacaaaaacaggctgtggggtgcttggagcccatgagacatgatatttcaaccccaatctggtataaagcaggcatgtgctcatacacacagctaactaaaacccagggtggtatgtgcaaagtggtgagaacaggctctagaatctaaagacatgccttcaaaccctgtctcttatragctgcatgaccttgggcaggctcctcatcctctaagggtctcagtctcctcacctgtacaatgaaatagtcacagacctacctcatgagacagatttaaggattaaatgagataatacctgttaagtgcttagcatagtgcctggcacatagaaagccctcagtaagctttagctgttgtcgtgattaggaagtgttatgtgataaatgataaaaagtgtgatgcgagttagaggaaagagaggtctcctcaaccttggcccttgggaaggcattgtcttcccaactgggaaggagaggtgacttttgaacttggcccagaatagcagaggtggaagagagtgcctaggtgaggagagggcctctcctgagaggcagtgaagggaggtaccagcagactctgagggaggcagaccactgcgtagatgacagtcccatggggcaattacagggacttcctggatacacagacaagtggccctcagagaggttttggttccagaagcctctccttgaaggagcccattcagaatttttcagtaactttgtctgatgacattcacttagctgtgggctctccttcaaccctgaatgaggacatggtgtgcaggaggatggacccttcaccaaatgcatgagcttgggagcagaggccacccccattccattcaccacagctccctcgaatgccacacctctgccccatcaccaccagctgtgccactgcagttcatcactgtctgggaaggagtgtttctcctgtaatgcccaaactgtactgcatcaccaaaggccctcagcggaggttcctaggccaccaaaaggaaagactttcattcaaagggaatcagtcagccatgggaggaagtggggttcattgcagaacaatctaagacagaaggccctatcaatctgatcctagtcctagacatatctcatgagtagagatgaaagatcatcctaagtctattaaacactggaatcacttaactaatgattaactcattctgattctatattcagcaactttttggtgataatttggcttaccctgtatatctgcccatraggagagaatgcaaaggctagaggatgaacataacaaacccctataacgattgtaaatctcactgtaaattaaataaattggccttcaggtttatgcatcagcctttgtgatcttggttagcattagacagtgtcactggacctaatcatctttgggacactaaaaagataaaatttctgagcctggaccggggtgggtgccccaagaggcctgtgaggcctttctggtgctcatcagccccttctggtagcttctgaacttctccatatgtgtgctgacccttgacccatgcctgccccctcagtcttttatactttataatctttcaaatttactgccaagtttggtttattaacatatacatggtatgcaaagtcataatccgttgtagaaacaacttgttgtactatctcacatacatattttcatgcaygtgattttatgtagcatgaattagccaaataaattgtaagaatgggccagaatttgcttaggtgtttctcccgtttttttgagacagagtcttgctctgttgcccaggctagagtgcagtggcaccatctcagctcactgtaacttccgcctgctgggctcaagtgattctcctgcctcagccaccttgggcaggctcctcatcctctaagggtctcagtctcctcacctgtacaatgagaatagtcacagacctacctcgtgagatagatttaaggattagatgagataatacatgttaagtgcttagcatagtgcttggctgggagtagctgggattacaggcatgcacaaccacgcctggctaatctttgtatttttagtacagacagggttttgccatgttggccaggctggtctcaaaactcctgacctcaagggatctgcctgccttggcctcccaaagtgctgggattataggcgtgagccaccaggcccggcctcaggtgttccccttttgaaaaatcttccttccacagatcattttttagtgcctctgtcaaagactgaaccaggggagtatctgatgattcctcagacatctctaggaaaattcttaacgggcttctaagtgaattaatactggtcttcagtatctgttgggaaattcagtatcctgatatgactcatatgaagttaaaaaactttgctggatattgaaggaaaacttacatttcttacttttaagaaatgaatttgttggagttacaaaatgtattacaggccttaggcagaaagcacaaacatgtcttgatgctttgtaactaatacacagaagtcaagcttttgggtaatggggcggggtgggagagttacagaataaagttggtgaggccacatagatagagtgaccacagggatatatactttacaaattttagctgagtaaacttcatgaaagaaacaaattcacacaaatgtaattcttaaaacaaatgtttggaggcaacatagccttagcattaaaggttacatacattgggagattacattttttaaattagaatgtcctaggggggattttgcaaacaaactaaccaagacactatttaattataatgatattcaaaatagtatagatagaagcttctcttcaatcacaatgtttatgtatattctccagattttactcttatctaactacacataatgggcagcctgttgttttatcatctcaaggatctgtgtcttccttttaaaaaatattgatgtctgattgtcagtcccctgagattctgatgtaattagtctgagattcagcctgggttttagaatttgtaaaaagctcccagatgatcctaatgcagccattgaaaactgctgatacttactctagcccagcaggatcagtgggagttacgaagtttccatctgaggagacaactagaatagaggtctcttggttttcagccctttccagatcctccttgaaggagaacctcctcttctcccatcctgtggtttgagcattggaagccttgactgtacctggtagctagcgccatgatgctttctcctgctcttgttattaattgaacagcaatgtcctctaattatatctctgaccgagttactaggcacagaaaaggcctcagttctggccctgctttgtgtgacagagagctgctttctgtgacaagtgacatttcaaggttccttttagctacattccagtcaggagcggggcacctggtgcccaccctggcatgcagagttgggggtctacacccaagcttgggcaaaatccctaaaagttaaagctttgctggataatgaaggagaacgtggagattttctttccacttgacctgcttccccaactctaataccccactttttgaagccaaccatggtacacagttcactttgcaatgagttgtttgggattacacatgaaccttattatcaggcttttgcaagtttttaaacttggctttgaccagaggctttttacagaggccattcctttattcattctggagaatgtttaaggattttattatggaaaattcaaatttatacaaaagtagtatatagcagaatgaacccccacctgcccatcacccagcttcaacagttaacagctaactcatagcaattcttgtttctctgtcccccacctactaccccagacacacagacacacatgctaggtcaggttgacacaaatcccagacaccacatcattccatctgtaaatatttcattatgtctctaaaagataaggcctctttctttctttttagagatagggtctttctctgtcacttmagcttcattgcagtggtgcgatcacagctcactgcagcctcaaactcctggacttaatcctcctacctcagcctcctgagtagctgggactacaggcatatgccaccacacctggctaattattttattttttgtatagtggagtcttgctttgtttctcaggcaggtctcaagcaatcctcccacctcagcctcccagagcgctgggattacaagtgtgagccaccatgcccggcttctgagtatttttaaatatacttaaacaaaatgrgttttaagctttttttccccagtcatttcctcatagcgagatctcacccaaagtgatcagtgaggtcttgctaccctcaagcagaagggagcaagcatttaatgcaattgatctgggcaggagaccataaggggacaccagagaggaagaaatggcacctgtcttcaaaaagcttaatgtatatttggcatttgttatataccaaaacaatcataaaacatgattggctacaattaattattaatttaggcactgagcctgaattaattaattattttaggctctgagcctaagaagttagaaactttacctaggatagtctggagcacagagttgcctggatcccacccgtttttattctgatgtcaactggtctaggatatgactgagacatgaagattttaaaggcatctagggtattcttatatgcaagcaagcttaagaatcactgtcctagaacagtggtttctaaagtgcttcaggttgagaaccatcctagggtgttataggagaaataagcagaataactggcagaggctttgtggaggaaggggcattctcgctgggcagtggaaaacagagaggaaagaggacattctacatgatctcagaggtgatctgcagaccagcagcatgagcacacctaggagcttattagaaatgtagaatctttgacctcattccagacctgctcaatgaggatctgcattttgacaagatccccatgcacattagagtttgaggcacactggtgtagtagaatatgtactgtaaatggacttcagttataaaatcagagaaactaaagcatagcatgactgtgctagaaaggagaccctttcagctagtgttcttggagccattctaagggaaagaggccatgtcctgctgtataatgagaatcagatccatgtgagctacgtttgcctgcgttgggaccccatataagttgaactatccctaagtcacaccattctatgtacctacagagcaggggctcctgaacccacagggtgcagtcagataacccgggagtttccatggcagggtcaccctcctggtggggtaaccatccaggcattggtttttgttttgttttgttttgttttgagacggagtctcgctctgtcatccaggttggagtgcagtggcatgatctctgctcactgcaagctccgcctcccgggttcacgccattctcctgcctcagcctcctgagtagctgggactacaagcgcctgccaccacgcctggctaattttttgtatttttagtagagacagggtttcaccatgttagccaggatggtctcgatctcctgacctcgtgatccgcctgcctctgcctcccaaagtgctgggattacaggcatgagccaccgcgcccagccccaggcattggtatttttataaatctctccaagttattctaatggacagccaaggttgaaaaccactgctatggatctttggtcctccatgtttccttttccattcaaggtgaaagtgagctaaatttctagctgtagccattgaaaacacaaaattaagttccaggtagcaagcttaatggttcaacatctggattcccaaaatagttatagaggggactagagcggtgtccctagttaaatggtctcatattccggaatttcttaaatcaaattttctggattctggtagcagagtctagttctggcattggcttaaaattggagacaagtaatttagtgtttatgcaggctattctcatgtgggttatcgcccttgtctgtgtgtctatggggttaatgtttggtgtatgcctaacacagtacaaatagttgaagtcctgagaggtggagaggactgcatgtctttgctatctgctatctggagttagtagaggatgtttcaaagaggaagcwttgctcttatcactccttcaggtggagttgcatttgtatgggcagaagactgaagaatgggatgtcaggggagagagctgcctgagactgtctggcctaggatgtttgtgagacagtgaagacagcaacccactcaactggccccatgcactgggccacatcacacctttaggtgggtgggtaagaccatggagtagcaaaagagtctttgggagcagggtgacagttcagtttatcttttgtattatttttgagaaaaaaaaaacaataaaaggcaagctgaataggaggtcgatcctcaggaagaaaagttgagcatcctctcaactaaaacatttggactggccgggcgcggtggctcacgcctgtaatcccagcacttttagaggcggaggtgggtggaccacctgaggtcaggaatttgagaccagcctgaccaacataatgaaaccctgtctctactaaaaaacaaacaaacaaacaaacaaacaaacaaaaaacaaacagccgggcctggtggcaggcacctgtaatcccagctactcaggaggctgaaacaggagatcacttgaaccacggaggcagaggttgcagtgagccaagcttgcaccattgcactccagcctgggcgatgagagtgaaactccgtctcaaaaaaaaaaaaattttgaacttatcctttggtctattccttgtaaactcttatgttaatataccttttagaaacatcttactttcgatatcacatagtcttggatctgccataatttaaatgatatttcccaaacagatttctccacaaaaaggtcagctacaacttgtctgcctggtctctggctccagcccccatgtttcaggtcttcacctcccagtccttctctaattagatctccccattctgtgtccatctgattccccaggatcccaccaggtgcctggttaacttrtctcaaataaatgtatggaatgaaggtgttaaacatagataatgcaaaatatacagttacgtgaagaggaaatctgatgaaggaaaagatgttcaatctcactagtaatcagaagagtgcaaatgtgagataatttttcaaytaccaaatgaacaaaggtgaaaaagaatgaaaataccaaagtctgggagactttagggaaatgtaagatctcattggtggcagtgggcactgacataagctttctggaaaacagtttggtaatgcttgttataaatgtaaaaatgtgcagacacagtaattccacttctgagagtttatcctaaagaaattgtggagcaggaaccaaggatgttccaaccagccttaattaataataaagaataattagaaataatctgaatgtctaccagttgagaactgttcctatcaattatggtacattcagacagtggaatactagaaggacttcagaatgatgttaatactaatagagatgaaaggatgtccattagatactatacccttaaggtccttgtggtgccattaatgtacagttaatgcaaacacaggcatatgtgcatgcatgcacgaggagatctagaatggcagttaccaaaatatcaaccatcaagacatcagcatgatgcctcctggttggaggagctttgaatgactttgctttcttctttttttattgttcctaaaattacaaaagtaatattctttatttttaacttaatagctaacattaacagagtgtatcttgtgtgctaggcactgctctaattgctgtacattattattattactgaagaaatcaaaggtgatgagagattaagtaacttactcgagattttcagctagtaaatgatggagctgttattcaaaacctaatagtgttgcttcatagactgtgctcttttttaaaaaaaaaaaaaatgtagacggactctcactctgttacccaggctggagtgcagtggtgccatctcggctcactgcaacctctgccttccaggctcaagtgatcctcccaagaagctgggaccacagctgtgtgccaccatgcccagctaattttttgggttttttggtagagtcagggtttcaccatgttgcccaggctggtctcaaactcctgagcacaggcgatccacccacctgggcctcccaaagtgctggaatcacaggcgtgagccacctcacccagcctaaccagactgcactcttgctacactaattcgccccaataaagtgaaagtcttaaatcccgccccaacaacaatcctactcctctgctcaaagtaatcattgttaaccatttgacatggatccctccaaaacttttgctttctccagacacatgtgtgcacacacacaagtgtgtttttcttttttataaaatgggatggtagtgtccgtcctgtcagtatgtgagttcacccacatattttttatttatttctgggggatattccacaacatggacatacagaattgatgtaatcatgcttctactgaaaacctggtggtttccagttctttggcctaacagacaaagcttcatcgagcgtccttgtatacatattacagggtgtggcagtgtaattatattcctgtgatcgtttcctagaaatcgaaccactgggtcaaaaggcatgcacactgaatgttgaaacaggctgcccacaccaggaaggctgtgtcattacacctgcagcagatgagaggccacctccccatgttttcactgacacaggaagttgtcaatctttttaacttttgccagtattaaaaaatgaagaatgttatttcatttgtagtaatttaaaagtccatgattactggtaaggttgagcatcttttcatatgtttattggccatcttcatttcttctcaggattgtttactttctattggataatttgagttaattggttaatttcttattaattcaaaggagcattgttataaatattagtattttgatgctttctttgttgcagatatttttctcagtacattacttttctttgaacttgatttatatgttattttactatatagaagttttcatttattttagttttgtgcaatcaaatctgtccatttttttcctttatggttttataccttgtttaggaagtctttctccacaatattctccaagaatataagaatactctcctatattctcttctagtatatttgcatttttgcttatagatttatttttatctttagactttaatctatgaagaatttagtattgtgtttggtgaaaagtagggatttaactttctatttttaggttggttgtcttttaaacaactccttcatcaaaatcctaattccgtgactgggcgtggtggctcacgactgtgattctagaactttgggaggccaaggtgggctgatcacttaagcccaggagttcgagaccagcctgggcaacatgatgaaaccccatctctacaaaaaatacaaaaattagccaagcgtgatggtgcatgcatgtagtcccagctacttgggaggctgagttgggaagatcacctgagcacaggtggtcgaggctgcagtgagccaaaatcatgccactgcactccagcctgggggagactctgtctcaaaaaaaccaacaaaaaacctgaattcccatggatatacaggtctgtttctggactcttgtgccactgatcccttgtctatatctggcctggaatcacaccgctttaattactgaagcttctccgcaagtttctatatgtgctaaggcatgccccatccccatttctcttcatttttgaactttcctcaccattctcctacatttaccttttttagaggaactttagaattagatagtcatggtccaaaagtcctcccttgggatttcagttgcaatagattggagctacccatgcatttgtggttgacatcttacaaaggggagctaggtgtctccggccaggactccttgctcccctggcactatctgaggcctttctacttgaacacccagcccatgattccaagtcttctagaaaggacagatccctacacatccttggtttaatttctttccttccctggatggcatgtgaatttttacctgaactttcagaggcaaaaagagtgaaaagcatggaaacctcagaccttgcaggggaactcagggagaaatacttttcgtcagggaacatttttcctgctcccagcaaaccacactgaacactcatgtgtgaacagcctgagataatcaggttccagttgaggctttttaaaaaaacagctttattgttctagaataacttaaaattctctaattgtaagtgtactggtaaatgatttttagaaaatgtatggaattgtgcaactgtcaccataatccaattttagaacatttmcatcactcccagaagatccctcatgcccctgtatacttctctggatgccactttccttcacatgacagtatcaggaggagtgggggacaaatgaggggatccccaagagatcctctgcctgtgagtctgggaccaacaccacaaccacatacatagcatgaacccacatgacacccctcttttggggagacccaggtgaggcctcctcctgagggccctggccacactgagccccatccttacccttccaggtggataaagtttgaagaaaaggtagaggaaggcggcgaacgctggagcaagccccacgtgtccacactatccctgcacagcctcttcgagctccgtacctgcctgcagacggggacggtgctgctggatttggacagtggctccttaccacagatcataggtgaggcaggggccactgtgtgcatctctcctgtggtccctgcaaaccagggcagctcccctgacctcatgcctgccytcaagtctgtgtgacggcccgtctctgacacctgattctgcagagaccagctttgactctgttgctcccagggcaggatcatagtcactccaagtttcagtaccatgtagacctccagtagagaggaaaagaccatcctccaaaatgccatccagaaatgtggtaaaaggggagagggcctcttgcatagtcagagatacctcttgccatgacaacctgtttcttttcagggtaaaatgggtcatcattcatctktaggaaattagctgtcatttagtggtgtgtcgaagggaggagttggcttgccttaacacccctaaaaatttttgtgagttttgttctagcacattggattttgccagaagtattttgcccaaaatacttttctaaaaagagttcattttaggactaaaaccattgaacacagtacttttgtgcctcctggggcagtttcatatgtactgtttatttcacttttcataagaacattgacagaaagagcagacacacacacacacacacacacacacacacacgtgcccttgaacaggaggaggccaagagttggtgatgtgcccagttttccacagctagtggcaaagccaggagtacttccacaccccctctgccacatttaatcccactaataacaggtgaaactgaagacttccataccctggagctgttctgtcccacagggatgaggtgtgtatgttttccacacagatgatgtcattgagaagcagattgaggatggtctcctgcggccagagctccgggagagggtcagttacgtcctcctgaggaggcaccgccaccaaaccaagaagcccatccaccgctccttagctgacattgggaagtcagtctccaccacaagtgagtcaggccttacgctggtaggcatgggacatgcagggccagtatcaggccctggtacccgggtgagcccaccttaggggctgggagtttctggagaaattctgatgttctggggatccctcagcctccttctctggcaggcctgtggggaccccagccacactcccgtgttgttcccaccaccagagcagaacaatttctagggagagagttggttcccagccagggctgcatgtggcagatcactttggggcttgagatgtgtcctaatgcctgggccccaccttggagagttggagtcaattgttctggggtatggcctagaaaaagagaagttagaatgcaccccaagagattcttatgtcacacagcattgggaaatgctggtagagatggcttgctatggaaaggacccaaaagtttcacatcaaaccccctagagaggtcaagagcctcagcagaaaatggaacacatcagggtggtagaaggggctgggcttatctcaagagtgccagggcttgtagatctggtggctgatgtcactctgattagcaggacctggggccatttagagagagtggcttgttgcatgtacacatctcaaatctccaacattccactatcagtatcccagcctagatgcccagggacactagccctactgagcctgtcagacaaacacagtaaccagagcaaagttgctacattaaaaacattgaggaacctctttaaatgaattacttaaaaatgggaagtgggccggacatggtggcccacacctgtaatcccagcactttgagagtccaaggtgggtggattgcttgagctcaggagtttgcgaccagcctgggtgacatggcataaaccccatctctacaagaaatacataaacctcatggcttaaaccccatggcataaaccccgccttacaaaaaattagccaagtgtggtggcacacacctgtagtcccagctaatcaggaggctgagatgggaggatcgcttgaacccaggagacggaggttgcagtgagcagagatcgtgccattgcactccagcctgggcaacagagcaagtccttgtctcaaaaaatcgctcccaaaacaacgggaagtgtttaacataccataatagcaacagatacatactcagcacttaactacattctgggcactattctgagtgctcttcctgttttaactcacttcatcctcacaaaaatgctgtggcgtgtaggtacggttcttgtctccattttacagatgagacgcctgaggcacagagagtttaagtaacttgcctaaggtcacaaagccattaagtggtggaatcagggatgaacccaagcagtctactacaccttgtgcccatttaatgcactgtgtatctctctcactttcaacagtacagatattctctctaatcttgttcttttttttttttttgagacggagtctcactctgtcacccaggctggagtgcaatggcgcgatctcagctcactgcaaactctgcctcctggattcaagtgattctcctgcctcagcctcccaagtagctgggattacaggtgcccaccaccatgcctggctattttttgtattttagtagatacagggtttcaccatgttggccaggctggtctcaaactcctgacctcaggtcatccacccacctcagcctcccaaagtgctgggattacaggcgtgagccatcgtgcccagcctgtaatcttgttcagactattgacttgcttaaattaaaaaaaaaaaaaaaaaaagaatttcttcccagaaggggaagagacatgtcttgccacccagttttatttagttaaagtgaactaacccaagaggcttcgctacaccagcaaggctgtcgaagccaagtcccttctgattctcctcccagatcgcagtcctgcccggagccctggtgctggcccgartctayaccactccacggaagacctgcggatgcggcagagtgcaaattacggacgtctgtgtgagtgtgtgctctgccgctctgtggcagctttattcaggctgtggcagctgtgacatggccrcattgccataggtgggggagacaaagcccaggatctgccaagaattctcagggcatgcatcaggaggagcctaactttcactctaaacccaggctgctctcagggcctcatttactaccataatattcaagtcattcctctgaaaaatgaggctgtcagtcacatcctggtgtaatcaatacccactcccatattctaggtgtttttatcttagtctgtaccttcatcttcatcaaactgacattaaccctgttttttggtgaaaagctttcctggaaatggaatcaaaaacaggcaaggtcctttccttcagttcagtcaggcagcattcccatcactgggtggcagtctcatgccaccatggagaagaaatgtgggcagagtcacggccccttttttctgggaatggctggtagggggcggggtgtgggtttgaggtgagaggtgacagacaggttttacatgcacctcgtcagggatacacagacaggcgagctggggraaagaaaggagcgaacttagaaagtgaagtgaaaaagaaaaagcagtgaaggactattttccttcaggtacttttactaaaatgccaagatgttaacaagttcagcccagtgctgtacccctgtccaggcccaaggagtgacttgggggcaatgcagcccctgcctgtggccttgggcacagcaggcatttgctgcagtcttctctctctgtcctgatgacccaagtcctcttagtctccccagcyttgttatgccacatagggatgcccagtggcagtgttcagtgggtacagagtggcttcgggaagaccttccactcagttatcattgtatatgaggtcacctccctactgacactgcttaggggtgggaaccactgggacaagaggcacgaatggatgattgcagctttgtgtgaaccaggtcatattcaaggtgggcacccgccatgaggtggcccagcatgcagaacacagcgcacaggggaaggatcagagaggaggagacactgactgagtcttggagcataaatagaagttttccaggagcaaggaggaggaagagggggttctaaacaaacaaaacaaataggaggttgggggatggaagagaaggagctggagctatgaaaataaaaacattagtccagttcacaggaagtgcaggagttaaagggaagagagagtcaaatcaaagagggccttgtgcacccagcaaaagaacccgggttttattctgaagataatgggaacccctgggaagcttgaagcaggagcatgctgtgatcggatttctgtctgagtaggaataatctagaaggggcaacattggaaggcagagactgagcctgcattccagaatggagaggaagggacagaggtggaattgaagtactggtgggaagtaggaggtgaggaagagggagggcccaaggctgctcctagatttctgtctaaagggctggtggatgggagggaggggcattgagtggaatgtgtccatgaggaaagtgatttgggggcaggtaaagagttgcatttgaggtgccagaggggactgctccaaggagtctgcagctcagaagaggagtcagactaaagatccatcctgggcatcctcagcccaaatgggtgttggaaacaacaggagtgggagcgattgaccagcggagaggctgaggcacctggaggggatgagagcaaagacaaggccctgggatgtccaagcaggagaggatcctgggacagaaatgagaggaggagagccaagaggagcagcattctggacaccaggagtggcacaggccaatagccgagacacgataggtctgagggtgtccaccagattgggctagtgggagaggagagctggctttctctctcttaacagaggaaggaactattgggcagttcaaataattggctatcactgttctcatgggaagcccaccttccttccctctgccagcctaaatccccagcccrtgtttgaagactctcaccggtcatggaggacagaggtgaaactgctccccctccagcaaattccaagctaagtgacacatggaacctcacctaataatgcgtctgtgtccctcctcctatccgggcctggtgcagagccacacccagagtagacagcctggtgacatccaagacgttggggtggaggagtagagactagagtgtggtagattgaggagggagaaggaaacagtggaaactggagtctaacacctctttcaggaaagcagccattgaacagaaggaaagtgagaggatgctagtttaaggggactgcaggattaagggggagggagtttgctttkgttatgaacatgggagaggtacatgagtagggcccataggaaagggacctgcaagagcctggcttcccctgatggatcttcttttccttttctcctaggtcatgcccagagcagaagcatgaatgacatttctctcaccccaaacacagaccaggtagtaaaacccctgcacttagctgcaatggagggccagggcaggaaaaagtctttggtttcaggagcagggatcccctatgggcagagttccactcctacaaaggagtgggagttccaggaagatccccagtggggactctgggctgcctgggggactttgccwaggccagtagtcggggaatgacggagtcccaggtgctggctctgtgtcaggccctgggggtgtgggacagagaacatgattaaatgaggcgccagctgtccttgagcttgggatttgttggagagagaagaccagcacacatggcttcatctatcctgtgatccacaagcacctttaaagatgggatagggaytggggctggcagagagacagaaaagaatctccctgtggcgagaacagtggtagttaattagactgtccaatagtgcatcttcttcctgtggtctcccatgaactgggctgaaaccctcgtgatgagatcagaattctgcaaacaaattgggtccagttctaaggcccacagccccagaatcctgtgactgtgccccttggggaagcccagaggaggcccccttaattccaactcctgcatacctcaaggacaggaggccccatggtccccttgtctatctccccaggagtaggaagaaagatgacaaaggaaacctgagacttggcgaggagccttcaggagcttgggtgacctccaggccttccagccacccctaagtttggtggaaggcaaaaacaaagtcagcccctcatgtcagtgtcccgggcacaaataaattaataacaacagtaacaaaatcmatcaatatttaagctccacaccacatgcactacactgtgccaggcattttctgtgaatcacaaaggcactattttcattcccattttactcatgagagaacactgaggcttacagcagttaaataacacaccaaagtctatacagctgaaagacagaactttgatttgacctaggcagtctaactccagagcccttaayttggaagtaatttaggaactagtcagtattctggaacattatttggagaggaaaaccacttttactcatgcatacagacagtgcaactgtgataagaaagcattacctagtaaaagttttttataacctgttttaatgaatgtgtgagtggtaataataacactagctgtccctttcaccagacagtgctttcttgatttggggattggaacccatcacctagcgccagcatctggttctccttgctgatacttgatgctgcttctcggtatttgcagcatcagtggtctctgctattgggtgctcttcaggtgcaagcccagaggcatttgctctgcaggctctttcttcatcattgatttgtgcaaagctaaactccatgcctgccctcagctggcagattcccagtgaacagagagtagattcagacagcatcgttgtgctgcagtgactctgcagtgcagagccagattggagtccccaagggttcaggaagtggagtcagcagggccctggttatacaagcccacatccaggctttgggcaagccagggttggttggaacactagcatgctcccatttctgggatgccacaaccctggccttcttaccaaacatgtcacaacgtgtaaggaaggaccaactccctggttaaatttctcttatcttctgtattacaagtgggttggttggatggccaggtgtggtggcacacacctgtaattccagcagtttgggaggctgaggctgatggatygaggccaggagtttgagaccagcctggccaacatggagaaaccctatctcgatcaaaaatacaaaaattagccgggcgtggtggcacatgcctgtagtcccaggcatgtgccagacaggcacgagaactgcttgaacccaggaggaggaggttgcagtgagccaagatggtgccactgcactccagcctttacgacagagtgagactcttgtctcaaaacaaatcaaaacaacaacaaaaacaagtgggtttgttgggacaccctgaagcattgctgcttccgaagcctctttctccagggtgctcctgcccagcccgtatctcctccccttccctggaccccctccctgcctgatgctcggagacggtggctgccctgttacacccagccctccaccctgaagaacgctgcttagtaatcagctgaccatgcctgagacaaagggactttttgagtcttggggactccggtgttcctgtcaattcctgctttttctcactatgttaggatccttggggctgctgatggttgcccaggtggttgtggagggttattttttttttgtctgattggatttaaacgattataagggtagtgccattgctcacgagcccctcctcgtgctggtaggccacccagcccagtgtgtatgatgcccccacatgagtcgaattgggaaacagctgtggggacaaaatggcaggacctgttgaccatatccatgcccatagctgacccctccacagggacaggaagaggcacaaggaagctgtgtcttcactgaggctgtgagaaacaggcctgtgcccgcgggaaagactgcagtagaagggggattggtaggaaaattgtgatgttcacaggcgctctcttcagagctgtcctctacccccaggcgctttcccactgtgtcagcgactgtggactgcacccagtcctgccgctaccccaactgctcccctccatcttccgacaaaattatctctgtctcttgtctgtccatgcccttgctgcccagagggaaagcaatctgaaaaaggaattcattctaagacgttaaggactaagaagagcttgaaagtaaccatccctggggtatcttcagcataaaagaggactcaggaagttataaacgcagagagtgggaatacatttgggtggagggcttgtctccagtacctctcacatcagaccccactggctctgcctgtgtgaccttcctcccatgaagtgacactagccagagagaytggagagaggccaccttgatagtctctgctggaaaattccagaagtgatgaatttccttgggaggtcccctgggggtaatgtgggggcatggaagtctcccacagacttggagactggtccaggaattcctgtgagccaggaagctggtggcaaagggaaaataaggcctgtttactctgaccatcagaacaggcctcctcctccccacagctaccaaaagtgaaggtggagaggggaggtctgggtggctgaggtagaagcactgagactcccatctgctcagcctgaaggaggccatccaggcctgatgtccggcaaccccggggctcttctctgacccctcaacccacatctcagtggagccgttttcatccgtcaaggaatgtcttagtcaaggaaagtcgttgccagttccttcccatctacaaggcttaatggtgcctggggttaacctacattcagtctccccatctgcagaatcggaggagtacttattwattctttcagtctcttggcaacattgggagaatttttttcaagttaggcctcaaagcagtctgaaggggagtgagggagtgagagcaggtgggagtctccttggctatctcgtttcccctccctgtccagcggaaaaacaaattcatgaagaagatccccaaggactcagaagcgtccaacgtgctcgtgggcgaggtggacttcctagaccagccattcatcgcgttygtgcgcctcatccagtcggccatgctgggaggagtgaccgaggtgcctgtccccaccaggtgagagccrttgaaacctgtccccacgccactctcaggtagccagtcagcagtgcagtcagcaagcagtgctgttgactgttagtgttctcaaaggcacctctaaacgtggaggctgctgggaagggaaatcttctgactagggaagagttttagagtttattaaaaataataacaaaagaggccaggtgcggtggctcacgcctgtaatcccagcactttgggatgccaaggtgggcagatcatgaggtcaggagttcgagaccagcctggccaacaaggtgaaaccccgtctctactaaaaatacaaaaaaattagccaggtgtggtggtacgcgcctgtaatcccagctmctcgggaggctgaggcaggagaatcacttgaacccgggaggcagaggttgcagtgagccgagatcatgctattgcaccccagcctgggcaacagagcaagactgcgtctcagaaaaaaaataaaaataataaataataaaagagaaggaggcaacaactaggagagaagttgtcaggtaagcttgggcagcaagacaaaggtgaggatgctcaagggggagcctcatgggaggggaagaggaaatgttcctccaaagcaaacatagggttccatggagggaagtaaaaaagttaagaatgggcccagcgcagtggctcattcctctaatcccagcactctgggaggccaaggcgggtgaattgctcgagcccaggagttggagaccagcctgggcagcatggtgaaaccctgtatctactgaaaatacaaaaaattagccgggcttggtggtacacgcctgtagtcccagctactcaggaggctgaggtgggaggatcacttgagcctaggaggtggaggttgcagtgagccaagattgcgccactgcactccatgcagcctgggtgatggagcaagaccctgtctcaaaaaaaaaaaaaaaatgcatactgttcagggccagagaattctcttcacttgcttctgtttttccttctcactttcatgctcctcttccttaatcttctctgtctcctcctccatcttctttgcagatttctgtttatactactgggaccttctgggagagcaaaatcctacaatgaaattggccgtgccattgcaaccctcatggtagatgatgtaagtggtaaccagaagcttgtactcctgaattttacagctcctgcaccaagcactgcaccttcattcattaacttatccagccagcacatttgagcacctactgtgtaccaggcactacataggatgctaaagattatgagaatcagggaatagtcattgtcctttaggagaaccaatcaagtgtgagggacagattgataattgtaaaactaaccatgtgctagctgcccagggggtcaaggagggcttcacagatgagggggctttaaagctaaggaggagcaggaggaaggtagacccagcaccaggctgtgaggcaagcattccaaacaaaggaaatggatcaggctcagagaagctggatggaggtggtttgatataggctcagtgtaagagcttcaagggcaggaggtaatactggagaggtgagccagagactacacagagcctgtaagcagagctgagtcacactctgtccccagagtgatggggagcctagaggactttaactctttttccrtttgtgccaagaatactcactggcggtgcttgcggctgcaggctttaccctgagataacttttccccacgaaatgtctcacttttattattatttttgcattgctcttatatgttgactttggaaacaaaagacatcattctacttaaagcattctgtttttagttgtggcatttccatttacaaaatacactaactctcaatcattgaaaatatcaaatcctagaaaactagcattcctacgagtgatgctaacatcattctcgaacagtttttggcctaagattcatttgatgaatccagtgtttccaaaatagatgattctgatcattccaatgattccaatgttagttctttttagaaataattctaagaataatttttatattgcattttcacattgaaaatcagtcagatttgcttcggcctcaaagagtgtgtytatgtaaaattaaatgagtgctggcagtgagctgcactttttttttttgcctaaatgggaaagggttaaatgtgagcatagtcccatcgaatctgtaagtcagaaagcacactctggagacagtgtgaagaacacrgcctgagcctccaagggcgaagggctggaagtaaaaaatggttgtgaaatatctgagctccttggactgggctctacaaaggttttctaatatgtatgatgtgtggaaaactgaaaacagaaaggttaagtaacttaaccgaagtcctacaagcaagaatatggagacctggccttcagatccaagagaggctgtcttcccccagtgcctgctgtgtcccattgtgccatattttaccaatgtactatagtctcattccaaaaactgagagtgagttggcagtgggagatgtggttcaaagggattcctttaaaaactagatgtgatatgctcccaggcatttcagaaacagacccgatcwttcttttctccctcctctctcctcgccagctcttcagtgacgtggcctacaaagcccgcaatcgggaagatctgatcgcaggaattgatgaatttctggatgaggtcatcgtccttcctcctggagaatgggacccaaatatccggattgagccccccaagaaggtgccctctgctgacaagaggtgtgtatgagaatgggcagtagggagagaaaaaggaggcttcaactctgtcggtatcattttatttctctttaaaatacatctgaggctcagcatagtggctcatgcctgtaatctcaacactttgggatgctgaggcaggtggatcacttgagcccaggagtttgaaaccagcctgggcaacatagtgagatcttgtctctacaaaacaaaaatcaaattaactgggcatggtggcatgcacctatagtccctgctactctggaggctgaggcaggaggattgattgagcccaggaggtcaaggctgcagtgagctgtgatcatgccactgtactccagcctgggcaacagagtttgaccctgtctcaaaataatgtttaaaataagtttaaaaataataagatatatcagaaacaaatatggctaaatgtgaacatttgtaaaatctaggtgacctgcgtgtggatattgttagacaattttctgcatttttgtctgtcttttaagatatttcataattttggttggagaggtgaggggtgctctgggggacccactctccttcatcccccttctcttccaggaaatctgtgttctccctagcagagctgggccagatgaatggctctgtgggaggaggcggcggagctcctggaggaggcaatggaggtggtggtggtggtggcagtggcggcggggctggcagtggcggggccggcggaacaagcagcggggatgatggagagatgccagccatgcatgaaatcggggaggaacttatctggacaggaaggtgyccaccccaggcctcccagtgaccctgctgtcctttagacttctcccttctcagctgccctctagggacttttcccaaccatggtctgtagtgcccactcgaggtcacccctgccttctttccctcccagagcccttgaaccccatcatggatccccaaaaggttgcctcaggagaggggaatttgagacccatacaagaggagaggaacccaaacttttctcttagatatcctttggtgcctgtttcctgggtctgctgtaacaaagtaccacaaactaggtggcttaaaaccacagaaggttactctcctgcagttctggaggccaggagttccacagcaggtgttggcaggaccaccgtgctccctgaggctccaggtggaatccttcctggcctcctcctggcttctggtggtggccagcagtccttggtgttcctggctggcagccgcatcacccccggctctrcctctccaccacatggcctcctgtgtgtctgtcttcacagagcactttcctctttgtgtatggaccccagtcatgttggaatagggcccaccataatgacttaatctaaactggattacatttgcataggtgttacatagatgttaggaccttaatatatcttttggggggacacaactcaataacagtaccttttttaaaacttaatttacctattcaaaaactttttttttttttaaagaaaataagagaaagttctcctggcctgggtttcttttccagctcttggagtcattcaggttgatctagatttaggaaaggatgtggccttgaaaatctacatataaatcatgactttgagaatgaagtcatgttttatatgcccttggctttataccagtggttctcactgtaagcagctttggccctccttagtccccctacccccgagcccagggaatttggcaatgtccagagacatttttgcttgtcacaaccggagaggggagatgctactcgcatctagtaggtagctgctaaacatcctgcagtgcatgggacagcccctgcagcaaaggagtatccagtccaaaatatcagcagaactgaggttgagaaactctgctccatgctaaggactgcattaggggctatgggaatagcaatcccagtaaacagtgtctccaaacctaaaatcttccactcagctgttccagatagcaaaatcaaaaaacaaacaaataccaaccagttataaggtttaggatctgttcttaatgaatctgttataatctgggatgcttctgtcaccgaaagttagacactcctgtgttcaccaagagcaggcaccctgcagatggtcagggatgtgaggaggaccaccatctgtggaccccaggacttccattctccatggaatgttaggtctaccccaggacatattcccatcagactttccctctccaaaaccctctatgtccacccttcccaatgtgggtggtgccaaccacaaactcagtcctacaggaattcatccctggccctaaatgttctggtggaaagatctttgccccatccaccctggtcaagttcctttcctcgccccagactctgcaagttcttgtaaatagccctgcccctgcactggtgttagtggtgagaaagcagcccctgggcctgtcttgagcaggttcttcggtggcctgtgtctggatatcaagaggaagttgccctggttcccaagtgacttctatgatggcttccacattcagtccatctctgccatcctattcatctacctcggctgtatcaccaacgcgatcacctttggtgggcttctgggggatgccaccgacaattatcaggtgtgtgcgagccggtgccctgagtgtaaaagtaagatctgccgccacctggtggcagcaggaagcttcatcctgtaatcccaaaaccaaggtttcatctaccatccaggttgaggccatcactatttgtaatcctttacgcttcaagtaataataatataataagacaatattaaaagatctgaagctaaatctcattactaaagaccaaacttaatgattatttaaataggtcaaaccgttaaggggaatcatctgctgtgttatttggtacttttcccactgatgctggagtgaatttaatcagcacaattaatggagtgctaattgtggccttctccccacactttttaaaaactaaccttgaattcttagtttggagttaagacatttttagaaggatggtaagctgttgccatgacaacaactcaggcctccctggggaaaacagctcagcagacacctgccaatctcctaggcaagggtcttctccaatggaggccttcaaagtagagccattggaaagctcagtaccccaaggagaagacccatttgtcaagctgccttttgggcatgtccacatggctgcccctcaggattccccatggctgcccctcaggatccmccagttcacacagctgacattgcgtcccttatcttccctcctgacgtgctgctccctgcccttccccagcacagcaggtgataccgtggttcacccagctgtctacaccggaaactaagcattatccttgactcataagtcccagctgccccatgtggccctcaccacatggccctacctggctctcacgcctcatctcccagcattctctttctcagcattcctaccctccccaaccattctacattctgttttccatcaatcctgatcatcttttggttcttcaagtacatgctgtttttcagctccagaccttttagacactattccctcttcctgggacactgtttcttatcactccacttaaccctattcccctggccaattctctgctcattttttggatctcagcttccacttatctacttctagggaggccttcctgactacatctttacctctactgcgtgctcctgtggcaccctaaacctatcccagcacacctcttggcagtggctctcaaccagggacaattttcaccccaggagacatttaacaatatctagagacagttttcattgttataactgggaggagggttcctactggtatctaatgtgtagaggctgtggatgctactaaacacactacaatacacaggacagaccctccacagcaaagaatcatctakcccaaaatgtccattgtgccgaggttgagaaaccctgctatatgggaattgcctggttacttacctgtgtctcccactggaatgaagatatgttatcttgttcagtgatgggttctcaatacctttcacaatgcctggtacacagcagacactcagcggactttgaataaatgaatgatctgacctctaaaagcaccaaacagatgtttagatgaatgaataatcagatggataaatgggctgtcctctgggagtagaatggacacagagaaaagcacatccactgttttctaggccctgggtgccagaaggaagtcacatggtacctttatctagatggaattaaacagagtgacaatggccatggtggcaagttgtggagggtgtaggagatggagaacaggatttagggaggaaagggcccagaacgaaggataaacactgtggcctgggcccgtggagagatcgctggggctgcagcctgtgtggagagaccgcttctccttcctatgctgaaccacacattccttgtrcccccagggagtgatggagagcttcctgggcactgccatggctggctccttgttctgcctcttctcgggacagcctctcatcattctcagcagcacggggcccatcctcatctttgagaagctcctcttcgacttcagcaagtaggtgtcccttggtggcccccagtgcctgctctcgcatttggggcagtatgctggggctagggcaggggaataggtcccaagggtaggtggtggtgcggtggtgccaaagccatctttaactatgggaagggctaccaggtggcccctcctgactcctgccagctacctgcctttaagacatcttagtgcatattggcacagcccatagggaccagccacgacaagaggagaaaattcacaccactcagtttgtgagcaatggtgacttgataggcagtatagtgtatgaagtcttgggctgaaggtcagaaggttacacccagacccaggcagctcccatcactactccaggctcagttgcctcctctacaacatgagggtttggaccagaccatttccaagggctgctccaaccctgttcttccaaaattccctgtttttcactcactctggtgtctgttaccaactgtgagcactgagatgtcttggcaccttcctgcctcctccataagatctttaaaaaaaatttttttttggccgggcgtggtggctcacacctgcaatcccagcactttgggaggctggggcgggcggatcacctgaggtcaggaatttgagaccagcctggccaacatggtaaaaccccgtctctactaaaaatacaaaaatcagccaggcgtggcggcgggtgcctgtaatcccagctacttaggaggctgaggcaggagaatcacttgaaccagggaggcagaggttgcagtgagccaagatcacgccattgcactccagactgggtgacagagagagactctttctcaaaaaaaaaaaaaagttcttataaagatgaacactggacccccatgaaatctcaaagatcagacaactctgcccaagaattgtccctgtccccagtctttcacagtccctgggagggcatcagtgccacaggaggacagataagccacttaaggatgagtctgaggagtcaagcacagccaggagccctgggctggaggcccctcacctcccctctgccttccagaggcaatggcctggactacatggagttccgcctctggattggcctacactcagctgtccagtgccttatcctagtggccacagatgccagctttatcatcaaatatatcacccgcttcaccgaggagggcttctccacccttatcagcttcatcttcatctacgatgccatcaagaagatgatcggtgccttcaagtactaccctatcaatatggacttcaagccaaacttcatcactacctacaagtgcgagtgtgtcgcccctgacacaggtgaccggtaaccccagacatgccgtgggccctcacctaccccaccggccccctgatccttcaccacagctctctacttctactgctggggaggggccattcagccaagggcttacagttccaagagagcaaatacagggtcttgaacccagtgtttggaaggaaaccaaggggacagtagctctaataagagtcacagggttgtcatcaggagggcacagggatatcctaggaaggagtaaggcatgctttgcctcagtgtggggtaatgtggaggccacacctatcaggagtgccactcaggggttcctgctgcaggccagagatagaactgatggtgcctgaagtcccgcccagctccatcaagtcatgatacgatgagctctccccaagacagagctgcccgtgtggccacataccgtgtaaggtgagaccacacctgagggatggacatccacacagatggaaacatgtccagagtggaggctctgtcatccatgccatctgagaacagttggagaaccggggcttattcagcctcttatgaatatgagagttatgagagaaggactgtcatgtcacaaaggagctgtgttcaccctctgaaaccacaggatgtagagctgaatgaggaacagggagcagaagctccaggaagccagatgctggctgaatttaggaaagaacctacaatggtgggcgttaaccaccatgggagttctcggcccccttggttggtagcaagttacttggacactctctggatgtccatctgccaaggatattgtaaaaaggatccctgtacagatggggtcaacctggtaacacccagtgccactcctgtggagttactttctggccaaaacacctgtcatctgtaaattagggcttcccatagcatctgagcctcctccatagtcatgatcatgcccctaagagctttcagtgggatgtgcccagagtgcccagggtgctgcagagcaggagcaggaggtctatgcacacatctccaagcaccaaggctggactcacagagagcaaactgaggtccagagaccacccaaggtcatgccaagcctcagtttccctggctgtaaaagaggggtctcaatgcgggccctggtggtctcctgggactcctgtggggtttccaaatctataccccgattgagttgaaggaaataagtggatagtgggttcagccccttaatacattactaygggtaaaaaaaatcataagtcaatcgaaaatatttgctgcacaattattgtatgccctactttaggccttgtggaagataaagatgtcctgccttcagagagttcagttttgattataaccccttctctctgtgactgcactgattttgtaaagaagtccagacttttttctttctttttttctgtcattaattttgagttattccactaaaatctaatgacaggtgatgctaccctttgttctgagccaaggcatgttgcttgcccagaggggatcctacctgcaggcaggcccttttcattctgccctggagcaaatcctgcctctgtggggaagccccatcagggccctcctacgtgcttgtatcttatagactgtagattcagtgttgcattgacgtaaattttacacaaacatagcttctagaagcacacatccttgatctcttttagaaaaaatccaaattctgtttatttttattttatttatttttttgagacagagtctgactctgtcgcccaggctggagtgcaatggcgcgatctcggctcactgcaacctctgcctcctgggttcaagcgattctcctgcctcagcctcccaagtagctgggattacaagtgtgcaccaccacacccagctaatttttgtatttttagtacagacagggtttcaccattttggccaggatggtttcgatctcttgacctcgtgatctgcytgccctggcctcccaaagtgctgggaactcaggrgtgagccaccgtgcctggccactttggccattctgagaatcatctatacacaggaaaaaacaaacccggggtgctctaggaacaagggccataggatcatataaggtgcattatgagggacataatgaagccacctgttcccaaatagcttcccctctggctttgcccaggtgcctgatgtcacctcattctttggggtcatgctattgtcatggttctcaaaatgtcgtccctggaccagcagcatcagggaacttgttagaaatacaaattcgtagcctcctaccccagacctgctgaatcggaaactctggctgggcacagtggtgcacacctgtagtcccagctagtcagaaggctgagacaggaatttcacttgagcccaggagtttgagaccagcctggacaacatagccagaccctgtctctatttctaagaaagaaagaaaaggagagcgagagcaaggaggaggaggaggaggaagaagaagaagaagagagaagagaagaggaggaaagagagaaaaaagaaagagaaagaaaggggaaagaaaaagaaggaagggagagagaaaggagaaagaaagaaagagaaagaaaaggaaggaaagaaaagaaaggaaaggaaagaaagggaaggagggagggaaggaaggggggagggagtgagggaaggaaggaaggaacgaacaaacaagcgaaagaactctggagtagggtccaagcagatgtatattgaatcttccaattgattctgatgcactcttaagtttgagaaccattgctctattgaactgttagtaataatgggccgttattgaccactaaaccccagtaagattaaaatttcagtttcttcacagaaagtaaaggaactagaactagaacaagttagttttgattaagataacatggaaaggaaaattctacacatttaggagactgggatgaggggggagaactgtggagggtttctttcccggtccatgggccacctacttagtaatgggcccatattcctagttttactgygaagcccagtcttactatagtatactctcactctttgtcactcttcatcataaaagcttgtttgggggcactctctttcaatttgcttttgcttccattgtaactgatttgtattctatttatgaatgctgcacacactgatttggctgctttcaatcccaagtgagtaccactttgtaaacactggaattttaaaatgtttgatacttggaccctttctgaaattttccatgttatatttctttcatattcatctcaagtggctttcagataaaccctacagagttctcgatataaaagaattgataagcataagcagaagacatcaaaggtggtctgaagacattgggtagtgaaaaagacatctgaactccccaggctcaagcgtcagccaggagttctctagcatttgaatgagaagccctgagccagccttcctgcccggcttctctgtctccatcattaattgcacatcatgttcttttggtcactgatgtgaggaaaggcaatagaaccccaatttctaataaatgaagccttcctcagaacaatcctaacaaacctctgggttggtagagcttctaggaatattctgccctgggtcaagatggaattccttagccacccagcgtcagcaggcctgggagtgagcaacgtagcagttcaggaagaagagagagggcagcaggcctccaaagcctgacttcctatgggtggccacatcccaggggagcctggccctgtgaatgaggagcaaaggaaggacagactgcagaacgggggagcagaagggtccacatggaaaggagagacgggcaacagtggttccttgaaactctccctgtagaccgtcatgtgatccacatgcagttagggacactgaggccagggtagggaagtacccagcaaggaatgcagagagagccgctgagagcagcacctttgggttcccgattctgcttcaggacctggactttggtttaactttcctcaacttgcatttggcagattagaaaagataycaaagcaacaagttatttcaggcctagctgacctttaataaaaagcacatatgggctgggtgcagtgactcatgcctgtaatcccagcactttgggaggctgagataggcagatcacttgaggtcaggagttcaagaccagcctggccaacatggtgaaaccttatctctactaaaaatacaaaaaattaaccaggcatggtggcacacatctgtagtcccagctactcgggagggtgagacacgagaatcacttgaacctgggaggtagagattgcagtgagctaagatcacgccactgcactccagcctgggcaaaaaaagaggctggaagggaagggacgtatctgtggagrtgaacagggcagggaagttcatggtgtagagctgggaagtttataggctctgggccagcctttctgggatgggatcatggctccgagtatgaactgtgtgaccttggatgaattacataacctctctgggcctcagttacctcatctgtaaagtgggcatacttggtgaagatctgggaattaaacaaatgaatatatgtaaaggcttggcatagggcatggcatagagtaagttctttgaacatttttaagtctaaaagcccagtggccggtgaagattcacaaggcacgttatcctccagtttgtcttagcactttgtcttggctccagattccttatttcagtttttaaaaccagctgttcgtggtcaggcaggtgctgtcctggcccakctggtctgtcagagctgtggcccakgctctgtcccaccagcccttccctaactggggcaaagtgaggaaggtggagagggagctgccctcacaatggaagccaggccttggctctaaggaactggaaggagatgggaaggggttgggaatgcagctcccakccccacagctgctgaccctgccccgtgtcatgtgctcatccacagtgaatacaaccgtgttcaatgcttcagccccattggcaccagacaccaacgcttctctggtaagtcctttcctcttatgttagacatttgagtgcttttgtttgtaggaggagggagaaaagattttggaaatgagaccaacttatggcctcccagacttgcagaggtcaactccagctgcacgtcagggtcacctgcagagctttgtaaatgaacacttttttcttaggtatatactgtaaacatcccacttaaaaacatgcctcattctgttaaatccatgtttttttgtgcgttttttttttttttttgagacagggtctcactgtgttgcccaggctggagagcagtggcgtgatcttggctcaccgcaacctccatctcccaggttcaagcaattctcctgccacagcctcctgagtagctgggattacaggcacgcaccatcacgcccagctaattttttgtatttttagtagagacggggtttcaccatgttggccaagctggttttgaactcctgacttcaagtgatctgccggcctcggcctcccaaagtgctgggattacaggcgtgagccaccgcgcctggccccctcatgtgtattaataatatgatacgagctgggtgtagtggtacacacctgtaatcccagctactcaagaggctgaggcacaagaattgtttgaacccaggaggcagaggttgtggtgagccaagatcgcaccactgcactccagcctcggtgacagagcgagaccctgtctcaataataataataataataataataataataatatgacacgcacacaaaggaaggggaagtagagatgagggatggtaaatagagcctcacaaagctgtaagcaaagcctgccattcatttttctgccttcttccttctctttctgcctaggacccccaatttcyagcagtgccactctccagccccagagagtttattagtgtttcttcctcaatgaatctaatgtgtcctttgcacaccttagtctctggggcctaaggtatggtctgcctttcccagtaatgacagtggtcttcaggagccagcatcccagcctaagtggcttaatgatagaagttcaattccagatgaaggtagcacctggtaggacttgggggacatttgtgagcttttactgtctccaaggttgcttcttaagttattcctgcctaggcaattgactgctctgcctacacacatcctagttggcaatttaacttaatatttttcaaagattagggttttttttttttttgagatggggtcttgctctgttrcccaggctggaatgtagtggtgtgatcgtatcatcactgcagcctcaaattcctgagctcaagtgatcttcctgcctcagcctctcgagtagctgggactacaggcatcagccactgtgcctggctaatttttaagttttttgtagagacaaggtctcactatgttgcccaggctggccaagtatcaaattttgagagagaaagaacagaatcagtcagtgcctatttctgaatccctattatatgcaaggggccatgtgcactgaaggctaaaaaagacatctaagaaaccaacacagaacctgtcctcaaatttgtttttaatatatttgtagagaagaacctgaaaagttatgggacagcataagcagaatgtaccatgcattaaatataggccaaatgtgtacatcaatcttgaaggcaggaaaggaggctgctggagaggccaagaaaagcctcaaagaggaagtagaatgcgatctggtcttcaaggttgggaaaaagttggctcagcagagaaaagcacattccagactgaaggaacagcatagacagaagggcaagagaggaaaagcacaaaacctgtgcagaggctagtgggtgggctaggccagctaagatggggtgagggtggggcttggaacactgtctcacagtacacatcagagtgtgtctcacagtacacatttatatatatatatatataaatttatatatgtatatataaataaatttatatataaaaattcactgttgtgtatgccttggattttaggcatctgagacaccaaggtggggaatggctgaaatgacccaagaggggactgacaagggaggtgatcccccatatatgaaagggtgtgacagaggggatggaggggagagaataaagatgagacactccaggaaggaggcgtccacaggacctgtggttggttgatgggagccaggcatcctgcctctgcacttttcctacttgctagcacagcagtgcatcctagaacacaatgaagaaacacatgtgagctcctaatcttcctagggagcttgtcattccttgaaccagcccgtccccaggaacatcactctggggggctggggtccctcagagggtgggaaggtatgctggctgcctggggactgcagtgggaaggacacagctgactcatcaggaagatgctgacccattctctcctgtgcttggtctccaagtacaacctccttaacctcacagcgttggactggtccctgctgagcaagaaggagtgtctgagctacggygggcgcctgcttgggaattcctgcaagtttatcccagacctggcgctcatgtccttcatccttttctttgggacatactccatgaccctgaccctgaagaagttcaaattcagcygctattttcctaccaaggtaagctcaccctgcagttaggaggggacctgcagtcagacagctgctgagtcccccagagagggttctggtccaccgacaggatggactccatgcgagcactggcccactggggtttttcaagttaagtcagagagaactgtgttcccttgttggctggtccccttgacaacacttggtattgtcaggcttttatctttagtctttgtctatagtagtatctcattgtgttttttaaatttttcatttccctgatgactaatgaagttgaaaatacagctattcctgtgtttattggccacatgcccagttgcctttctttttggaagtgtctgttgaaatctcttgcacattttgggttgtctgcctttctgatttgcaagagtttgttatatattctgggtagaaatgtttttgtgattatatgtgttgcaaaatcttctcccactctgtgactgtttttttctttttacatccttaatggcatcttttgattaacagaaattcttagttttattgtaattgaatatatcaaactttcctcaaggcaaatattggacagcagatattcttgtatgttaccttctaaaagcttcattgtttttcctttcatgttagatctacaatccatcagaattgattctgatgtgtactgtgagacagtgtttctttgtgattttatatagtcaattgttccagtattttttaaagactattctttctccattgctttgcaatacttcctttgccatatatcaaatattcctatatgacagggtctgtttctgggttctttattctgtttcactagtttatttatatatcagtatcacagtcttcatttctgtagcttataagtctttatatctttgtctcccaagctctccccttttgtcctttttatataatattttcttggccctttgcatttccacatgaattttagaatcatcttaaatttcaccaaaatgaaaacttgttggaattttgatgggattatctttgcctctgtttgggaagaattaacgtctttcaaattttgagtttttctgatttatgaatacagtatacttcatttattttggtcttctttctctccataatgttttatacattttgatctttaagtcttgaacattttttgttagagttattcctaggtacttgatttttttataccgtcgtaaatgctaactgctatgttattattattttattattattattatttttgagacagagtctcactctgtcacccaggtgggagtgaaatggcatgatctcggctcactgcaacctccgcctcccgggttcaagtgattctcctgcctcagcctcccaaatagctgggactacaggcgcctgccaccacacccggctaatttttgtaattttagttgagacggggtttcaccatgctggccaggctggtcttgaactccttacctcaggtgatccccccacctcagcctcccaaagtgctgggattacaggtgtgagccaccgcacccagccctaactgctgttttaaattttattttctacctgtttgtggctggaataaaagatttatgaaaacagcacttgcatacataagcagtaactgtgccgtggggtggggggtactcggaagaatttaagcaactctttcccaccgtaaactccattagcagtctcctaaagccatcttaactaagtattacagctgctactgctactaatcataatgataaaatctttgaaataaatagttgaatttttcccagattttctaaagactaaataaaaggtgctttaggaagcttcacagtatataaactgagtaaaaaaatagtttgcttacaacacaaatgcaccatcaagacaagttctcttccttcctgcccacttccagtccagagcacatccctcaatctcctcttatgtaaaaattctcaagcagtcactgtatctgagagtatctatctgttgcctacaggatgaaaagtaattcatgtggcatgaaattcttgtgccaacaacattttttccgtcacattacttaaaaattgctcagttgggccaggcacagtggctcacgcctgtaatcccagcactttgggaggcccaggcaggcggatcacgaaggcaggagatcgagaccatcctggctaacatggtgaatccccgtctctactaaaaatacaaaaaattggccgggcgttgtggtgggcgcctgtagtcccagctacttgggaggctgaggcaggagaatggcatgaacccgggaggcagagcttgccgtgagcaaagattgcgccactgcactccagcctgggcgacagagagagactctgtctcaaaaaaaaaaaaaaaaaattgctcagttgccttctggaatttccggttgcagagaggaatgaggccacaccattttatactcatcagattggtagacagatgaaggtcttgggacaccagatgttggagatggaaagcagtaggtgggaatgtagacagatacatccaatttggagagcaactgacactctctgattaggttggaccatatgaagttgcccatatttgactgtttcaacctacaaaaaaagtcaagttcatgtggtttaacttaataagcattcatatggttttgatgtatatgctaggaatattatagaaaaggaagtataaacccagcacactacttggttctgctgtgactaatatttatatgatcatgataatataaagctgttactaattttcaacttttggaattgacttacagataaaacacacaagccatgtgtttacggaacaagaaatgattgttctcagcttcgacaatggaaaggtcaaagtggaggtgtgacaggaaggaagaggggaggaggagagaggtggtaggaggatagaggcagtggtcctcaccttgcaagatggagaatgagagatattagccaaagctaatggaaggagatgtttaattattatcacttgaaagtacaaaggaaacccataggagcttaaaattaactatcaaagattaggaataaggaaaggacaggaggcacagtgtaagtaaaggtaaattcttatcaatagataatcccttaaattagtaaatgaaaatattaaagtatatgcatattagttaatgacatggagggaacctctggaacaagtaaaatcaagcagacatagtggatagatctggaaggcggggctggattgagaaaaggggaggtgggagactttgcttttcctcataagtattttccactatgtgggtttttaaccaattacatatgttatgttaataacaaatttaaagagaaaagggggatgcagggaatgaagtcaatgtactgtcacctgcccctgcccttcaaattgccttctttgaaaagatattaaaaaggccacagggtagacgttgggggaccatctgtcctgagacttctggacatagagttggtttggaggggaggtcggaggacattgattcagaatgggcaggaaggtcaggttcagaacttggtctaggaagggcctccaggttcagaacctggcctaggaagggcctcttgagaaacagcggaacaagagactcttggtggacaaaaggtctgagtgtagccaatgatccccagtggaattggggagcctccctcctagcccaggtggggtacaacaacctgtcacaggcttgtaggaactaaggtttgcttcagagtccagcccttgccctcatcatacctgctgggtgccccagttcagactgtcataccagaacacatcttcagcagtggctgccatggccatatggatcataacagmtcccacattgaccaccatatgccaagcactctaaatgtgtcacagttcacttacacctttgagggagatactaccatcatctccattttacagagaaggaaattgagtcttggagagatgacacgcttccccaagctcacacagttagcaaggagcagagcctggatttgagcctagttctgctgccttcagagcccagactgtaatagttcacctctttgctgccggaggactggggctgcctggagctgggtgggtgctttactcacttcttttacttgctcatctcctgtctgcaggtccgggccctggtggctgacttttccattgttttctccatcctgatgttctgtggaatcgatgcctgttttggcctagaaactcccaagctgcatgtgcccagtgtcatcaaggtttgcccctttccctcgctctgggcatccagtctgcctgcctaccagctgcagattctttcccctctgtgctgatcaaactctcttctcctcttggccaagagaccattttagttctctgtgtgccacctttcctgaacacaggctcccaggagccagtcctttgaggtagggcggggaggggtaacatattcaccaggaaatcctgatctatagtcacgaggtgaggaaggcactggaattcaccctccaacccagcagaagcctcttgattcctatttgagtgtctccagttccctgacctctagcaatctataagctgggccaaatgggatccattgaaactgatcccttagaacagtgattctcaaagtgtggtcctcagaccaatatcatggcatcacagtcacagggaactcgttggaaatgcaatttctcggccccacctgtggaatcagaaaagctggggggtgggaccagcaatctgcattttaacaagcccttcaggtgacttggagtatgctcaagtttgagaaccactgcttagaaattacccactagttagaactggtgacatatgcttgtagctaaacycagccctactccctcataagagcaccaaccggccaggtgcggtggctcacgcctataatcccagaactttgggaggccgaggtgggcggatcatgaggtgaggagattgagaccatcttgggtaacggtgaaaccccatctctactacagatactaaaaaattagccgggcgtggtggcgggcgcttgtagtcccagctactcgggaggctgaggcaggagaatggcgtgaatccgggaggcagagcttgcagtgagcggagatcacgccactgcactgcagcctgggtaacakaacaagactctgtctcaaaaacaaaaaaaaaaagaaagaaagaaagaaaaaaaaaagagcaccaacgatctcaccagagtagggagtccagattctagaacttaccctccctgtctttaaggttttttttgttgttgtttgtttgtttgttttttgagacaaagtctttttatatattctcctcattctgaacatgcaggactgaactgatgttcagcattttacagacaattctataatgctcccagacaggtgactcaggagaggcagaagcagctggccctgggcccacccatttctttattcttttctgctgggcctcattcctgctgtttgttatttgcagcaggtgactgtgctctctctcctggctgccctctgaccttcacctccatgtttcctgacaaaccccagggctgttgcagcaaattacctycttagttttacagacactgtctgcatgcatgctccttcccatgtctgaatttagtctaaagttgcagctacctaaggtgtttaagggaaaagattgcacttgaaaagtacccaaagtcagggaaagttgaggaggtgggacagcaggccaggcgacaagtgccctgggacaagggagagaggaaagggcccctctctgtttgctcccactcagccaacrcggcctgaccgaggctggttcgtggccccctttgggaagaacccgtggtgggtatacccagcaagcatcctgcccgccctgctggtgaccatcctgatcttcatggaccagcagatcactgccgtcattgtcaaccggaaggagaacaaactgaaggtaaggccggtactaggagcagaggcataacctctttcttcccacaaagtcagaaagagcgaaggaaggacatgatgcttctttcagtactttgggccaggaaaatatgaggacagagactagagttcccacttggtgtgttgagggggaaatgtgacctccagatgtgggtaaggccaccagggctggagtgactttctgaggaccaggaccaaactaggctgggccactgggcacaggctctctgtctttcccaaagtgacctcgagttcttatgagaatcagcagatcctgacaggggctcagcctagaacactgaggcagaggaacttccttagccttcctggtctctgcaactccccacccagcctgtgagcctgagaagactcgggtcaccccctcccccatccaggtctggaccactttaggtgtggcctgtcccagctggggcccctcaggaaccgcaaagaccctgtggccaccttctgggcccttctccccagagacccaaacccagggcctctccaagcttgaacatccctctcttctatgacccataccccttaggcagttcaccctttcagatggggtggcaggacacacccacctctgcaatccttgcaaggagcacctcaggccccttcagtatcttctggaaggcagggggtccttgaaccatgttccacagaatggttgcatccaggaggaactggctccccagaaacttctccctcccccaaccccgctcctgcagaaggctgccggctaccatctggacctgttctgggtgggcatcstcatggctttgtgctcctttatggggctcccctggtacgtggctgccacggtcatctccatcgcccacatcgacagcctcaagatggagacagagaccagtgcccctggggagcagccccagtttctgggagtcaggtaggaggggtcagggcctagggatcacccaatggggaggggcccactcggggaggagaagctggctttgcctgccacaaaaggatttggacaaaaagggcccccgctctgacggcccaagaaccacagggacaggagtgctatccctggagggagggaaggagagagacagaagtccagctctaagtggggctttttacctactgggctccaagcagtatgcataccccatccataaatatgcacacgtgccagacactcatcttcatcagccacccaaggtccccacaaggcttcgtgctgtcctgcccttttcctcttcctcaagaccctccaggcccctactgccctgatggccctcctgcgggttcaggtcctgctcagtctctattcctccagaaggctgtcctgggatcacccccgctccccagtctgtggccctgcctgttactcctgttccttcacttgcctcttctctcacgccccatggtaggcagagaagtacatcttcagccccttagggcctccagggcgagaccacaccaaaccctggctttctcctacgtggctgccctaagaacttctcccactatcttgagatacttggaccgcccagcctgcccgaatgaggcttctctgcccgactgcagggctcacctgcctcccacccctgacacctgctctgctggtgtcctcttccccagatcctcattcattgtgccccacaaaaacgaaatcttaaaatcaaagggcagagtaatagcattttatctcgcatgtatcctcacaataggtgccattattatctgcatatactgaggctcaagatgggcaggctcctgcccaatgccacataactagcaagtggcagagccaggatccagtccacatcagtcctgctcaagccccccagctacaagccactacactaagcggcctccctcaatgctcctgcaagatgcccttgccccagtcaggggccgcctgtcttcccacatatggttcagctgggcctcaggcaaccaggcagagcttcatgcagaagccctcaaggccatggccttggacacaagcttcaggtgcccacagaggggcaggagggccagagtagttgccaggcatttcctggtacaccctgaccatgtgttcttctctgccagggaacagagagtaacyggcatcatcgtcttcatcctgacgggaatctctgtcttcctggctcccatcctraaggtgaggtcctgcactgtcacctagggcctcgttgcctgagaaagcagagcggatgccttaggcagggagggggtccccacatggctagggatcactggcctatcagccccctaagaaaggcacagtcttrgccgggcatggtggctcacacctataatcccagcactttgggaggccgaggcaggcggatcacctgaggtcaggagttcaagaccagcctgaccaacatggtgaaaccctgtctctactaaaaatacaaaacttaaccaggcatggtggcacgtgcctgtaatcacagctactcgggaggctgagacaggagaatggcttgaacccgggaggtggaggttgcagtgagccaagatcgcaccactgcactccagcctgggcagcaagagcgaaactccgtctcaaaacaaaaaaaagaaagaaaagaaaaagaaaggcacagtcttactaggccaaagcaatgtttccacactgtcaccgccgttttctgtgatactgcagttttttatcatcaccaatcctctctcccacccatcccagggccactctcacctttctggaggatactcttccctctgaaagttctgccaagttgtagccctgcttagatcaggaacttcctgaatggggtgtgtktccacattgccagggtttggggctcatgaagtttaaaacttgcagcaggaggccaaacatggtggtacatccctgtagtccggctactcaggaggctgaggcgggaggatcacctgagctcaggaagtctggggactcgagtgactttttcccacacagcttgaagctcctcttgcttatgtcccaccacaacagctaagagactaagtcaagtaggggtacaatggaggcaggcgtcccccacaagggtctctttctggagagactccagaaagcaaggtgttcccaccaggcttccctgctctccactccagccaatcgcccatcactctccctttcccttgatcagtgcccacgtaagactttcctttcttgaattaagtttacctgtaattgcctcaaccttttgccgatattatttttcctctttgaatatctcaaaacagctcatgaccaggcatggtggctcatgcctgtaatcccaggactttgggaggccgaggtgggaggatcacttgagaccagcctgggcaacatagcaagacccccatctctacaaaaaatacaaaaattagccaggcacgatggtacatgtgaggcatgatcacttgagtccaggaggtcgaggctgcagtgagccatgatcatgccactgcactccagcctgggcaacagagtgagacctcttctcaaaaaaaaaaaamaaaaacctcattcagaggtgaccttgtaagaaacaaacgctaaagaatgatgattctggctgatgtatttacaatggaaaatatttctggcttgagaattggtgctgggcatacccgagcagtaagtaggaggctggcattttttaagggatatttcccttgtgggggaaacaaattacacacaggagggcaagcattttgtttattgaaaaatatattttaaatggccagggactacttacttttgtagagagggttctaaggtgccattgtgtatgtcaattttgacactgtttaacatacaagtatttgcattaaaaagctcgaatcaggctgggtgtggtggctcaagcctgtaatcccagcactttgggaggccgaggcaggtggatcacctaaggtcaggagttcaagaccagcctggccaacatggtgaaacccgaaaccctgtgtctactaaaaatacaaaaatagccaggtatggtggcacatgcctgtagtcccagctactcaggaggctgagacgggagaattggttgagcccgggaggtggaggctgcagtgagccgagattgcaccactgcactccagcctgggcaagacagagtgagactccgtgccccccccmaaaaaaaaaaacaccttcgaatcggccaggcatggtggcccatgtctgtaatcctaacactttgggaggccgaggtgggaggatcacttgagaacaatagtttgagaccagaatggccaacatatcgagactctgtctcaagaaaaaaaaaaaaaaaaaaaaaaaagctcaaatctaagaacagacttctttaggggcaaaaaattcctctaaagccctcctagtgttggcatagtgctctgtgctctccggagtgctctaacatgaccacaaggaggaacagcctctgctcaccatggggagccacagctgcaggtgaaagagagaaggtaaggggcagaaacagctgagagagacagcggaagaatgctttgaaaggctgtgaagatttggaatcattcttgtagagtgggatgaattctatgatcccatttttgaaaaagcaaacaaattgcctgtgtgcaagtttggagggaaggatacccgccaaactattggtggttagttggtgatgagtgctgattagtttacacacttttgttctgcttcttttgtatgtgattgcgtatgaggcatgatttctgtttttttttggtttttttggggggcgggggggtttgtttgtttgctttgtttggtttttttgagacagagtctctttcgcccaggctggagttcagtagcacgatctcagctcaccgcaacctccatctcccggattcaagcgattcttctgcctcagcatcctgagttgctgggattacaggcatgtgccaccacgcctggctaatttttttgtatttttagtagagacggggtttcaccatgttggccaggctggtctcaaactcctgacctcaggtcatccacctgccttggcctcccaaagtgctaggactacaggtgtgagccaccacacccggccggatgcgtgatttctgttaagtgtcccgggtactcgctgctgatgtagatcagctcattaaaagtccccatgcccctgcaggctgagcagttttaggggaccctcagctgaggctggaggtaggaagaagctgggcaggaatgaggagggggcagtctgtggagtcttctcactttccagaagrcatttctttagccagaccacatggcctccgcacggtgcagtgaggggccaggccaggagagcagctgcatgctgggccagctaccccagccagagaaggggcagtacagccccagtgaccctcatcttcacccctgcccacatcccagttctgctgactctctgttyccccaaatatccagtttcctagctgcctctgtggtcaggagccactgtcatccagaacagggtggccaagggccgccccaggcagaggccgatccaaagctctgctctcattttagtgtatccccctgccggtgctgtacggagtcttcctctacatgggcgtggcctccctgaatggcatccaggtaaggctttccctccagatcccttcatgatctggagtcaacattccatgtctggttccatgtcaccaagacccccaattcagttgtcccaattgtccccaattgtcctaattcaatgaaagaataatagtaataatgatactaccacttactgatgctatcaggcaaaataaatatgttaggcacttcataggcctcatataattgaatctatgtaattaggtcctctgatccccattttacagatggggaccggagggtcagaattcaaaatccagaagaagctgactccagtgagcatttcactgtacctctctctcttccctaaggcagctatgcagaagaaaacatttttgttttgttctgtatttactgtgaaatcccagaattcttaaacagtttgtgttacaattaacttgcactttccctgaatatggacaatgtccattttgtggccagctccagggctcctcccctcacccagggctcaggaccctttctctaagaccccattatgcatccgcctagacacctccagcccccctcccgtgcatccttaaggcctgagcagggggcttcccctctctgagaccccacccaggcaccccttcccctagtcccaggacccagcrggccctcggggtctggctgcctggctgagcccccgctgtccccctagttctgggaacgctgcaagctcttcctgatgccagccaagcaccagccggaccatgccttcctgcggcacgtgccgctgcgccggatccacctcttcaccctggtgcagatcctctgcctggcggtgctctggatcctcaaatccacggtggctgccatcatcttcccggtcatggtaaagtgggcacgggcttccccctcctgcctggcaggttggcctgggcaacccagaggtgcagcgcaacctcccctcctgccaccttctgccttccygtcagctgtggcctggctccctcgggtcacggaggctggcacagaatgacctgatttgagttgtgagtccaggccagatggtgtggggtggggcagagaggaggcggaggaaggaatgtcagagccgctcagtgagaacccaggagccaccctacctcctggctccagggagggacggagaaagaaaatcagttcaaccaggagaccgagttcccactgccaaaattccaaccagtctcagaagtcgatgcgtactaaatatagatctttccaccattcaagatagctaaatttaaaaagctaaatagtgaagtaggggggcaggggaagaacgagggtcagagatcaagaacaacaaaacccaatgatggtatatataaagcttgagcaagggaaaggttacaggtctttcactattcttgcaaatattgtataagtttgaaattactccaaaataagaagtgaaaagaatgcaaagccaacaacatgttgcatctggccccctagataactcaccgagggcagtgacccaggcccttgccaggagcctggagtgtgtcagcaaatgcctggggaaagcctgagggctctggggtaggggacaaagtaaggacactgaggagaacttgaagtgcacactgctgggaggggtctagtccatggttcttgacccgggctgcccatgaaaatcaacccagatcaacaaatcagaatctctagggaaacccagactttggtatttttatgaggtccacaggtgagcatagacctgcagccagggttgagaacccccactgcagggaaagggagatagatcctcccccyagtgccctcaggggcctcagagctggcgaagggaaaggcagtagtagtcatgattagcatttactgagtactgttccactgagtccacaccagcccccaaagcactaataaccccgctttacagatgagaaaatgaggctcagagagcatgagcagagtgaccctggacacacagccagatagggcagggcaagacccacaccctccacctattgatttttttgtttaatttgcatacagtaaaattcaatgtgtgggtctatgagttttggcaaatgtacagagtggttagagacataaattctcaggcattacctgacctgctaaatcagaaactgggggaatccagtgatttgtgtattaattaacaagccctccaggtcctggtgcatgctcaagtttgagagccactaatttatgtatttattttatttgtttgagatggagtcttgctctgtcgcccaggatggaatgcagtggcacaatcttggctcactgcaacctccgcctcccggtttctagcgattcttctgcctcagtctcctgagcagctgggactacaggcacccaccaccatgcctggctaacttttgtacttttagtagggacagggtttcaccatgttggccaggctggtcttaaactcctgacctcaggcgatctgcccacctcggcctcccaaagtgctgggattacaggtgtgagccaccacgcctggctgagaaccactaatttaaagaataactgtagttctccagcccatggcctttctgaggctccccacttcggctgtcacaggctccgtccctcttggtcactggtaggcatggtcaytcacctgaggggccagacaagaggaactacggtggagggaaagtgaataatggcttatgggagcttcragacggctccaaagacaccacaaaaagtccctgaactcagccgactgagggagaaaaaaatctatgcctgagtttgggcattgagaccacagttttctccaaattctcacaaaactttagtctctctccaccacagatcctgggcctcatcatcgttcgaaggcttctggatttcatcttttcccagcacgacctggcctggattgacaacatcctcccagagaaggaaaaaaaggagacagacaagaagaggaagagaaaaaaaggggcccacgaggactgtgatgaggaggtggggaagatgtgaggccggggcacagaggagaaattgagagaccttctctccacttttgccagggacagggagagggcggcttcttgggtggcctgcagcagtgcctcggcccagtccaggatgggctggggcatctgcttgtcttggtctggggtgttgagggctcttctgtttatgtgaatatcctcagggtgggccagartgaatgagactccctgtccagggaaaaggtgactggccatgcccactctttccatcactgtgggctttacggccgtgatcacagcaagcgggttcctgtgggaagggccaggaggcagctccagcatggaaggaggttatgaagactgacctccaaagagtggagcagacttggggagaggtgtctaatggggccttataagtagactggactccagacaggcaggaggggctgggaacaagttttgcttgcgcctttgcctagggtattgaggacaaagatggggaaagaggcaggtatcctcgccaaaaggagactggctacatttcccagatgtctgggacaacatggttgccccatctgcccctcttctcccatggtcccttcccatttcatccccaaaacactcagggagtcaacagacaaggggccagtccagaaattatagtgaatcacaaaacatgaggcagaaagattcttaattcatgtgttcattacttatgatgaaactgtccccacaaaaggaagtgacttacccaaaatggacatgtagctacatttctaagaaggaattaagaaaataattcctgactttgctggtttctgatatgctaagctgcctgtgccatctcctaatgctgtgcttggttcccaatctcccaatttgacccaaactcacgtccctgcatccaccctgtcctgttctcgtgattttgccttgtgcagatgaaacctgttcaaggcaaatcccttctgactggctggtggtgattaaaccatcttctgatcagtcagaactcccctggtccttaattactgtgctcttccaggaagagtcccataatgcatgtgtttgtagatgatttgtaaaggtgggttctgaaaacaaagaaacagagactaagtgccttttaaagacaaatacttcttttgttgatactttcaataaatatctgagtggctaccacatgccaagaactattacagggttgggaaaaagaatctctgaattatgatatatcaatggaaaaacaggattcaatttatacaaattcattttacttgtcttatagcaacacagttgttgtgtgaggttcattcccaagtgactggttgctgtgacagataaaactgttttgatgagtaacattcctggaagagttccggtctgtctgatggtgtgtataggacagcaggctaactgtgcccattccccttcagtggaccccagggtatttgcagcatcccctaactgtttagaggtgaacagaatggtggtttgcaatgttcatgcatgcattttccatcttggcaagaaagccaagttgttggccacgcgcggtggctcacatctgtaatcccagcactttgggaggccgaggcaggggggatcacaaggtcaggagttcaagaccagcctggccagcatggtgaaaccccatctctactaaaaatacaaaaaattagccaggtatgggggtgcacgcctgtaatcccagctacttgggaggctgaggcaggagaatcacttgaacccaggaggcagaggttacagtgagccgagatcgcaccactgcactccagcctgggcagtagagcgagactctgtctcaaaaaaaaaaaaaaagaaagccaaattgttgtgttggtgtttatcctcttttcccactgtttttctccagccccagttccctcctccctcgrttataaagattcccatggaaagtgtccaatcagatccccaaaacggtatccactgcattgccagtaagtaaaacacatgatgtctctcccttcttactactagtcctccatgtctttcccctaggaactttcatctgtaactcagggggatctaatcattttggatgctagagcagcagtccccaacttttttgtcataagggacaagttttgtgcaagatagtttttccacggaccagtagggagtggggaatggttttgggatgagactgttccacctcagattctcttaaggaatacgcaacctagatcctgcatatggacagttcacaatagggttctcacccttatgagaatctattgctgccactgatcccaccggagctggagcacaggggttaatgcttgctcgcccatgctcacctcctgctgtgcggcctggttctgctactgttccatggcctgggagctgaggacccctgcgctagaagacctttgtccttggcagagatcaaagagaactgggccaccaggactggtactccaaccagatggaaaccccagagcaaagcctgcagactcgactaattctcactttagttgaggcaaaatccctcattccctcctttccccaggtgtccccagatccctgtggcatctcctggccctcttctatgttgtttcagaccacatcagtccaaacatggcccaccaggcctcccatgttttccagtggctgttgaaatggttgagggytcagaaccaagcttttccctttagagaaataggtagcatagcacttgggttataagtcaggcataattggaggtcctcgtggtggttgtgctgtgcctctgtgtgaatcctcagcaccttctcagcagacagctgagagggaggctgcctaggagggactgggcattgcttatggaaatcctgggagattatattactgcctttaacccctcccagcctcagctccctataggtggccagtcctgtcatccaggcaacatagcctgtcccgaggtcttctgaaagatccctaccttagtcccgagccccgtgcttctaatacagggcttgccaccctcaaagacagattaggggtgggtagccagggcatccttcccatcagcactgtccatcataggtacctcaagatcttgagtttctcagactcctcccccactcctatttctctcttccctggccctcccatgcctcayaccccctagccctggctgagcaccttctgggtgaaggagtaactaagcccgaagccacacatctctgaggccccgtattcctcttgcatagtgttggctctagggttagagaaggaaaagaaaggaaatggtgggggaagcccggagaaatatggtkctcaaacctgctccacrtctgacatttttcattttcctgccaggaaaaagatcttccagttggagttactcactctgattcttccttcagtgacacagaacttgaccgaaggtaaacactgttaggtagactccttgcgtattaggtaagagactaggaaatggccgggaaggtggagggtctaggatttcccaagctagctgtcctctcagtagaaggcccttgctggcccccaactgggagtcaaaggctgacaaacctgactcatcattcagggccaagaaacaagtatgtcttcttactgacttaacaacatggttacaacacacaaaggtattcaactttagtaaaggaaattcttataaaagattaggtagaacaaaaattgaaagtaaacgttgtggcccagcacggtgcctcacacctgtaatcccagcactttcggaggccaaggcgggtggatcacgaggtcaggagatcgagaccatcctggctaacatggtgaaaccccgtctctactaaaaaaatacaaaaaaattagctgggcatggtggtgggggcctgtagtcccagctactagggaggctgaggcaggggaatggcatgaacccaggaggcagagcttgcagtaagccgagatcgcgccactgcactccagcctgggcaacagagtgagactccatctcaaaaaaaaaaaaaaaaagaaaggaaatattgacagaaaacagaagccaggcgcggtggctcacgcctgtagtcccagcactttgggaggctgaggcgggcagatcacaaggtcaggagatggagaccatcctggctaacatggtgaaaccctgtctctactaaaaatacaaaaaattagccgggcatggtggtgggcgcctgtagtcccagctactcgggaggctgaggcaggagaatggcgtgaacctgggaggcggagcttgcagtgagccgagatcacgccactgcactccagcctgggcaacagagcaagactccatctcaaaaaaagaaaaaaaaagaaaacagaaaaactaggcatggcttaagtgtaatatcactgaaagccaggataaatgaacgctaaggatcgaaaccctggggtactctgtagaatgaattaacagcagggttaattagcaaaggtcagaaagggtatggaggaaagccaacatcagagatcaacatcaaagctaacatcagagatcaactggagatgggaactgttaagaataggttcaaggccagttgccaggagcccccatgccaacaatgtgattgttcttcatgagaagccacccgtgaaaaaggtgagactccctgatgatgacatagtgggggcaaacacagaaaagatgaatttagaggcaagaaaggctttacttcattgttacttgggaagatgccaggggcagtcccactcctaccttgtgccctagaatggacagggatcaaacagtaattacagcacaggctatcccaagtctagaagatcaatctccaggcacagagggcactcatccaagagatttttggggaaacggggcaggggatcttctgaattataaggcaaagctgctatcccaatgccagggtgaaacgacacacttttccccagttcaaccctccctaagcagcagtcccaaagatgctctagcccaaagtgtcacctgtcccagttaatctccaccttccttctcatcccacttccccagtcaggctcctatatatgtgatgccattgatctttatacattagtatacaccggtattatgagaaaagcagtctatcttattttcatttataaaataatctacatgaaattgactgactactcccaatttcaggcagtagagagaaaatttggaccaggttaggggtttccaaaaccctgttaaattacacaaggccctaagacagggtcagaaatgaagaaactttggtaactggagatggtatctcccaacctcattggtgttttactgaatttatgaaaacagatggaggcaaagatcactaaatagcaagattctgtttcagtgaaaggctctgcaacatgatctggtttaacaaagactaagcatcaatgatctaccaggtgcgatgcttaatccctgaggatgtggaaagaaaggcatgcaaacaaagacagagcaccctgtgcaagaatatcggagtacacagggagggagtagcctcgttttgagaatctaagaaagggaaactggaatctgccagacatagagcggggcagagaaaagaaaaggcatttcaggcagtggacacaggcccgaagtaccatttgaaaacacacacaaacacacacacacacacacacacacacacacacacacacctccaaagagcaaagaacactgcaatggatggggcaaactaagcaggcaggactacaaacacagaagactgtgtttgtgtttgtgagaagacaagacactcctgtcttctcacactaaggagcttagattctttgaacccaatgaggaatcaccaaatttgtgatttcaaaagttcaccttggcagcaatgtgaagataggtttacagggtgagaccagatgcgtgactatggctgaaggccaagccaataggaaactgctcattctggcatgtgctgagagttcagaagcgaagatggaagtatttgcattagagccctgctctaggggatgggttcaaaacaccaagaactacgtaatccttctttcctacttctcgttcagcatcaccttgcacttcaaaatatcctgtccagcttcacctgctttcagctactcacggaacccagtgttcatggtgccacaggtgaagatagagatggagtcagactatgacttcacagacatggataaataccgaagagaaactgacagtgagaccaccctctaggatgaagcagcttctcccagatgggagatggagagcctggcttagtcttcactgggagggtcttaacttctctgtgcctgtttccttctttatcaaacagagggagtccgtctgcctatagaaaactggagatctattgatgaaaagtattgcttagatgcaaagctctcccctttgtagtaattaaaatacctaaagctaaatattatattttattttaaaatgcagttcagcatagaaattctaacatttctttggaaataaaaaaatgcttgtttccccaaaccatagctaagataaaggggcaatagtcaattcatatttaaaacaaatatcaatttaaaattgtttaaaggttagatttaaatatagatgttctcaaacaaacttgtaatatacttttatgtcactagaccatctttggaatatttggcaattctgcatattaagaaatgctgaaaaggtcctatcttttctccctgtcacatccaatttcctaagggttatatgaaaagtttgaaccagccgggcacagtggcacacgcctgtaatcctagcactttgggaggccgaggcaggtgaattgcctgagctcaggagttcgagaccagcctaggcaacacggtgaaaccccgtctctactaaactacaaaaaattagccgggtgtggtggcatgcacctgtagtcccagctattcgggaggctgaggcaggagaatcgcttgaacccaggaggcagaagttgcagtgagctgagatggcaccactgcactccagcctaggcaacagagtgagactccgtatccaaacaaaaaaaaagtttgaaccatctgcattatgggccttgctccagaagtgtgactggggctttcccagattgaaaagccagttccaaaactctgttaatgaaagaaccaatgcatctgagtggataaatgtttctaaaataaaatagttcttgttaaagtgaaatttgaaaccacatgttaaatcaaaatgatcctttaaattagtatcactggtttttcatacctggaatcacatttcatgatacatttgggtgggtcctccctgcaaattttcaatgtttattcccaaagtcaaactcccattcatgtgaacaatacaggttagacagaggtaaggtcacattttacattacaactttgcaatattaatcaacctagtactttaaaggaatgattgaaaactatttgggaagataaaaaccagtttcaatgaagcaaacctattcctcatgaaacttaagatcagtcattttatcttcaatccacatttaatgaacaccaaccatgttgatttaatgcctactatgaccctgacagccacagtgcatctgacacttactttctccaaaacaactatgatttaaaccttgagtaaatcacttgaaccttgaggttagagttactatatttgctcaagatgacaaatgcaggtgctttcttttttaaagaaaaatgacactagatcattaacaccttgagtataggacaggtaattgcctctgtaattcccagcgtctagtgtagtgcctggtccatagaaagctctcaataagtgtttgattacatttaatctcagagctcccttccaagggatactgccaagaggtaaagctccaaacctctactcttactgagagcagaatttcttagaatttccagaaccatctcctatgcttaagtataaattcttgtcagacacagtggctcacacctgtaatcccgctacttgggaggcagaggtggggggaatcagcagaggtcaggaggtcaagaccagcctgggcaacatagtgagacccatctctaaacaaatgtttaaaaattagctaggcatgctggcacacacctgtagtcccagccatttcagaggctgatgcaggaggatcgtttaagtccaggagttcaaggctgcagtgagctataatcatgccactgcactccagccagggagacagctggaatccatgtcttataaacaataataattaatttttaaaaaaagtatttatcatccacaccaatcctggggaagctaacaatccacccttaacacatttcagttttaaaacctggctgatctggaatagaactttgtccaaattaaattgtagaaatgctatggattcaagagtaaacctgcttgattaatcaaacaagctggaaaactactgttaatttctttgttgtaaattgatcactgtaattttaccttacatgtcatttatattttgtatatacatgaacattttaatttccatagcttttaacaggttgacataatacttctccatgcagtaagtcagtcattttttccacttgtaactgtaattcaataaaatttaatcctgtctggtcatcttgctccacatttaataatctaggtaagcaggcatggattagagacataagctatacgtcacttacaaaaacatctccagcaaactatctaaacttctttaaactccagagaactatcaaaagaataacgccagctggcagaagaacgaggacggaggtaggtcaactcaattgtttcttctctttctgcctcaagctgcctagagcaggagctacttctgctcgcatgaaagccaaaagccaaaacagacaaacctatccctgcctcaagtattttacagattaagctcctagcttggcacaacctgttgtgatataagactgtaggacaggccaggtgcagtggctcacgcctgtaatcctagcattttgggaggccgaggcaggtggatcacttgaggtcaggagtttgagaccagcctggccaatgtgatgaaaccccatctctactaaaaacacaaaaattagccaggcatggtggcatgcacctgtaatcccagctactcaggaggctgaggcacaagaattgtttgaacccgagaggcagaggttgcagtgacccgagatcatgccactgcactccagcctgggcaacagagcaagactcagtctcaaaacaaacaaacaaagagactggaggacgaggctggtttctccaaagctctttaaacctctgtttgggtgtgggtggcccaggcctgtaatcccagccctctgggaagctgaggcaagaggattgattgcttgaggccaggagttcaataccagcccaggcaacatagcaagaccccatctctacaaaaaaaaaaaaaaa

SEQ ID NO: 96962 - DNA, 11838 bp, Homo sapiens
atcttttcattctttcactaatcttggcatttcctaatattaatgaaaataaaaggaaatgagagtgaaacaacaggtttactttcctctattagcttctgagggaaaaggaacggacaagagcaggttgggcgaccagctggcatttgcccctctgtcaggtgacctcgacatccccgcattgcagaaaggaccctgagagctgaccttacctgtgtgcgtctccccaacgaaaactcttagcaagtctgacttacagaccactagaaacccgatcgggacccagaaaccccactcccaggtattcacccaagagaagtgaaaacttccattcatacaaacacctgtgcgtgaatgttacagcagcttattcataatcgtcgaaacctggaaatcgcccacatcctttacttggtgaatagataaatagaccacactccatccagacagtggaacatttctcagcaatgaaaaggaaccatacaacaatgtgggtgaacctcaaatcacgatgctcagtgaaagaacctggactcgcacgattccactttcaggactcgctggaaaagcaacgggagaacagagcagtggttgccagcggcagcacgggagttctgggagtgacgggatgttccctatcttgactgtggtcatggtgataggactctatgcatttgaactatataccaaaagaagtgaattttactgtgtggacatttgaaagtattttttaaccattaaaaaagaaaaattgaggctgggcacagtggcttatgcctgtaataccagcactttgggaggccgaggcgggcggatcacaaggtcaagagatcgagaccatcatggccaacatggtgaaaccctgtctctactaaaaatacaaaaagtagccgggcgtggtggcgggtgcctgtagtcccagctactcaggaggctgaggcaggagaatggtgtgaacccgggaggcggagcttgcagtgagccgagatcacaccattgcactccagcctgggtgacagagtgagactccatctcaaaaaaaaaaaaaagtgacttcaatttttccttctcctcctcttggcttgtaaaagggttacccctgcgtggcttcagagtgtttaaaatcgcttacctcctcttgaggaggtttaacattctttccttttttgagacagagtcttgttctgtcacccaggctggagtgcaatggcttaatctcggcccactgccacctccacctcccgggttcaagggattctcttgcctcagcctcccaagtagctgggattacaggtgtgcatcaccacactcagccaatttttgtatttttggtagagacggggtttcatcatgttgcccagtctggtctcaaactcctggactgaaacgatccacccacctcagcctcccaaagtgctgagattacaagtgtgagccactgcgccaggcctcaatattctttctaataagctcacttgggttcttattcagtgtattccttttcccaggctgctgtaacaaaataatataaactgggtggcttaagacaacagaaattgatttctggaggtgagaagtccaacaccaaggtgtcggcagggctgtgctccctctgaaggttctagggaagaatcctccctcacttcctccggcgtccagtggccacaggcatcccttggcttatagcctcaccactgccatctctgcctccatcttcctatggccctctttcctgtgtgtgtctcctaggcatcttataaggacaccagccattggacaaagagcccaccctaaatccaagatgattttatcttgagttgaaaggacctgattacatttgcaaagaccctgtttccatattcaggtcacattcacaggaatggaagagtggtgggggaagggagaggttaatacttgaacatggccgggcgcggtggctcacgcctgtaatcctagcactttgggaggctgaggcgggcagatcacgaggtcaggagatcgagaccatcctggctaacacgtgaaacccccgtctctactaaaaatacaaaaattaggccgggcgcggtggctcacgcctgtaattccagcactttgggaggccaaggcaggtggatcacgaggtcaggagatcgagatcatcctggctaacatggtgaaaccccgtctctactaaaaatacaaaaaattagccaggcgtggtggtgggcgcctgtagtcccagctactcaggaggctgaggcaggagaattgcgtgaacccgggaggcggagctctcagtgagccgagatcgcgccactgcacttcagcctgggcaacagagcaagactccatctcaaaaaaaaaaaaaaaaatacaaaaattagccaggcgtggtggcgcacgcctgtagtcccagctactcgggaggctgaggcaggagaatcacttgaacccgggaggtggaggctgcagcaagccaagatcgcccactgcacaccagcccgggagacagtgtgagacttcatctcaaaaaaaacatacttcaacatgtctcttggggagcacaattcaacctctatattcggtaagactctcttagacagggcagggcaacctggccctgcactccttggccatcctctgctgtcacccccagacctcaggcacggcggcccctcgctctcccccgtcttttctctccgggcctctgaagtcaccagttctccatgcccagccgtggcctgtgggagggagctgggggggtgagctggagctgccacttagcggcagagtcgcaaactcaccgttcctaatgaagcccgtcgcttctccctcctcctcctcccagcaagcaggaaaaaaaaaaaaagttgactactgagaccacatgctaggaaatccatgggtgggtgctctagttgacaagtcccacttgagcccagccatattcggccattcttgcactgctatgaagaaatacctgagactggggaatttataaagccaagacgttgaattggttctgcaggctgtacgggaagcatggctgcatctgcttctggggaggcctcagggagctttgactcacggtggaaggcgaagtgtgaggggtcacttcacatggtgaaagcctgaccaacaaagtggggggtgaagcagccacccatttttaaacaaacagatctcgcgagaactcgcgatcgcaaagacgcaaagacggcgccaagccatgaggcccccatgatccaaacacttcccaccaggccccacctctagcactggggattacaatttaacatgcgatttgggcggagacaaatactcaaactctatcaccagccatccctgctgagatgccggactcatctgctgagatgctgcgatgtgagtgaagtgacttggaacctttagtgcagcccatatgccagctgaataccatcaaatgccctcagtcagtgccacagggagaaacaaaatctcctagcagagcattgcccaaattcctgacccatgaaatacatgggcagtggtaattataaagaaagtggagttaattgatcgagtggcatcaatgggctgaaggaagaaaacaacaggcctcaggacagccatttatcaacttatagcccaaggtgaaaatcaggaggggcttccagagacgtgtttaaagacaggtcacattgtgctgataaaggcctagaacctgatgagaactgtggagtttgaatcagggcagatgaacggctgtgctaagtgctgtgctccagtcaaggagcacagaagtgaaggagcggacactgtcacctagggcagggaacgtctggatagatgggctcaagagtcttgaattctaggctgggtgcagtggctcacacctgtaatctcagcactttgggaggccgaggtgggcagatcatctgaggtcaggagatcaagaccagcctggccaacatggtaaaccctgtctctactaaaaatacaaaaaagtagctgggtgtggtggcacatgcctgtaatcccagctacttgggaggctgaggcaggagaattgcttgaacccgggaggtggaggttgcagtaagctgagatggcagcactgcactccagcctgggtgtcagcagagtgagactccgtctcaaaaaaaaaaaaaaaaaaaaaaaaaaaaggcttatgcctgtaatcccagcactttgggaagccgaggtgggcggatcacaaggccaagagatcgagactatcctggccaatatggcgaagctctgtgtctatcaaaaataagaaatttagctggtcatggtggtgcacacctgtaatcccagctactcaggaggctgatgcaggagaattgcttgaacccaggaggcggaggttgcagtgagcggagatcgcgccactgcactccagcctggcgacacagcgagactccatctcaaaaaaaaaaaaaaaaaagtgatgttgtgtggccagtcctgatatccatcgagatggctccttgaagcgtggaagcaatacatgagagggagataacagaacgatggtggcagggcactgagaaggagccaaaggcctcggggagggggatgtgcaggcacagatttattatgcaacatctgagaagccagatgaccgtatttctggagggttcaccagagactgctttgactagtggggggtctaggcatcaatgggcaatcggcatggccgtcctctgaggccagggtagaagagggcaaataggactggagccgggctcggaaaggtcagcaggagataggattccagagagcagagattcggttgatgtgactgtcagaacaggagcaaggccagagtggctgccagggatcctgggcgcacaggagtctctggtgaatgctagtagaccacggtattcccaggggccacggaagccccaacactgcttgactgcgctaagcaaagaaagatcaaaaacaaaaaacgagcgaacaggacagtaatggcagctgctgatggaaaatcccaacccctcatccagtttccaggcctaagctaggcctcagaaccagaggtcactgactgaaagggaggctgggtcccctccagaccacaaatatttgcagtagtaggctcctaatctttccccaaaggggccgacagcatttccaagaagcaactgtacactgggaaaagagaaatagtagatacatcaagggctggcgggtacacagtctgagaggccctttggagtccagaaaagtggagtccttggacttcatttctcccctatctacacttgctcccttggcgatcacaccctctcataactttctttttttttctctttcttttttttttgagacagagtctcgctctgttgcccaggctggattgcagtggggcgatcttggctaactgcaatctccgcctcctgggttcaagcgattctcctgcctcagcctcccgagtagctggaattacaggcatgcactaccacgcccggctactttttgtacctagtagacacggggtttcaccatgttggccaggctggtctggaactcctgacctcaagtgatccgcccccctcggcctcccaaattgctgggattacaggcatgaatcaccgcacccggctcctctcgtaactgtcaataacctatccatggccagtcccgtgtgtattgctccaggcctgacatctctgatgttcagtctgttcagtctcatatctaagtgcccacctgacatgtcccctgagtggcctaatgggcatctcaccacggctcacagagaactgatctactccattttcacccccaagcaggcccctctcctgcagtcttcccatctcagtcaatggcaacaccatcctcttagttgctcagactgaaaacctagcagccatcctggatttctctcacactgcctattcaacgtgtgaatgcatgagtggaaagctgagttcgcactcgtgactggccggggtcaactctgacattcgctcccactttcgcgcgctgatttatctctgagcggatgaaggttgggccatggcgggcggggccggggaggcgggcttggagtgagggggcggggcaggcgccacgaaaacgcgctcgcgccggcgccgaaccgcaactcccggcggcccccgcgctcccgggtggcaagatggtggcgcgcaggaggaagtgcgccgcgcgggacccggaggaccgtatccccagcccactgggctacgcaggtgaggggctccgggacgcgagaccgggggcggtcaggcatcgccgggaggtgtttgggggttggcgacggccgggggtccccaggagcggccgcacggttgggtgtgagccccggtggcccgtggccccaggctccgcaggtcttgaggctccggggtcccgaggacccaggcggcgcccttctgcctgctcactctcccggggcgagcccaacttggtccacgcttcccttgggtgagcccgcctctgtccacactctcacccaggacaaacccatttccgtccacacccgctcgtccaggtgagcccatccccttctcatcgcctctgctcctagtccatcccccatcagctcttacctgggctgttataggccctcctactcggttgccctccttctcctcttgcccctgcttctgttctccacccacgtgccagaatgttcttttaaggacatttagattcgatcatgtctgccgcgcccacgataggcgccacacctactgcattccctccagtggctttatcaggtagcttctaaaacaaaaaccagacttcttaacctgtgtgggccacgtggtctggctggtgccgacctaaagctctttctgttcctctgagggaacatgctttttcccccctctgggtttttgcacgtgctgtgccggtttgttgcacagtggcgttctggcctgagctttaatgttgcttcctcaaagaggccatccgtgatggcctatggaaagaagacctctgccaccccatcaccctgtaatgtttccttcacgattgatacaagtttgctgtatgcttacttgttaattgtcttctccgttattgcaactgagcttcctgagttcagggaccgcagctctatgccaaccggtactgtgacggaggtgtgagaaaaatagaagcagttcctagctttatgaggattacagtcatgggtgtgccagcgattaaccaaagaatctcatcaatatagcctccagactgttaagagaagctgtgaaggcacaggcagtgggatctgagctggcaggaggggcggaggtgatgctaaggctctcctgaggaagcgaggtttgagctaaacctgaggtgagcgggagggaagagggtgacacgccaggtagagaggccagcatgtgtgaggccctggtgtacccgggggaacagagaatccaaggtgctgggggaagatggtacgagaagaggtcacagtgacaggcagggtctcacggggcttccagccatggttaggattttggcgttgactccaagagccgcagggttcgagcttccctctcattgcgcccccatctgtaatcattgcccatttatcttctctctccctgcaccgccttgggaggccctcctgggcagactcttagagcccgcacaggctttgccaaagagtagggtaaggggggttggtgaagggatggatggatcgatgaacagataggactagacagggatgtggagaaaggaagttgtgtgagtgtctcgctggcctcagctcagggtagcctggccatccctcccctcccatttcctttccagctattccaatcaagttctctgaaaagcaacaggcttctcactacctctatgtgagagcacacggcrttcracaaggcaccaagtccacctggcctcagaagaggactctttttgtcytcaatgtgcccccatactgcacagaggtgagctagtgtctgtctgggaggrgacctgtkggctcaaggtgggggctcccatggcctccaccaagtccttggtggtgagacggacacagctaatgggagccccagaggagagtgtcaggagggctaccgtgatctccagtcaggaaactggctttttaaagatgtctttaaaagtataatcctgccaggcacggtggctcatgcctgtaatcccagcactttgggaggctgaggcgggcggatcacctgaagggaggagttccagaccagcctagccaacatggtgaaatcccgtctctactaaaaaataaaaaatgagccaggcatgatggcatgtgtgggtagtcctggctactmgggaagctgaggcatgagaatcccttgaacccgggaggtgtaggttgcagtgagccaagatcgcgccactgcactccagcctgggcaacagagtgagactctgactcaaaaaaaagagaaaaaagtacaatcctaagtagcccaaggcatttttacatattacccaaagttgtctgaattacgtgttttcttccagattgtacatgtccataatttaaaagtaggaaagtataagaaaataaaaagtgcctctaattctatccaaacacaactgktaattttttttttttttttttttttttacaaaaactaagctaagggaattgctggatttatttatttatttatttatttatttaatttatttatttattttgagacagagtctccctctgttgctcaggctggagcacagcgttcacaactcactgcaacctccgcttcccgggttcaagtgattctcctgccgcagcctcccaagcagctggaattacaggcgcccaccaccatgcccggctcatttttgtattgttagtatagacaaggtttcaccatgttggccaggctggtctcgaactgctgacctgaagtaatccgcccccttcagcctcccaacgtgctgggattacatgcgtgagccaccgcccctggccaagggaattgctggatttgttttcaaaaaagaaaccctaatttgtaaaagattcctctaaacttagagaaaaaaagaagcatgtagaagagggggtgcgagttctgaccttttttgaagtgcagcatgtgtgccgggaagggccccagtggcagatgtccagctcgctgcatcccagagacagaacatagctgtgtagtcagcrcccaggtggagacacagcagcacatcccagaacccccgctgcctccaccacagacaaccaccatcccaactgtcayagcatagggtcactactgctgattcaggtagtaaaacttgtcataggaaatcagaataacagcaagaatgtccccacctgtctccagtgagagagcaggaatatgccgggcacagtggctcacgcctgtaatcccagcattttgggaggccgaggcgggcggatcacctgaggtcaggagttcaagaccagcctggccaacgtggcagaaccctgtctctwctcaaaatacaaaaattagccacgtgtggtggtggtgggcgcttgtaatcccagctgctcgggagactgaggcatgagaatcacttgcaacccgaaggtggaggttgcaggactccagcctgggctacagagcaatactccaactcaaaaaaaaaaaagagcaggaatatcaacctccatattgtccctggggaacaggtcggaggccatggtgcccacagtctcccggcttgggcagatgtggctgtggctgagtccttcagcggcgctggacccctggcagcgccacccatggtgcagggaggctttgggatggccctgcggatgctcacacttggcttccctctccctgcggcaggagagcmtgtcccgcctcctgtccacctgtggcctcrtccagtctrtagagttgcaggagaagccggacctggctgagagcccaaaggagtcaaggtcgaagttttttcatccmaagccagttccggtgagccgccaagcccggggttccactagagtgaggsgggtggggcactgtccccagtgtgttgggggagctggcagtggracatcagagcattctctggtcctgagcccatcctcaccgtgtgtggtgtaagagactgtctgggtgacaaagcctgcgattctttgccagatttgccacatccttgcacttcctgcctggctttttctgtcccgtgttaaagctcacggaccgtctctgctggccacctgcagggccttccccggctcccctcctgcttccccactgagggagctccttccccaggcttgggggccgggtctccaggagcactgttgttcacagctttcccagtggccctggagcccacacctcctccccacacagtggcatctggcatggtgtgtgcgcccaggcctggcttccaaaaacctgccctggcccagggcgacccctgtgtttcaccgcatccctcccgtgactggaagaaaagaagcctctgtatcccctcttcctggggaggagttgggaacagccgtcacttcccgcagaagcaggattactggaagtgtggctgcctctgacctggattatgggatggcctgtggttctcttcatggctcaggaatagcctagcaccatctcccctggtgtagctaccacctaggctgagggcaggcctggagaccttgtgccagacgtgggaaggagcccccaacctctgacatctctctctcttcagggtttccaggtagcctacgtggtgttccagaagccaagtggggtgtcagcggccttggccctgaagggccccctgctggtgtccacagagagccaccctgtgaagagtggcattcacagttagtactgcgggaggggtctggcgcctcctttctgggctccgggttggcaggacactctatggggacagtgtctgaatgtcacaagccaagtccatgctccctgagagcagcatgtggaggcctgggcaggaggaccatggggctgtgtctgggtccccagggagtcattagcctgagcccctggcacagagcggcacaggcatactgggcaggcagagcgagggcgcagcttgcagcccctgggatctccttagcgcctgtgccccgggccctgtgggaaaaggtcccaatttgcctggcaggccctggggtggggcccaaatgccaggcctgaggaagccccgtttccctggctcccttttcctcagartggatcagtgactaygcagactcygtgcccgaccctgaggccctgagggtggaagtggacaygttcatggaggcatatgaccagaagatcgctgaggtagaggccccrcggggtcggccgagccccgcrtcgcccgtgtggctgtgggaaggtggcgccccagagggagggcrgtggtgkcctgtccttggccactctgtagaggccaggctccctgtttccctgctggatcctgggctkcctggctgggtgacacatgtagtctccacatgtyctacagtggagaaggaggcagtgccggcaggtccgtgccctccccgccmtccttagccccaacactgtgctgggaggaggggagcagccctcccctgcgggggctcagggcrgttctgactttgggaggagggygtggagggcgcgctgctggaggctgcaggaggtcccaccggaggatgggatcaccttccttgcagsaagaagctaaggccaaggaggaggagggggtccctgacgaggagggctgggtgaaggtgacccgccggggccggcggcctgtgctcccccggactgaggcagccagcttgcgggtgctggagagggagagacggaagcgcagccgaaaagagctgctcaacttctacgcctggcagcatcgagagagcaagatggagcgtaagccaccccr

SEQ ID NO: 96963 - DNA, 13770 bp, Homo sapiens
gaacaaaattcacttgttttatctacagctgagttagttcctgtgtgtgtcctgtacaaatgtctgcatggaccttctccataggggtgctgtcagcatctcctctgtctggaaaatttctgcactctgaatctaccatttcccagcagggttgacaatcttgacctctaggcagagctgttggagctttacttcctggcatattttgatatcctgccctggcttttcctccaagttccaggctctgtgaatccaatggtctacttgacatgtccacctgaatgtctcataggcatcacacacttaataagaccaacagcaaactcttgaactcttgacttctgcatcactccagacttgctcttcctggtcagtaactggcattatcctccactcagctggccgaaccaaaaactcaggggtcagccttgagtcctcttcctctgatgtttttacatctaatccatcctcaagtcctttcagctccaccaactgcccacttccctcatctccatggccgtgaacgcagtccaagccaccagcatctcttgtgtacacttgcaatagccttctattctttttgcatctacttttgcctccataatccattttccactcagtaaccaaagcaaactttacaaaaaacaaccagactgttggcacaaggaggccctctctcaccactcctattcgacgtagtattggaagttctggccagggtaatcaggcaagagaaagaaataaagcgtattcaaatagaaagagaggaagtcaaattgtctctgtttgcagatgacatgattgtatatttagaaaaccccatcgtctcacccctaaaactccttaagctgataagcaacttcagcaaagtctcaggatacaaaatcaatgtgcaaaaatcacaagcattcctatataccaataatagacaagcagagagccaaatcatgagtgaactcccgttcacgattgcttcaaagagaattcaacacctaggaatacaacttacaaaggatgtgaaggacctcttcaaggagaactacaaaccactgctcaaggaaatcagagaggacacaaacaaatggaaaaacattccatgctcatggataggaagaatcaatatcgtgaaaatggccatagtgcccaaagtaatttatagattaaatgctatccccatcaagctacaattgactttcttcacagcattagaaaaaacctactttaaatttcatatggaaccaaaaaagagccatatagccaagacaatcctaagcaaaaagaacaaagcttggaggcatcacactacctgacttcaaactacactacaaggctatagtaaccaaaacagcattgtactggtaccaaaacagatatatagaccaatggaacagaacagaggcctcagaaataacatcacacatctacaaccatctgatctttaacaaacctgacaaaaacaagcaatggggaaaggattccctatttaataaatggtattgggaaaactggctagccatatgcagaaaactgaaactggaccctttccttataccttatacaaaaattaaagacttcaatgtaaggcctaaaaccataaaaacccgagaagaaaatctaggcaataccattcaggatacaggcatgggcaaagacttcatgactaagacaccaaaagcaatggtaacaaaagccaaaattgacaaataggatcgaattaaactaaagagcttctgcacagcaaaagaaactatcatcaaagtgaacaggcaacctacagaatgggagaaaatttttgcaatctacctgtctgacaaagagctaatatccagaatctacaatgaacttaaacaaatttacaagaaaaaaacaaacaaccccatcaaaaagtggacaaaggatatgaacagacacttctcaaaagaagacatttatgtggccaacaaacgtgaaataaagctcatcatcactggtcattagagaaatgcaaatcaaaaccagaatgagataccatctcacgccagttagaatggcgatcattaaaaagtcaggaaacaacagattatagagaagatgtggaaaaataggaatgcttttacattgttggtgggagcataaattagttcgaccattgtggaagacagtgtggtaattcctcaaggatctagaacaagaaataccatttgacccagcaatcccattactgggtatatacccaaaggattataaatcattctactataaagacacatgcacacatctgtttattgtggcaccattcacaatagcaaagacttggaaccaacccaaatgcccatcaatgatagactggataaagaaaatgtggcacatatacaccatggaatactatgcagccataaaaacggatgagttcacgtcttttacagggacgtggatgaagctggaaaccatcattctcagcaaactaacacaggaacagaaaaccaaataccacatgttctcactcataagtgggagttgaacaatgagaacacatggacacagggagggcaacatcacacaccgcggcctgtcgggtggggggctaggggagggatagcattaggagaaatacctaacataggtgatgggttgatgggtgcagcaaaccaccatggcacgtgtatacctatgtaacaaacctccatgttctgcacatgtatcccagaacttaaagtataaaaacaaacaaacaaataaacaaaacccaaaaaaacaaacaaaccctcccatggcttctcagcacgtgtagaataaaatctgcaaggtcacagcctccttgatccttgcttccctgccccagcatgcccttctttctttcctcaggcttatcccaagattgttttcctgcctcaaagcctttgacttgctgctttctcttgcctggatagctcctgctagtaatataacctcctcacatctcagccacatgttgtctccccagagagacctttcctgcccaacttgtccaaagcgctgtctgccccattctttcagtcatgttacctgcagccaaaaaaatcttaataggtatgctcttcattccattacattttcttattttctttacagcatgtcttattaggtaagatgatctaacatatttattcttaatactttataatgttctttaagtacatatttatttataaagactttcagggctttgctcaaatgtcacctccttgatgagacctttccctgccacctttcataccacgtcgaccccctcacatgtctgttggctgttctctgttttctttttcctctgcttagcacttagccctagaaagcatatacattggacttacttgtcttatgcattgtcttcccctttacaatggaaactctgtaagtgctagggcttttaaaatatgttctactgatggctgtatctctaatgcttagaacagggcctagcacacagtgggctttcaccaaatatttgttaataattaaaaaaatcttccactggaatccacaagaatgttcactgtattgtattgtaattatttttaaattttctgtatattatgatgttttgacatcttaaaaaaacctctctggctagggagagactgccctgagctagacaattctgagctggccagtgctcagccaggagaaagcttttgatatgcaaattaaccaatccagagccacgcctcctcgactttaatcatctcagggccaggtaccacccctataggcaaaaggtaccacctctgtaggcaaaaggtaccaccgctgtaggctgaaattattcaaaccagccagtcctaaactgttcaccctgccctactttgcctcttccatggaaacctcaataaaggctatggccaaaccttcccctcgttcttgcctaccatcccctgatcaccttgagtctttcccatgtagccctgtttggcatgctgggcctcctgtctctgtgagcataataaacttgctttttcctaatcctgtcctgtgagacctcttgtagctgcacctgactaaccatctcataaaagaatgcaaaacagacattcccagggcctaaaacactgacatacagtgggtttatgcagttacaggtgaaaggggacatgcttcatgaaaggagttggaaactagaaaaagccagataagaaaggagacggtgggagatgaggataaaggtagctgctaagaaatgagtccgttggaaaaaactatagagacatcaaagtatgttccactttatattttagaaaggtctttcctaagcatacttgcaacctccagttataaaactgagagtctgaaagctctgaggagcctcaagtgaacactgtatggtgggattagatggaatgggacatgaggggatggtaaatcaatgacaaaagtgttactgtttattttcttttcaaagccagagagaagtcatatggagggggagcagaaaaaaatgttactaaattcagcagcatgcaatagtgataattgtatttcttgcttatgcatatacatgagaaactgattctgtagagaaattagaaagggaaaatagtgaggagtaaaaaattcaatcacacaaaacacatgaacatcaaaaaagtgtcctaaggagaagggtctcagaatacctgcgccttcccatatcttgctcgtggactctgagggtatttgcgtactagttctttaaatgcattcactgcttcctcaatttttccctgttagaaagacaaaattacataaataaaataaattaaaatgaataatcaatcaatattgttatttaatattcagcaagtggttttgtcagagtttcctagattccatcctgagtgtaaagatagttttatctaagattttaaaaaaagctatattaaggcaaacagaaaactagtaatgaacacatatttacttcatttttaaaaagacagaaggacagaaaaccaaacatcgcatgttctcactcatagatgggaattgaacaatgagaacacttggacacagggtggggaacatcacacaccagggcctgtcgtggggtggggggatggaggagggctagcattaggagatatacctaatgtacatgacgggtgaacgggtgcaccacatcaacatggcacatgtatactgtatacatatgtaacaaacctgcacatggtgcacatgtaccatagaacttaaagtataataataaaaacataaataaataataaaatgacaaaaaaaaaagaaaatggcaaggatgcccaatctcgcaaaaaaaaaaaaaaaaaaaaaaaaaaagacaagacacctgataaatgatgtaatatgtggttttgctaaagaaattgaattttccctcaatataagtacaggttctaccatgttctcgaatattgtattagtctgttttcacactgctataaaaaatacctgagactggataatttataaaggaaagaggtttaactgaatcacagttccacgtggctggggaggcctaaggaaacttgcgattgtggcagaaggcaaagaggaatcaaggaccctcctgacatggtggcaagagagagaagagtgaggagcgaagggggaagatccccttataaaaccatcagatctcatgagaacttactatcatgagaacggcatgggggaaactgcccccttgatccaatcaccttccaccaggtgtctctctaggcacatggggattatggggattacaatttgagatgggacttgggtggggacacagtgaaaccatatcattccacccctgatccctcccaattctcatgtcctcacatttcaaaacacaatcatgcctttacaacagtcccacaaaagtttaactcattccagcataaacccaaagtcaaagtccaaagtctcatctgagacaaggcaagtcccatccacttagaagcctgtaaaatcaaaagcaaatcagttacttctaagatacaatgggggtacaggtattggataaatgctcccattcaaaatgggagaaattggaccaagaagcagcttctccgctccttctaggatctccgcctggttcggcccgcctgcctccactcctgcctccaccatgtccatcagggtgatccagaagtcctacaaggtgtccacctctggcccccgggccttcagcagccgctcctacacgagtgggcccggtgcccacatcagctcctcgagcttctcctgagtgggcagcagcagctttcggggtggcctgggaggcggctatagtggggccagcggcatgggaggcatcaccgcagtcatggtcaaccagagcctactgagcccccttgtcctggaggtggaccccaacatccaggctgtgtgcacccaggagaaggagcagatcaagaccctcaacaacaagtttgcctccttcacagacaaggtacggttcctggagcagcagaacaagatgctggagaccaagtggagcctcctgcagcagcagaagatggctcggagcaacatggacaacatgttcgagagctacatcaacaaccttaggcggcagctggagactctgggccaggagaagctgaagctggaggcggagcttggcaacatgcagaggctggtggaggacttcaagaacaagtatgaggatgagatcaataagcatacagagatggagaatgaatttgtcctcatcaagaaggatgtggatgaagcttacatgaacaaggtagagctggagtctcgcctggaagggctgactgacgagatcaacttcctcaggcagctrtacgaaaaggagatccgggagctgcagtcccagatctcggacacatctgtggtgctgtccatggacaacagccgctccctggacatggacagcatcattgctgaggtcaaggcacagtacgaggatattgccaaccaaagacgggctgaggctgagagcatgtaccagatcaagtatgaggagctgcagagtctggctgggaagcacggggatgacctgtggcgcacaaagactgagatctctgagatgaactggaacatcagccagctccaggctgagattgagggcctcaaaggccagagggcttccctggaggccgccattgcagatgccgagcagcgtggagagctggccattaaggatgccaacgccaagttgtccgagctggaggctgccctgcagcgggccaagcaggacatggcacggcagctgcgtgagtaccaggagctgatgaacgtcaagctggccctggacatcgagatcrccacctacaggaagctgctggagggcaaagagagccggctgragtctgggatgcagaacatgagtattcatacgaagaccaccagcggctatgcaggtggtytgagctcggcctatgggggcctcacaagccccggcctcagctacggcctgggctccagctttggctctggcgcaggctccagctccctcagccgcaccagttcctccagggccgtggttgtgaagaagatcgagacatgtgatgggaagctggtgtccgagtcctctgacatcctgcccaagtgaacagctgtggcagcccctcccagcctacccctcctgcgctgccccagagcctgrgaaggaggccactattcagggtagcactgggaacaggagacccacctgaggctcagccctagccctcagcccacctggggagtttactacctggggaccccccttgcccatgcctccagctacaaaacaattcaattgcttttttttggtccaaaataaaacctcagctagctctgccaatgtcaaaaaaaaaaaaaaaaaaaaaaatgggagaaattcgccaaaacaaaggggcttcaagttccatgcaagtctaaaatccagtgtggcagtcattaaattttaaagctctgaaatcatctcctttgactccatgtctcacatccaggtcatgctgatacaagtggtgggctctcatggtcttgggcagctccacccctgtggctttgcagggtacagtccccctcccagctgctttcatgggctggtcttaggtatctgcggcttttccaggcacacagtacaagctgttggtggatctaccattctggggcctgcaggatggtggccgtcttctcacaactccactaggcagtgccccagtggggactctatgtgggggatccaaccccacatttcccttctacgctgccctagcagaggttctccatgagggctccacccgtacagcaaacttttgcttggacatccaggcaattcaatacacgtcctctgaaatctaggcagaggttcccaaacctcaattcctgacttctgtgtacctgcaggcccagtattgaaatctgtgttactcttcgatggcctctgtaacaaactaccacaaacttgatggcttaaaataagagaactttgttctctcgcagttttgcagaacagatttccagaattagtttctctgggatgaaatcaagatgatggcagggctgtgctctatccagaggttttacgggaatatttgtccttgtctattcccagtatttcttgatttgtggatggatcactccaatatccaattctgtcttcatactgctttctttctcctctgtatgtgctactttttattttgtcggcatcaaatttccctctgtccctctcttatgaggaaacatgattgcatttaaggcccaactggataatccaggataatctctctatctcaatgtccttaatcacatctgcaaagatccttttcccaaataacataacatttacaggttccagacacatatcttttgggggtctattttcagcctagtatgcaccccatgcaacttaaattgcaactgtcaaagctatttcaatgataattgtgctaaatgtactaatatcagacttaaaacataagaataacaatgttcataacaaatttgataaggtgagatattcctgcttgacactgtcaaggctgttaaaataatgggatattttggctctgtctgcagcatcctttgaatccctgcaagacagaggctctgtggctttcctgaggggccatcagccttgctttcacttcagttggctggcaaagtaaatgtgtttgcttttagtctgaaagaatttcccttccctaagtttttgtatagctccaaacactattgctcaattctaatttaaaaactcagctgcaagacacaaaatgtttgaagaattgcctgaaaatgatctgttcctcaacatagcttataatgttctcctaggaccaagacagttcatgggagagacatggacgtaggccacactgtgttgacatgaggccaatgggctgtgcggaaggataataagatacattcctgcagctgcatggtagaataatccactggtatgatgtcagtggggaagtaggaagttttgcatccatcagtataccttttatgaagatctacagccaaatgtttctctctggacttggagcagaacagctcttctgatgaacaatattaatcttatcttctgattctgttttccatgttgtccctcgaggaattgttgacttcattcctagcatggtttagagccagtggtgtgaactttcaggtatttgattacattttctttactccctccccaccttttcaaaaatcacttacaatgctgtaataataagtgattccaacaaataagcaaatatatttcagtatatcatttcaaaccctttttccagaggtaggaaagcattttaaataataaatattattattttttaaaatagaggattggaatataatctgatctatacttttctggggggataaaaagcgaacacatactttcatgtaacatagtccttgagcctaaggcatgaactgaggctgcactggctctgtgtggagtgtgtgttagttggcctcggctggtccagtgcactaaggtgcatcctctgaaaatactagccataaaaacaaccctaaaagactgaattatgttgatgagtcagtcaataacatagcttcctgttgtttcagaagcaagaattgtatatggggctacttcttcctcttttatttccctggtataaattcaagatgctccttgagaaaaatataacttctccaaaggagcaacactgcagaataccccataactgagccctcctttatcattcatataattacattaaaatccttctctaaagctgctcatatgttttttacaccaaaagtcacctgtgcaataggcactcccatttttatatatgacatttagtatagagaaagtggaggttgccaaaggaggtggcagaaaaagattattgcttcaattctattaagaaatacaaactgaccacaaacagtagatggcttcacttcataaagttaaacaagacagttaactttcttgtttactatcagaaagtaggaatcattccacgtggttagatttaagggaagtgaacaatgactttgctgcaatattctgtggagttactctatttttattggcaaaccttggctttggagcctcacctaatgccagttccaaaagcctttatgctcattggtacactttcaataaacatgcggacgtacattcttgtcccattttagttcctaaccagtgtttttattgttgtttgtttacttaaagcccacttgttcctttattattgcagccaatgtctactgattaaaaagcctattacaggaaaactaatgaacattacagagtctacattcaagtgcagagtagagaaacaaatttccgccaaaaacaaggagatgattaattgaagatatgattaaatacattataataaatatttttgcacccgatgattagatgatatgaccaaggtaagggaacgaataacttaaatccagtttcaatttattgttctcaaaattgtaatatctataaagaaatgcaagtaatatttcaaatatatcgacaaattaaaatataaataaggtaccctgaaaactggaggtgcatgaggttaaccctaagtaagaagaatgtcatttcatctaccaattactatcctgagtaatggactgacctagtttttctttttgcatcaaggagctataaaattaaaaacttgcacttctatgatacttgacagtgttattattattattattattattattttaatctcacttatggctcacgcctgtaatcccagcactttcggaggctgagacgggtggatcacttgaggtcaggagttcaagaccagcctgggcaacatggtgaaaccctgtctctactaaaaatacaaaaattagccaggcatggtggtgagcatctgtaatcccagctactcaggaggagaactgcttaaactcaggaagcagaggttccagttagccgagactgtgccactgcacttcagcctgggtggaggctctgtccaaaaaaaaaaaaaaaaaaattctcatttgatctttaaattgatctttaaaaaactcaattaggaggtagaaagaatatttatcattatcatgtctgtaagaaaactaacgcccagaagagccaagtggtttccccaaagctgcataactagaatgtgatggaggtaggctgacacccgcatcggctggcctgaaggaaagttctatttctctttggccatgtggtagcaattctcttccatctgattcatttcatgtggaatgttcatgtgcctggggaaaaatccactctattcaactgttgtttcttttacacttactattttttttttttttaacaaatcaagagtaatgcctgagtttatttaacaacaaaaccattgcacaaaaaatatcaacctacccttttacggagtttttctgcagcatcaagttcagctttaatagtcttatcaaatttatttaaaagtttaggcttctttttcttaactgaaagaaaaaagagatttttatttttaacgttttttgactagaaatagttattaagcataacaatttacaagtagtgggaaacctgatgctggtctccaccaaagacctgcaggagaaggcacactgcaggctcgccttccatttcctcccctagatggtgtgatgaagtcagtgactgccaaggaaggcaatgcagcccttacctatctgctacaatgtgttcttgggagagtgggtggatagtatactgaaactctccaggatactggcttggtttctgggatgtaaatggtgggtatgactcctaaactctcataatctacttcttggctatgtccaaaatattgtttaaaatagtttttttgaatatgtccacaactttttctgatacagataaagatgaaaatggaaggctcctctcaaggaagtcaaataaaacagaatttcttcgtttagcattcaaggtccttccagtgcatcctggactgaccaccccagctatgttccatacttcagccaaaatagactgccccatgatccccaaataagctttttgtgccatttcttctctttctttctttttcttctttctttctttccttctttctttctttctttctttttctttctttcttctttttttctttttttttttctgtagaaacagagtctcactatgtcacccaggctggtcttgaactcctggcctcaagcgatcctcctgccttggcctcccaaggtgctggggttataggcatgagccactgtgcccaacctgtgccatttcttatgctacctcatttaaataaaaagcctgttctttatcttcttctgtgaaaaacgtgcctatccttcaacaataagttcaaaaccacgctccttataaagtttctcctgaaatcacccacacagtactcagttccctgctccactgtgtgcgtctttaagtccactgcaccctgcgtatctctgttttgtggtccttccccactaggggttttgttataatccttcacgcgcttatcttagtcctaactcttgcagggtggtaccgtgtcttaaaagcaggctgaatctgtttatgtaagcatcaatccattgcttacttagcaaacagtttttggctctgtgcacaacctcagcacccagcaaacaggagccctcctcccgaaggcaaggcacacccagcaggtgagagggccagtcctgctggtgcacaactggcagtgcctgcagagtggatggatgcagagcacttctcagaagccccaagtgacaagagtggaagcttgaagggtaagcagaatgttctggagaaggggagtggtggcagggaagggggcaaagcgggagggatagagacgaattaaaacaatcagaagagaacttcctcaattttctgacaataaacctacagacgttaatagcttcttccctatcttgtcacaaaggaagacgggctgttctttctaaggtcccctctccgccaacacacacacctgtcttgtgccttctgaatgtctattcactctcagcatctctcgtgtgccccctggtgggaatttaataatgcgttaaataatgccaaagtttctgccatcttacagcaaacaaacaaaccagcctaccctcctctacttgccacgctccctcccctcccctggggggcacctctttgtcacctttcctgtcagcactttggcttcctcacccaccacgtgggcagaagcaagtctgccagaggagggaaggctgtgtggttaagcatcgatggcaggggtctgagtcccagctctgtcacctccaagctctgtgacctaagccaagctggcactaaacttttctgggtctcacttacctcctctataaaattagggg

SEQ ID NO: 96964 - DNA, 22308 bp, Homo sapiens
gcgggaagttaggagacaccgtttttcttccttcactgagtggacgctgactgagcatcttctgggtgcaggcagcacaggtgaggcctagccccacttcggggtggtgaacttaagcagacagtaccaagctaagccgctgcacagagggaggccagttcctgctcttggcggcaagtgacagtgggcatgaggcagctggagatggggacagtgttcctgacaggaatcctccccagatccacctgggttgctccccctgtccttaagggtgtgtggcatttggctttgatgatggagagcccaggctctaaaacccctgaatcccagggtgctggccttggccataggaggccccctgttggtaagtatgaacctgatggacacttggtgtgttgggcacttcctgggttgagaatgtttgcagggagggcccagaaacgtggatggctctgttcagcagcagccccacaagatggagtgggagatgcctggggcggatgagagacgcgctgggctccagctcagctctgctgccctctgggaacgcaacataggtcaggccttcagcttctgcggctttttgttcttctctgaaaaggggctgatcacggctaagggcggtttgaaggtcaagtgcaaagtgccgtctcttataaaggcagagcagtggactcctcaggaggaagtgaactgaaccacagtccctctcgacttctttcctggctgcattttcataaatatttgttatttaacatttatttgctcttttttagttttgcttttgctgtgttttgttatccttggatgtgaccttctccaaaataccccttttggttcacgtgtgtgtgtgtgtgtgtgtgtgtgtgtgtgtgaagcagcgtcgagaacatactgtgtgcccatatgctccttcccttgggtttgctttatcatggtttaccttggttttgctttatttcagttctttgatttgttttcttttagcacattgcgtctttgctcggaagatcttcttgagttggtgagaatgcagggccgagtagccagctgcattgcttagatttgattcatgtcacagcataaattgtcttgattccaaatcctaaaccaggtgggtgactcctctgacgagctctcagctgtctcagctgagaaaaataatcatggaaaaatagtttggttgctctagcagcttctaattttgccccttaggtatcattaaagggttacaagaataatttttcttgtttttctctccaacactgataattttttgttaccaaagagaaagtccgtgttacgttgggtattttagctcagcatttgcagggttgcagtttgaaaaacctgaggtcctgcctggacaaggaccgctgttaataacggagctagtgaaggacatttgctggagacagagctctgatctcagagagctgacaatggaaagaattctaaacgagcagttcttcaaaagcagggaggcagtactcgggtgatgtgctcacagctcccataactgggaagtttggaatccccgccccagacatcttcacggtcaccgttgctattggactagaccaacctaagattttatattaacaaagacaatgggagcaacaacttctcttgtcatgttgagctgtctttcgtttttccaaagccttcataaaccagcgtagaccggtgcctgcagtttatcccacagctcagccctcccttgtggctgccaggaagaggtctgggtttctgactaagcctgggctagagcagctgggggctgtgcccagactcattttattgttgactcagggaattctcactgcagtgcatgttttgcatctagtctgtaaagctagctaatgctgcgactatttgattcactttaaattcctccccagggtttgccagggcaggcttcttgaaatctgcatctttggcccagtcaggagggcttcctacttagtgtaaaattttctgcactttgaatgatttttttttccttttcaaattctcccgaagccaatgacgccttggtggcactgttgagctgtgagtggataatggcgtgggaagggccagggctgcctgtgatgcccagagcagtgcactcccgcggcagatcatactcgctcctgggatgtttattaaacacctgccacgtgccaggtgccgttctaggtgctggggacccagcactgaacaggagtagagtctccctggtgggccccagcggggggtgtggaatggcaccaggaggtggttgtggctcactgtgccacagcctcagagggaagctggttcaggtcatgttctgccgcatccagtagtttcacaaatgttaggggaccacctggtctgtagctcagacggcccttcctgcccccataggccaagttcaaagggatccaggaatagatctggaatgttccagatccatttccaaggcttcctttagttcagtagctggccggacagcaagtggccccagcagttctcttgtttgcgtttcaggaagagttgggctgtggaaggacatcttcaccgtctccatgaatgagaagtttgacttggtgtataaacagaagatgggaaagtgtgacctcacgtttgacttttatttataataacagaaacaacaacctgcatgctcacaatacccagacagtctactagccaaaagtcctgtatgcattcatttattccttgctggacaaactctggaagcagcgtgtgaaacagcgggggaagggaagagcggcgtgagcggagggagtgtgatgattcccaaccgaaagcagctgtctcgcctttagaacgtgcagcctctccatgtctgattacaaacagtctccacattgcagttccaatggcctggaccgtaaggataaagcctgtaatatatgcaactagaatgtctgccttttcaaccccgtattatttattgtattttatagagcttttcactggaaatctacataaatgtcagtaaaccaaataaaagttcatttccaaggggaatcaggagcgagccacacccgaatggtagaaagatctcagggttaactctttatttttgtagttttattatctaaggcacagccattctgttctcacttggttctgagatagtggtgagaacagaggatgagttgggtctgttggggggaatctggacacttgtttattctgacggagttcacttcttcagaaccttcctgaaatgagcagaaattgttcactaggtcttcagaatggacgtccttctgccagagacttccagcgggcggctccaaaggcccaatgcagaggagcccgcggagcatgtgctgagggaagtctgcctggtgaggctggcaggtgggagtctaatgcagtcaggagcatttgcatgcagtgggtggagagtcggccaccaaaggaccgagttgcgctcggaatttgagctgaattccacagccttactttgtttcctgaagtgatagcctactaatgctggcaagcagatgcttaatagtaaatttctaaaatccccgggtctttatcattcagtttgttctgtgcacctgaggcgctcagccgtgggaggaccattttgcgagtgtagccctgtttcactcggatcaggttggcacggccgcctgcgtgtctgtccacctcatccctccgtgtatctgagggagtaaaggtgaggtctttattgcttcactgcctaattttctcacccacattcgctgaagcgatggagagtcgggggccagtagccagccaaccccgtggggaccggggttgtctgtcatttatgtggctggaaagcacccaaagtggtggtcaggagggtcgctgctgtggaaggggtctccgttcttggtgctgtatttgaaacgggtgtagagagaagcttgtgtttttgtttgtaatggggagaagcgtggccaggcaggtggcacgtggcatcgcatggtgggctcggcagcaccttgcctgtgtttctgtgagggaggctgctttctgtgaaatttcatttatatttttctatttttagtactgtatggatgttactgagcactacacatgatccttctgtgcttgcttgcatctttaataaagacatgttcccggcgttgcgtcgagcgtttctgcttgtgggggtagaggggtccctgcagcggtgctgtcggtgcttgggacaatatgactgtgggccccgttgacaccccgttccctggggttgacagcagagggaaacaggcccgtgttgggctttgatgaagcagaattcagactttccaggggttcacttctccccattatttcactcaaattcagactttccagggggtcagttcccccactatttcctcattcacctctgatcacttctataaatggggtggaggagaaagggtaaaagcatgggagatgcgggtgcacctgtgggtccaggtgtcgggacctcccagtctctgcctgggagccctgtgttcagcgttgcgcactgtggtgcccgaggccggcccctccaactgtgcttccccactgggaattccaaagcctgtcttcctgatttcctgtggaaggagagtccagggcattgctttccttgagaaagctcgagccttctggaaaatcatgtttattttcaaatgaactacctctaggtctcaggtgaaattctagaaattattttggcacctggaattaacacagaccctgggttaatcaagtatccagtctgctgtgccctagagggcttgccttctagtaatttattaaccacatcagtcaagcagccaggatgcagtcagtgtgcctggagcccaggcagcgcctgtttacccatgtccactcttccctgcgtggtgggtgactcacctcacttcatggagtcggtcattcgactgcacctgctccatgccaggcactgttcccggcactgcggatgcggcaggggacagagaaagccctgcctctgtggagtttgcattccagtggggtagacaggcgacagaacccaagatcagttcaggcccaagcgtgctctaaggggatagggaacatgcccgtggaagaatgggggggcctctgaggagatggtgctgagcagtggggggcctggctgcagctgggtgggcaatgcgctggcaggcactcggttttggaggggtggctgcgagccagctggagggcctcacaggtcatgagatttcagcttttgtactaagatagggagccatgggagggcttattcagaagaacgccacctgctttgcatttttagaagctctcctggctgctttgtgggtagactgcaggggcaagagcgagtggacctttgtcccagctgtgagtcactccatctgcaaagtgaggtgggcactgtctgagagcatctccaaggttccttaggggtctgcagttgcaggccttcgtgtgctggcttctgagcatggttctggctgtgctcacctggagctaaggcagggaaaacaagccaaggcaaaaggtgctgtgaggactgtgagggagccagggtcaggaggagggagccatcaggttggcagttgcatgggagtgcgggtgggatttgagctgtgtcctgaggttgagggtcacctggacaggcagggaatgggagagagtcctgggcagccctcagcctagtcctttgttattttacacaacaatccacagaacattcctgaatgtcagagccctctaagcgtaagccagtggttgcctggtattttgatttcacagaccaattgagattccaaaaagtattttggggaccaaccaacatagcactgacacacacacacacacacacacacacacacacacacttcttgccatagcactgacacacacacacacacacacttcttgccatagcactgacacacacacacacacacacacacaaccaacatagcattgccacacacacacacacacacacacacacttcttgccaagcaagaccctgaactgatctcaaatgatagccttcagctgctgcccctgcccgggctgggcgcgccttgctgtcctcctggctctgacaccaagtcatttggagttcacttgttttccctcgaccccccgctcttcatctgaaaagggatcagcacagattccatggttctctgacctgaagcaggtaagtcaattcctctggtccagtgtcaggatttacacagtggtgatcgtcattgtcctgctcacgtcagaggatggttctaagaacagtgacgctcctttgagcataaataaaacgaggctgtgctggccccatcctcctgccggccagccaggctcccagagtggccaagctgcagttgccagcgggtggtgcaccgggggaggtgcgtgagcactgctaggtgggcatccacaatgtccccagtactgcggagagaccccctcaggtacaggcgccaccacgtgcaggccctgtcctgggagatctcagtggagatcggtttttacccacctctctaggccatggggcagtggtgtttgtggtggaaggagggagcctcaggtgtccagcagctctgcctggccagctccgttctcccgtagagtttggctccattcctgcccattgacatcctcttccactctttattgtacaacgtgcattttaagacagggagggcccctgggtcaggtgacccagcatgacccagctgaggaacagcctctgtgacatccctgacaagggacatcttgtccccggtaagctcaccagctcctgggacagcccctccactctgagccaccctctgcagccgccaccccagccagggccctcagaatcatcacttccctcaactgagccgcccagccctgcctcctctgctggacaagtgcatcccccacactccccagcgatccctgctttcctcaccgccccacctcagtgttgtgtggctgtttcctttggagacagggacgtcctgagagtggggactgcaccgtcagggttttcctactgttcctgcttggcccatggaggctgcatcttcccaaacaagacccagcctggcctcctgtctccttaccctggacccccacttcctgccattgcccccacttccttagtgacatttctttactgccagtggctcaggtcctggtccttcctacaagtgcagcctggctcgtggtcttccccatgtccggaccatcctttccgaggtcactggctttccaaatctaggtgtagctgtgtttccggtgcccttccttctgcccttctttctctgtcccaagcccagaaacgtggtgcccatagagctactgagacccttccttgacactcccatctctccctctcttcctgcatctcttgggcatttaggagcacctgctctgcaaggccctgtgcttggtattctcccccttctaatcaagttccctccattccattccctcggggctctgctctcagcaatcgcccacgtccttgtggaaggaggcctggcagggagcagaggacctgggctctaaagtcccggctttgtccctggctggctgcatgacccaggcatgtatgacccttgccttctctcagcctgtctccatatctgtcacgtggccttccaggtttcttctagttgtcagagtctccagttgatggctaagtgggctttcctggtgtccctggcagcacgctgctttgcccgtttaaacacacacctccataacaaacgggcaaacaaaaggggcggggcagacagtaaacaccgcagattccaagcggtggcttcagtgagactgcttagtgtgagaagtacgcgtgagccgggtctggaaatggggcaggagtcagggagggcacacaccaggtgggcagaaacagaatacgcccaaatgaggacagaacccttccctgccgggagtcgggcgccagctccagtgctgctctgttcctatttgtgggactgcagggaaggtcccttttatgtcataatgaagaggtcacagaccaggtgtcctaaaattccacccagcaggagcatgctgtgcctcttaagtgtggtcacagtgtccagcgactcagctccagagaggagctgatgggtgtgggagatgccggcttttcagccgatgacaggcccggccggcaggagcagagagcccaaggcagaagcacctgccacccagtgtgggccacgggcaccgtctccaaggcgtgctgagcctttgccaaatccacacatcaaacgacaatttgattctcacacttggatccctgaatgctagctggcactgactgtctgagctacagcccttaaatctgtctcctcaccactgaggaaaggagtctgtgctctattaaaagcattttttaaaaaccagagaatgctaaatgtgtttgaaaaataaaaaccgaccaaaaaatacattttatccctctttagagttgttatcttcccatatattcgtggtgctgggcaccagctgggaatgcaagtctgaagactgtgtgagcaaggccccctctgcagaagcagagaccgcattggagccagccagagactcttccccagtccasgcatccccagacactgaagtgaatggttgagggccttttccctgtttctgtctctcaggttgaccctttacaatccatagtacatgcagttcccagatggggaaataatctctcagatccagtttgtggcctggcacccatctcactgccagagaaccacggcttgtctgtgccctccgtgtcccaagtatgcacttccctccgcctgggttgccattccccgacttgacccagcttacactgattcagtgcgatccaggcacgatctactccaagacgcccttgggcacagtccaggcatgatctactccaagaagccctctgccaagggtaggagctcagagctccacttttggttaatattacacctcccttaacatatcccggatacacggccatctgccgggaaagcttcttgaggccagggccatgtctctctcactttccttggcatcaggaacttagcacagaagcagtgctccgtgaagcctgatggctgggagcattcccagagtctgasggatccagccttgccttgtcatgtcagctgtgtccagctgcctccactggctatgcacttggaaggccctctctggcccagccacactgctcactctgagaccttgacctgcacttctaacgttcgcttccctaactgctatggaccrtttggccccttggaaagccttccccgttatctgtaggtgctgccaatccatgtccaccacatgccttgggctggtttaaaaacscaatctcctgggggctgccatgaatgaatcccagctcactgccatcctggacacaactaggcctcagtttttaccaaggaccttaggggggggtcaccagatctggcagacaggctgtttttcaatgggtgatggctgcctccatcctgcgtctccatcacgcccggactctgcagaggaagagaaggccggaccgttccttagcccacagaaggmgtgactggcatatcttcactcccatcatgagacgggatgcagaaacgcatatcttttttccttagaagtgtgccagcagttagagccttgaattcggaaagagtgatgattccctgtagtggtatatcggtttgcatttgctaactgctttcaagttttctttcctgagtagatatttctagtccaagtaggctgtgagcagagtctgtgcctcattcatccctctgttcccatactgtgcattcgttcctaacaggtaatccataaatgcttgttacctaactaaaggcaaattaaatgctaaacagcactaatgacaagctgttgcaagatcccggctctcaggaaagaattacttgtggttgtcaggggcctgcctgttgcccaggtgtaggaaacatgaaacacttctttcccaactgcttctctattccagaggtggtgcattcttctaagattgctgcaatataatgtttgggaggcaggtttcattaaaattattttttgagacagagtcccactctgtcacccaggctggagtgcagtagtgcgatctcagctctccttaacctccacctcccagggttcaagcgattctcctgcctccgcctcctgagtagccgggattacaggcacctgccaccacgcctggctaatttttgtatctttagtagagacagggtttcaccatgtggaccaggctgatctcgaactcctgacctcaggtgatccctccgcctcggtctccaaagcactgggattacaggcgtgagccactgcgcccagccagggttcattaaaattctaaatatcagtgttcgacaccacggaatcttgttcaggagcaacataagtggattttattcttctttccgtgaaaggaaacaaccagtagctattaaaggaaattaagagcttaatagtatatcagtctcttaaaggggaaagagaacatgcctaggtgctttgctgagcctgtggagagccgytctccatggaggatcctcagatagatcctcaaatggccccctgtttacaagtaatcatcaattatttgtagtgacaacgtttaacatgtgcaatttagtttctggctgattgaactaaaacgagcagctgcgtcatctgtcaaggtaaatattcgagagataaagcagctattttaataaagaaaaaataaccacagtagcttttccaaaagagctacttatacctcatttatttttatgtcatatttttttttcctcctcaggacagctgaagagaatcttgtctccattttatgagactaccaaaaggacagcagtcagggaagcagatttctgagagggagaggctctccgcttccatgtggacacgctacgcatccctgccacgtacttgctcttcttcccttctttattaatagacatggtggaaaccagtacttaacttcttcgtggctaatcagcccctactgtttctttctccacatgaaggcataatctgcattcgtaacatcatcactgatgcctgtgagataattacaggctcgatcttacggcccagtctcttaggtgtacagaattgtggtgaaaaccagctccaagcccccaaaacccgcagggtgggcagagggtgattgtcacccaggtctccatgatcccagagtttcttcttgaatactgagggaatggaccatctgttgcatataagtgtaaagatattttctccagcaattcatggtttccttttcaagattctcatcaaaggtcttgagcagcagactcatgccatgggtgtaaatagtacagatggtaacggttcctcaggaggtgagtttactggcttcagtgatgctgaatggtatctaggaaaaggtaggaccctcacccaccaaatccaggcttcagcctgttggaagtggacccactgcagggcacctaagggaaccatcaatgtcttctgggaagtttttttcagagaagacaacaatctcctcctacaaactgttccttggggccactgtcacattatacaactctggtctgttccatcaaagatcaaaccttattgaatagattttaggggctcatctagataataaatgagggaaatttcagtttctgtaaaaattaaatctgcacatggaggtragacgtttcctggaacaaggaaaaccctctggattgaagatgatctttaaggagaaaaaagagagaatcacgtgacaaaacttcatgatggactcatctaattagtcatttcaacatatagaaaaattatccttgggttcaaggaaatcagcaagggttttgagtttctgggttcttggctacattgatccagttgtacaccacttatgtgtgcgtcactgttactgttgttttttttttttttttttttttgagacggagtctcgctctgttgtccaggctggagtgcagtggygcaatcttggctcacygcaacctccgcctccctggttcaagcaattctcctgcctcagcctcccaagtagctgagattacaggtgcccactaccacgcctgactaatcattgtagttttagtagagatgggatttcactatgttggccaggctggtctcgaactcctgacctcaggtgatcctcctgccacagcctcccaaagtgctgggattacaggcatgagccaccgtgcccggcctgcttcactgttgagagcaggccagtgcaaaagacattaaggtattccctactagaattccatgtttgcccacacagccagacattggccagggtttatcacctaaaattatccctcaggttcttttggattgaagatgcttccaggactgtgagacaatacatttctgttgtccaagctgcccagtctgtggaaatttgttaccgcagccctatctaatacaactccctttctcagatccacttaaactgtgcacgttttgccccaattgctttattatttgctatctatcaatacataattttttcagaagcatttgaaagtaagttacaggctgggcacagtggctcatgcctgtaatcccagcactttggaaggctgaggcaggcagatcacttgagatcaggagttcaagaccagcctggccaacatggtgaaaccctatctctactaaaaatacaaaaattagctgggcttggtggtgtgtgcccgtaatcccagctacttgggaggctgaggcagcagcatcgcttgaacccaggaggtggagggtgcagtgagctgagatcgcatcactacactccagcctgggcaacacagcgagactctgtcacaaacaaacaaacaaaacaccaaaaaccattwaaaaaatggaattatstttattttttttttcctaatgtcttcttatgataggattaggtgatgcattccagattagaatactacagcagttgcccttttcaacggaggttgtccttcacattacatctgaagccacacaatgtccatgctccttgttggtagtgttaatttttattatggtatccaagcattgtccatttttcttttgtattatgactactttttctcctgtaagtaataagtgatctgtgggactatcctttaaaacaatgcaaatatcctgctccccatccaaagaaccccgagatgaagcacccgtgaatgatccttgcctgaatcaatcttcactcagtggttgcaacatgatggcttttcagctctagtcctcctgcatgaccatttgtccctaggcctgctactgcaagcacgtgccctcccttgtcctgcatttattctatctgtccatcgctcctgggcctggactcatgactcctatttcttttactgtccttcattattctggccagcaggagccccattcaagctggcttctgggctttgtgaccatagcgatcctggggggagaatgaggttgaggttgtaggatggtcccagtggccctgcatgctgttttaaagatttttatttttagcataagaaggcttttaaggcaaggtagtgcaggggaacttggagagaatggatgagattgctaccatgtacgtattctggtgttagaatcgacaagacttgctgaagcactagatatggggtatgaggtagtgatcattgagggtaacaacaaggcttcctagtttgagcattgctttggaataggtgagtgcgggcaggcacagtagctcacacctgtaatcccagcactttgggaggccgaggcaggcggatcacgaggtcaggagttcaagacgagcctggccaacatggtgaaaccctgtctctactaaaaatacaaaaatcagctgggcatggtggctcacgcctgtaatcccagctactcgggaggctgaggcagagaattgctgaaacctgggaggtggaggttgcactgagtcgagatcgcaccattgcactccagtctaggcgacagagcaagactccgtctcgaaaaaaaaaaaaaagtaataggtgagtgagggaggtgagtggatcaagggcaatatggatggcttaagtctgagtgatctccagtacattccagtagaggggtcaaggctggtgagaagcataacagcaggacctacgacagggtcagaggggccctaacatccaaaggccacacagaggagggaagtcaccagtggggcccaagaattgagtagttggtgtggtattagagaagcctgaagtatttcaggcagaaaggagtgatcaactgggctgaatgctactgagaggtcaagtaatgtacggccaagtagagaagaagtatttgtgagaatgccagttaccaggcaatgagagtcacgcttctgtgaaatttggtaactgaaagacagcatgtatagacagctctactgagaagcaggttaaagaggagcagagaaatggggtggaaaccagaagatcatctattttttttttaaagatgtgagatactagagcatgttccaagaaggagggaaagagagaaagagaaagaatgagactcttggctatcatgagagagggaataactgaagcccttttgatctcaggaccaaactttttggcctcaggatccattcacactcttaaaaagtattgaggatcccaaaaaacttttatttatgtttatatctatcaatatttaccatgttagaaaatacaattgataaaaaatttattaactcattaaaaataataaacccattagatgttaacgttctctaatgaaaaattacactttccaaaaaagtgaaaagaggggcagttttctatttttgcagatctctttaacatctggcttagtacaagaccgctggatctcttaccttcttttgcattcaatttgttgcaatatcacacatcatgtagcttctggaaaatccccccatatacttatgagagaaaaacaatgaaaaagcaagtaaagtcttaagtgttatgaaagtattttttggccccatggacagtctgaaagggtctcaggatccccagggattcccagaccacacttagagcactgcctataataaagaaggcaaatggggagggatccaggacacagttagagggactggcctctgtaagagaccctcttttggggcaagaggaaaagaggcgatgaatgccaaagtgattgtgaaggagtgcattccattcttatgcattacattttctcaatgggataagacccatggtcattgagtcaggtgaggaagtagtgagtgcgggaggtctgagacaagccatgggaaagaattctcttggtgaacaggaaaactagctgcccagtgaagtacagtcagagtgcccagcagggaccgcatagtatccatctttgcagcacacaccagggcacctaattgacctgccgcagccatgtgtgcaaggaattccaagctgcacacgtctgcctggctgcttctctcccacagtgagcagtgtggcagggtgcctaagagcaagctccataggttctcattctgctcctacccctgactggcagtgtgtccttgaacaaaatgctctgtgtgcctcagttacctatctgtaaaatgggagtaaccacagcacccacctcacagggttgttgtgaagacaaatgaagatgacaattacatgtaaagtacatacctaggatgggtgagtgcctggcaagggaagtgctccatagggtcagcgacaacaattacattcactcacgtgatttatggcgcttccactcggccctctgtcttagtaataattcactcatttagcgaatatcaatggaatggatgcttactgtgggtatgggcggaggctgaggttacagcctgggcaaagcaggccagctcccgtcctcaccggctgtctcctcgagcagacaagcggacccagtgagacycgctacgtggtggcacaatgcgagtccccatgactgctcaccctaacgaaggcgcaggatgcggtaggggctttgcggacctcactgcagccaatcctgaccacaggccccagtgggcacgcttagccttttacagatgcagagtctgcttctcagagcagggggctgacttcccccggctacacggccctrtgsagttcggtgggaccgggccgaccgcccagctcgcgctaaagcccacgtaacagaaacccgctcccatgacacgggtcgccagggttcccrctccccagagaacrggacttccggcggaaatttcttccgggagcggaggcgcgggactgacctggccccgccccctcctcgtttatctccaattgaccaatcacagctcagcttcttgccaggygcgtaggctcattctccagtcagcgactgccgtcgtctctcgggcaacagcgtcctagagacgccgaatgggcagcccctctgagaccccgcggcttggggtccgcgcacgcgggtgccggcccagctaggcggagaatcgaggaggggttcccggtaaggctgtattcggggtggccacgcgcgtgcgacaggccgaggaggggccgggcgggcgggcagctccgtgggtctcactgccctgagaaggccggcgctgctgcccacccccagggacgaagaaggggtggtgattcgtttattcaggtgttcatggcgcgtctgcttgtgccaggcatgttgtaggccctggggccctgtggggaacagtagggcccctgttcccgtagcttacctgatatgtggagaagaacgataaacaacgctgacggtggtgacgtcttcttccctgcctctctgtgagaatcagctgggaaatgtgtgtggaaacgccctaaatctctccagtttacaacatgtctcatgcccctgatttcatttgtgcccacagcagtcttgtgaatgtcatgattgactccctcctgtagacagacgaggacttgaaacctgtggggtgaaggggcttttccaaagtcacacaactatcttaggaagtttctgagccagaattcaaactcatttctgtatcacggcaaaatctctgctcttttacactcttctcccacagcctgcacataattacccctgcctccctcagaaattttgtttggaagcactttgtgaggtatacatctgtatagggcttacttgaaggttgtccaaatcacccctctctctactcccttcctttctctccaaatctttgcctttcaggatgtcttgcccctgttaagaggactcttcttttcttttcttttttcttttcttttcttttctccctcccctcccctcccttcccttcccctttcttcccttcctcccctcctctctcctcccctccccttcccctccgctcccctccccttccctcccctcgcctctccttttctttcctgatggagtcttcctctgtcacccaggctggagtgcagcgatcccagctcactgcaacctccacctcccgggttcaagcgattctcgtgcctcggtgtcccaagtagctgggattacaggcgcctgccaccacgcccagctaatttttgtatttttagtacagacgggatttcaccatgttggccaggttggtttcaaactcctgacctcaagtgatccatccgcccgccttggcctaatttaatatgtgttcctaaatgggtggccttaacagaaatgctgtaaatcaattctactttcatacactacagttcatgtcttttatccattgccttcaattcagcaaacgtttacttggctaagttctggggatatgaaagtgagtcagaaatggcccctttgattatatgtgaagatatttgcctcctatccagtcttattgcaagatcctttgaggatgaggattttattttagttatctgtgctttccctttttcctctatgcttattttaatgcttggttcatgataggtgatcatagatatttatcaagaagtgcttacctgagactgtaaatttcgctctccagggaaaaactgccctgttccagctatctacctcttccccttgtacagagatctctatagcacccatgctctgatctctgcagctgactggcacctggagacagaaccagctccatgaggatgtttagtagcctggtgcctgcccagatcaggaatctggtgagaggccactggttgttaacaaggcagttgttaacaactgagacaggtttgagaaaactgtgaatagagataacatgaatatgataccctttcagtattaaaagcttcattttctacttttggttttgatctttcactgctattttgtttactttgtttcaggtaccatttgttactttttctttccatctatttgtccacagttttactacttctatttctactacagcaactactaatactactactggctaatactaattgaacacttactgtgtgccaagcacagtttggtccctcatactttttaaatttagtcctcacaagttggctatggaaaagtacaagttgggtgtggtggcttatgcctgtaatcctaccactttgggaggctgaggcaggaggatcgcttgaggccaggagttcgagaccagcccaggcaacaaagtcagaccccccccatatctatggtggcatgtgcctgtacttccagctactcaggaggccgagatgggaggatcacttgaacccaagagttttaggttgcagtgagccatgataatgccactgtactccagcctgggcgacagaatgagaccctgtctcaaaaaacaaaacaggctgtgcgcggtggctcatgcctgtaatcccagcactttgggaggccgaggcggttggatcacctgaggtcaggagttcgagaccagtctggccaacgtggtgagaccctatctctactaatacaaaaaattagccaggcatggtggcaggcacctgtaatcccagctactccagaagctgaggcaggagaatctcttgaacctgggaggtggaggttgcagtgagccgaggtcacaccattgcactccagcctaggcaacaagagtaaaactccatctcaaaacagacaaaaccaaaaccaaacaaaaaaacaaaacaaaaggcaacagggacacagagaggttaagggacttaacaaagctgataaatggtagtgagtatggctccaactccaggactgcctgataataacctgtgttcttgatgagtatgctatcactctcaaacacttatatactctacaagtcctgccaaggctttgagatgacttgtaagaataactacaatgtgataaaatagaaacatgtaaatcagaatcattaaaaatatagacagaataggaaggtatcagaaagaaggaatactcagatcatctataacggttaataaagttgggctggaaatttagctgggagcttcttgtcaactcatggaaaaataaaagtaaaaaaatagaaggtaataaaatttatttttttttccagggaaataaggccttttgattcatctggaaaaataggtctaacctgtttctaaaataaatttctcacagggctcatcgcagaggattggaagggcctagattactgcccaatgacaaaagtgtgggcttaatgtcctcactcttcagggagagaatgtggactttagcatttgaactgaatatttgagattgaagatttctgaatagtaagttttcgataacaccttctgaatgtagtttttcccctgggacgttgtaaatggtgttatcctgcatcctgggttggtttcagtcatttgtttgctcatttacttagcaactattcattgagcatctgccatatgccaacccctgcctaagcattggggatccccaggcagtggtcatctcactgccttggcactcctggtgtttccatcctgccagttcttcctgctgggtttttttctggactcactttttgttttttctctgttattttattctgatattctgaggtgacacctataaccatatagctgttttttgtttttgtttttgtttttgtttttgcccaatgctctgtctgatttatctttctgtatatcctcgggacctaaaaataacagctaccaaatagctaaagttcactgtgtgccaggcacttcacgaatatcacctgtgatccatctacacctttggagcagtggcatttaccattttggggtcacctgccttttgagaagtgctctagaaaaatcatctcacacacagttttgcatgtcagtaagtctgtagggctataaaagcacacacatggaccgcgattccatgttaagaatacttgcttaaaggagagatattccagtggtccctcagtatctgtgggagattcgtttcagcacccactcgaagatacctagattcatggatgttcaattcccttatataagatggtgtagtatttgcatataacctacataatcctcccatatgctttaaattatctctagattacttacaatacctaatacaatgtaaatgctatggaaatcgttataccatatcattgagacaaggaaaaaagtccatacatattcagtacagacatcaacatccatatttttcctgaatattttcaatccactgttgaatctgtggatgtggaacccatggatatggacgacaactgtatctccctttttcaaatgaggaaactgagtcaggaggaggttaattaacttgcaagttgttgtggtggatggtggagccagtttgaccctatgcctgcttgacgtcaaaggttttgatttttccaccgtccaagaatgtagatgctcagtaaatggccaatgtatatatggaagtgtgtggaaggctataaagggaacttgatagttgatatgtcccaaaatataacagtccatttgatatcagtatagacaagaagatttttctcaagtgtttggatttaactgccaaaaccttttgtgttgcttacaattttttccaatttagtcgagtgataatttccacacccctctccatgatacagttccagcaatttttgcttctggtgccatttctatttggctgtgcacactttttactcttgtgttgaattatgttttctctggatgccaaggcagatggatggcacttttgttatgattctgatataaatagcacgtgtttaaaactggacatcaatacttctctggcaaataaacaaatatatcagtgagatagccttctaattgtgtttttcccattggttaagaagtgtatttgatggtctgtgacttgatgcttattttgggggtattagtttttatgatccttgccaatttctacctcaccaagttctgaagtaatcacattcattaatgtctcaaaattctctttattttgaaaacctcagctgaggatggtgtaaagtcaggggtgagctacagaactcctcacagtgccttggtcatactcagaaccttgtttagctttcaaaatcaagggtaaaattagcctaagcttctatcccttgcagtcatagtgttgataactgtggtccatcaagagcaaagtttaatggggtgcttactgcatgctatgccatgttgagtgtaaaaaggtaagtggagtccactggagggacttattgtctagcaggggccaacataaaggtctggaagcagagaatcaaagtgaaaattgaggtaggactagaggaacagatgggagaatattagaacttttacttcatattttacccaccacatctgcagccccacagcaaagtgatggaattacgagtggcttttatcttttggttcttttctttattaaatgaaacaattagcaaagcacacctataagacttaagttctttgtaaaggcatgattaattttgtttaaggacaataggaaggtctcctgaaggaaggggatataccctcagttttgaaagattaattgaagtgtgccaggtgcaaaagaatgaaggaaattctagcacaggcatgaaccaaagctcagaagtgaggaactacgtggtgtgttgggagcactgggtaagaacgtagcatgcctggaggtaatggcgtctggaaggatcacctgaagccaggtggttaattatatgaatgaccttctaccccacaattaagagtttgaatttcaggcctggtgcagtggctcatacctgtaatcccaacacttcgggaggctgaggtgggagaatcacttgagcccagaaattcgagaccagcctgggtaacatggtgaaaccctgcctctacaaaaattaggcagatgtggtggcatgcacctgcagtcccagttattcaggaggctgaggctaaggtgcaaggatcacttgagccctgaaggtgaggctgcagt

SEQ ID NO: 96965 - DNA, 35805 bp, Homo sapiens
ctcagctttgctggaaccggggcattccaatcaatgcataaccacctcgcgacagacacgaagcccaaacgcaatagaaaccacaggaaaggaggaatgatacaacatactgttatgatttttataaacacgctttaaaccaaactaggccataaatcaccttggtttcagaaaaagccaaaatactgacacaatcttttattttcctattaaagtcaagaatgtgttaagccgaattaattgaaaaggaattgaagctcatttcctaagacacttctattcataagtcaaacagcattacctaactcctagaatgagagaatttctgggcttggagatcgcctagtgcaattcactcctttgatggaaaatcgaaccccaggcaggcgacaggccaaggtcacagaggcaaagcagggatgggaaccagcctccctgaacctgtttctgacaaagggcgaggttctgggcccacacacaggcaggccgagctcagtatctgacggtgaatgaatgaagctaagtggtgctccccacagggcccggctcttgtaactgcttcacagacaagcgatttccaggttatggagacatcctagcacagaattaaacgcttcaaactcagactgttaactcctcagaagccagagtggagtttctcagccctggctacatcagctaacaatctcgccaagcaaggaaccaagggggcaaagacatcacctccagaaactcgagtgttccttctgctgacagaggagcagcccgcctgcggccttgttctgtgtttacatcaaccacccaattcacccgtgtcacagaccttcaaaatacgggattagggacaagggaaaggtctccaacatcatccacagacggctgcagccccctaagaacaccaaaagattccttttctagatgggtttagaatggcagccaacagaggtagcacttggggtcgggaaacggttttgactgaacacacgcacgaaagcaaaggcaattgtcatgcagaggtgggtggggaggggagagtgaggcctggctttgaagctgagctccccggggatgacgccaggcacatcgggtttggggctgaagattcagggctgggggcacggaggagggggccagggcccaggcctgggcggaaaagggggtccccgggagtcggggtggggtcccggggcaggcgggggagtgctctagggaggtgtctcacggcgggcagagggggtggggaagtcccggggcgggggatatggggtccaggcgggtctcggggcggggtctgggggtccaggggtcccgcggtccggggtgccggagcggggtctggggtcgggacgggtgttgggtccggggcccggggctggctgggggtccgggacggggatgcgggcgggtcccgcggcccacgcacctcctccgcctgcctgcgcagcgccttctcacgctcgtactgggtgagcagctgctcgttgtcctcgcgcagcagctccagctccacctcgtgctcctggttctcgctgagcaccgagtctaggttctccagcacgttcaccaccagcggcatgagctccttgaccacctcctcgtcgtagcagtggatgaggcgctcgaactcgcggtagatggagcccgccaggcccgacacccgctccgacatcaccgagccggagcagtagtcgtcctggtacaccaccacgccgccgccctcgtccatctggatctccatcatcgcggccaccgccgccgccagcgcggctcgctatccggccggcgcgcccggccctccccagctgcctcaggttccgcaggccgcagcccgtcgcctcccgcagctgctgtcgcctcagggctccgccgccgccgctgccgaggctgcgcccgtcactcactcaccggaagtcccgccctccagccggagggggcggtgcccgcgcgtcccgccgcagccgcgccgccagggggcgcaggggccgtgacgtcagaggaagccgggcttcgggccggaagcgcgggtgagccgggcagagggagctcccggccaggccggtgggatccgcggggcggcagtggtcgcttcccccagcgcgctgtagcttgatcatgtccccgcaaccgtgggcttccggtgacctcgatcccgtctccaggctctgcacacttcggcggacttaggtgaaggctcagcgcctgcgcctcaatcccggccgccctgatgagcctccgttccctacagcaccgcgccccgctcagtgcctcccctctcctgatgccttccccgctcagctggctcctcccgggattctgtgaatgcaccctcaacgcccatctcatcctgaaacccagcagcgtggcctccttcctttcgcccacttctccctactgcactgactgcttcagattttcttttttttttttttttttgagatggagtcttgctctgtcgcccaggctggagtgcggtggcgcgatcctggctcactgcaagctccgccttctgggttcaagtgattcttctccctcagcctccggagtagctgggattacagaccagctaattttgtatttttagtagagacggggtttcgccatgttggccaggctggtctcaaatttctgatctcaagtgatccgcccgcctcgacctcccagagtgctgggatgacaggcgtgagccaccgcgccagtccagattttcggttacttttcagctacgtgcaatctgtttaacccatccactgggttattaattgcaccgatttttttttttttgagacggtgtttcgctcttgtcgcccaggctggagtgtgatggcgcgatctcggctcactgcaaccttcgcctcctgggtccaagcgattctcctgcctcagcctcctgagtagctgggactacagacacgcgctattaacgcccggctcatttttttgtatttttagtagagacggggtttcaccatgttggccaggctggtcttgaactgctgacctcaagtgatccacccgcctccctcggcgtcccaaagtgctgggattacaggcgtgagccactgcaccctgccaatgattctgtttttgtcctatttgatttcttatattctagcagttttaataggctcttatacttccaaccacatatttatctttaagcgttgggtgtgcctcataactacagtatctgcagcccttgcaggtctgattctgcatgtcatcctggttgactcttggcccagggtcccctttcccccattctgagccagtgtccccaggacttttgtctctggaagtacttgaggcctgaacttaaaatgtgttgctccgtaagatttgcactttattttgctgggcaggggacaccatgaacccaagactttgaaactcaatttgggagccacacatgtattgtgaatcctgatgaaaccacatcagtgactatttaatgctaatagaaatggccacttaccgtctttcacctactgcaatgctcatcagttcagatcctctcatcctaatctgattgcaccgaaacagtaactcccgtagctgacaccctactgattttttttgttgttcagtttttagaggcagggtctcaccctgttgctcaggctggaggcactggcatgatcagggctcacttgaactcttaggctcaagtgatcccacctcagcctcctaagtagttgggtctacaggtgtaagccaccactgcttggccaattttaaaaacatttttgtagagacagaggtctcactgttactctggctggtcttgaactcctggcctcaagcgatcctcccccttggcctcccaaagtgcttagatgacaggtgtgagccaccatgccaggctctattgtgtttttcacattttccacttgcaacataatttgccgtatacatgttcaaccatcccactaagaggtttcattcagcctcagattccaatttcctgggatcccaagtgacttaattttgccaaatctccatttcttttcttttctttttttttttttcctgagatggagtctcagtctgtggcccaggctggagtgcagtggcaccatctcagctcactgttacttccgccccccgtgttcaagccattctcctgcctcagcctcccgagtagctgggactacaggcatgtgctaccacgcctggctaatttttgtaatttttagtagagatgggggtttcaccatactggtcaggccggtctcaaactcctgacctcaggtgatccacccacctcagcctcccagtgttgggattacaggcatgagccaccgtgcctggccccaaatctctgtttctaagcctgcaaaacagcctaaaatatccagcctattaggaatgtcagctaatccatgaaaggagcatggcgccatctccagcaaataacgtgcgataaaggttacggagagttgtgaggttccataaagtgaaaatgataaggctgggcaaacagatgtaatctataattcttcctggtgaacaagttagagcaagcttgcattttgggggatgtttaaagcttctgctttatacctttgagaaacttgagccctttgaattcctgaggtagcacactacagtaggaacaatgctaccacagggagaggccaacagacttggccatcaactcaattgattaattatcactaccatgattgcacagatttgttactttaagttggttaaaatgaaattttaacaaggtgctggataattcttgacacttatggaatcatacaactggtcttctcctgaaagttggtgctgaattagaactgcttacagctgggcatagtggcttacaccagtaatcccagcactttgggaggccaaggagggaggatcgcttgaatccagaagcttgagaccagcccgggcaacatagtgaaacccagactctaccaaaaaaaaaaaaaaatcagccaggcgtggtggtgcatgcctgcagtcccagctacttgggaggctgaggtgggaggatcacttgagcctgggaggttgaggctgcagtgagcagattgtgccactgcactccagcctgggtgacagaatggctctgtctaaaaaaaaagaagaacgaacttctagtaacagaggagttgacttcctttcagattcagaaatactatttgggatgcaactttttctcactaaaataccttaaaatgtaagatgggcattaaaatataaaatgtaagtttctaaaattcaactttaatttctaagtatctgccctgatgcctgctaagaagccacacagttccctgtgatgttcctctcatcttcatgagctgagtttgagagagcatctttagatagcactttgtagccacacattacacaggagtatttcagtgatgatcttcaagatggtcaggattatgagtgcagaagaaattaagcagccagcacgggaggaggcatctacacactcacagggtgtgacctaccaggtacaccacaaagatcatatggcaaagttacctgacatcaaaagagcctgtgtattcctggacaaggcacggggctcgaggtggcaacccttcggggtctgttattcacaccctcaccctgtaccaggtggcacccgcgtccttctagacttggccactgccaggcctctggagacggaggagctgtgactcccagaggttcccatgcttgctggtggccttggcagctgctagaaataggaaacttagcgtgtcatttcctagcctggttcttggaactcgctctataccctgtggatgaacaagtgaagacggtgtttcagttaatgcatgttggttttctttctcaagcgttgactttcatctcatctggccccgatctagcaggcagaatggtgtggagcctcctagagaggaactctcaggctcacagtctgagaagtttaccctgaatccacataatgcctgtaaggatattaagtatgttagaaaacatatgaaaatagctaatacatcagaagaaagacatccaatctgttttttattttatttttttacacagggtcttgctctgtggtccaggctgaagtgcagtggcatgatcatcactcactacagccacaacctcctggtctcaagtgatcctcctgcctcactcagcctcccragtagctgggactacaggcatgcaccaccacatccggctaatttagagaagtttttttttgtatagacagggtcgtagtatgttgtctaggctggtctcaaactcctgagctcaastgatcctcccaccctggcctcccaaagacccaaagactacaracctgagccaccatgcccacctgttttcttgacaggacttgcatatgacaagctctctgyttctcctcacctatgcattgcaagccaggtcagaggcaggttaaacaccttaaggacatgttaggacaagtggcatacaagggaaaaaaacccgttcatttaagttacagaaacagaaaaaaaaaaactggcttattcccacacttactctactcaaagctttgagaagactaattttggcatcctctggctaaatacaaaacaacaaaacaaaacaaggcaaactctttcagcaagagctgtgggggaagggactataagggacacacacaactgacaggcaaaagctytgagcacgtgattgctaagtttaattcaactgttacaccccattctgccttgtaaaaataacaaaacgctcctatcaaaatgacattgtgatgtgagtacaggctttttgttttggtacagctctaaaaaatgttggcaccgaatgcacttaagaaaagtgttaaggcttaatacaaatacagagacgagtcatttctcaatgcagcttaragggtgagaacaggatgctaggtttttaaatcttccaaatacaggcagtccccaacgtacagacatacaggacacctcccaaatgtaaacgacagccacacagcagggcttgcatgcgcaggaactcttcttctcccagtgagcagactaagcactctgaatcccaccccactgcctcgcagagggaaagaaggcaggacagatgcaagaagagtaatgtcaggggctccatcacagctgcccaggggcttctgctgtagttcatattttcctcattcccatctctggtttctcccataacccagaagtccctgccaggggcggaagtaaagagcttttcctctcacctagcggactgcaagggctgggagaatcacagggcccagtaccgtcacgtcctatttcttcctggcaatctgatttggaattcgtgaatcattttctcaataaaaaaacagaagttataaatggtagttcatttccaccattaaactgtttcctttcaagttgcatcaatgactttgaagcacaaaccacctgaagtgtgtgtagagtcacacagagtgtttcttggctccaaagtctacaggcaatcaaaagggggaagctgtctttggttgacaaagccttgtgcagaccccagtgtgccaggtgtaggaaggggagcttggcaggcggctcctgcaggcacttaagcagtgaggcagcatgagcctgactgaacatggctgctgcttttctgaagtttaataatgatgatgtttctagcaccaagcattagctttgtaggcactcagagcaaagctgctgccgccacccagacgttctcctctgttaacagatgcccacccaagggcagcatgagaactgggcctgcagcccttgagggggatgggcagaggcttctgcctgaagatgaaagcaccaccacctttgccatcccattagctgagtgagcaaagctcagggaattggacaggtgtgactttgctactgaactccttcatctcctggcctaaggtctctagtctcttctggaagcttgtttgtgagttagawccagaagttctataaagctttgtagagggtggcctccacagctcttcttcctctttggtgtacctgaacaattgacttttttctggaaaggtgtcagaaacagaccagagtcaacaatcatttatgtaaagctggtatttaaaatttagctttttagatattattaaagaatccaaacctaagaacccaaggttcccaagcatctcttctttccaccaaccaattaaggaataaagaaagacacaggaagaatttaaacaagccacttactcggaaatatctgaatagatttttaaagtcccgcagaggtcagcgggcctcatttatgggaagaactgtgacttgtgaagggaactgtctacatcactggagaacaacaaacgcctaaacttaaggctgatgagaggaaaaaagcaagaattcacaagcaaaactggcatgtaaaggaccaagaccagccctgtgtgaaagacaggcagattccaacatgagatcagatcaggccgaggtttcagatggcaggaactgggcacttcagagggtcagggcaccaaaacaatcttccatgaagtagaagacggataactattattatttggttttttgaaagctgccgaggaaaagcaatcaagatgtttcaagaaaagactacagaacaatatgctgggggtaaaatgaagtggggatgctggatttagcagccgtgatctccagaatggaagcggttctgctaagaggtcaatatactgttagtgtttctgcttacgcctcctccatcccacagcagcagtggacaggytgttttggtttctttcagtcattcctagacatccaatcagctggcgggctgttgatccaaggaccatgccctgccccacctccccaccctcaccccccttccagttcctctcaaacctggactacacatgagtgatggccaggggtgccccatttcatccccacagaggcatctcccagccatctggamggcacgggtctccaagcagctgtcatgacggccaggagacgctgagcagccaggctcacataagactaaccctcttcccaccccgctcatttgggcaaaaggaaatgaaaacatggctaccctatctcttgagtttctggtctggctccgggtggagcagtggcttctcttagtagaaggagatgctggatttgcctcccggtgggttcaggaccttgttgtgagagcgaggccgcggccccagccggggctcatggctgtcgactgtgggcatgggctcytgctccttggcggggcctgcttttctggcgctgcctttctcacctggctctgctccagccgggatgctccttgcagctgtgggacacaaagttagaacaacatcccattagaggcaacccatgaccctgacaggcaggctgtggaaataaaaagtgtgtcatagagcaacctgcaagaaattcatgctgtaactgggaaagagaagacaatatagacaggcttttcatctggtaccaaaacaactcactgtaattagcagatgcagttttgaaatgggcataaagttggggcttgctactgtaaatactccttgatttcttcctaagtgaattgtttctttatattgcttgttagacaccactcccatttcttccatctcaagtatagaaagcaagcccctgagagtgaccatgaggcggcgagggaatgcatcctaggtgagggcttagcaaggcaaaggcaggctctgttgctgttaccctgggcttttcaaaggtgaatgaaatcccacaaatcttggtcattagttaagggaaatggagacccaaaggcagaaaccgatgcccatggtcaggctaaagagccgtggggagagtcgaagtctgccgctcaacctgagcagtggctcactcccccggggtgactcaccatggagacacccgcctccccatcctccatccctctcttgtgcccctctcttctcgattagttctgccagctctatgcttggtcatgagttcactgaaggtttgggatccctgcccatcactacacagatgagcttctaggagacgaccccatggccctgggcctaggctgatgagcaagacaaccaagtcccagggtttcaccctagccttcttcaaatgctgaatcctcttgcagtggatacacctgagctcgttttaatcaggtggcccagaaggtgcaaagaaagactccttttcattcccagaggagagactagcaactcttccagaaataatgaggccactcaggagaagggaaagaaaacaaaagctcacctttaagatccgattttggttcttctccttcacataagaaaacatgatcctgcaacaaggcaaaccaccaaatcaggactcactcagaaaattttaccctcattcaaatggacaatgaaaatcaggaccatataaccttttaatttacaaaaatgcttgtatatctgacctcaggacccccccaatcctctacagactattctgaaacaaacctgatatttcatttatccatacatatttcaagatgtagctcttaaaacatcctttaaaaaataacagtagcaccctcaaaactgcgaatattaatgattccttaaatatcaaagtcaattttttttttttttttggagacaagagtcttgttcagtcattcaggctagagtgcggtggcatgatcttggctcactgcagcctctgcctcctgggctgaagcgatcctcacatctcagcctcccgagtagtggggactacaggcgtgagccaccacacctggctaatttttctattttttgtagagacagggttttgccacgttgcccagctcatctcaaactcctggactcaagtgatctgcgtgcctcagcctcccaaagtgctgggattataggcgtgagccactgtgcccagcctcaaagtcaaatttttaaatactggcataatatttcatccatgctgtaatatttcatccataataatttcatccatgctgtagcgtgtgtcaatgctccattcctttctatggctgagtaatattccattgtatggacagaccacatgttgtttacccattcatctgttgatggacaaatgagtcattcccgcccttgggctactgtgaataatcctggtgcaaggatctagtgtttgactccttgttttcaaatcttgtgagtacgtacttaagagtggaattattcggtcatatggtaatcctgtttaactctgaggaactggcagtatccacagccactgcaccatcttccaatcccactagcaatgcacgagggctccagtttctcygcatcctcaccaactcgtattttccatttttacatcacaccatccgarcaggcatgcactggcatctcacgggtttctgatgtgcatgtccccagttattaataacactgaccatcttttcgggtggtttttggctgcttgtatctcttctttggagaaatgtatattcaagtccactaccatttttgaattgggtttgttatttcgttgttgagttgtaggcattctttatgtattctggatagtaactccttatcagaaatgatttgcaaatatttcctcccattctgcgagttatcttttcacttttttttttttttgacacggagtctcactctgttgcccaggctggagtgcagtggcgcaatctcggctcactgcgccctttgccttctgggttcaagcaattctcttgcctcagcctccagagtagctgggagtacaggcgcccagctactttttttgtatttttagtagagacggggtttcaccatgttagccaggatggtcttgatctgacctcgtgatccgcctgcctcagcctcccaaattgctgggattacaggtgtgagccactgtgcccaggcttttttktttgttttttgtttttttgagacagagtctcattctgtcactcaggttggagtgcaatggcgcagtctcaactcattgcaacctcagcctcccaggttcagttgattcttctgcctcagtcttccgagtacctgggattacaggcatccaccatcatgcccggctagttttcgtatttttagtagacatggggtttcaccatgttggctaggctggtctcgaactcttgacctcaggtgatctgcccacctcggcctcccaaagtgatgggattacaggtgttagccactgtgcctggcctgttttcattctttatagtgtcctttgatgcacagaagtttataactttaatgaagacctatttatttacttattttttcagacagtcttgcttgttgcccatgctggagtgcagttgcatgatcttagctcactgcaacctctgcctcctgggctcaagtgatcctcccaactcagcctcctgaacagctgggaccacaggtgtgcaccaccatgcccgggtaattttttgtatttttgtggagaaggggttttgtcatgctgcccaggctggtctcaaaatcctaggctcaagcaatctgcctgcttcagcctcccaaagtgctggggttataggcatgagccactatgcctaggctttttataatttttttgagacaggatctcattctgtcacccaggctggagtgcaaatggcaaaatcactgctctctgcagccttgaacaactgggctcaagcaatcttcccacctcagcctcccaggtaactaggaccacaggtgcacgcaaccatacgcaactgattttttttttttttttgggacggagtttcgctcttgttgcccaggctggagtgcaatagcacratctcagctcactgcaacctccacctcctgggttcaagcgattctcctgcctcagcctcccgagtagctgagattacaagcatgtgccaccaggcccggctaattttatacttttagtagagacggggtttctccatgttggtcaggctggtctcgaactcccggcctcaggtgatccgcctgcctcggcctcccaaggtgctgggattacaggcatgagccactgtacccagcccccagctagttaaaaaaaagtttttttagagttgaggtctctctatgttgtccaggctggtctggaactcctgggctcaagtgattctcccaccttggccttccaaagtactgggattacaagtgtgagacaccatgcacggcccaatttatttttaattttgttgcctctgtttttggtgtcatatctaaacctccattgccaaatccagggtcatgaagatttgtccctatattttcttctaagaattttatagtttttgcccttaactttaggtcttcgatccattttgagttcattcttgtgtatggtgtaagaaagagtaagcttttatccttctgcatgtgcatatgcaattgtaccaatgccatttgctaaagagactgttctttccccactggatgatcttggcacccttgtgaaaaaaaaaaaagccctttggaaggctttatttctcagttctcaacttgactccactggtcagtgtgtctgtcttcatgccagtgccatgctgtttggattaccgttgctttgcagtaagatttgagagcaggaagtaagagctccaacatctttttcaattattattatttttggatacttggggtaccatgaaattccatatgaattataggacttttttcccattacagaataaaacaccattaggactcttatagggctacattcttgtctctctttaatcctcaggacctccctctattctcgtcatgttgtttcctatgtaagccattgttctgagcgcagctctgtggtgttaattaatatgtggcttggtctgatttgagcttgatttttttgacgaaacagcgtcaatgggggcccatggtggatttccattcccaggcccataagtgttggttctctctcattttgtgatgttaacggccactgatgaacattttctcagatccacgatttcagtacaagtttataaaacagtgatattctaattcctttattccttcttcacttacatcccagaaacttttataaaagggaactttctttcaacagctgctatcctaacacacacttcatgcaggaaatgctggctaaatgcccccttctgtcatctgcccgctttcgcagtgacgagccggtcctccagcattctcccaaggtcgtaaattacattacttttagtatcaataggaagccgggaattctgaacagttggtgaatttaaatccactgcaattatttcactttttgataatcaaatggtcccatctctggccccatggctgctcttcaccttgttccccaagtcctctgacaccaccctagcagcctgtaagggcttcctcattttctggcattacgagatattctacgcttattttgtatattccctgaccctgacctggaattagtcatttctctggtgatgctagcgatgtccaatggtcctggaccaaaagaactttattagaaaatcaaagaaagctctactctgtttccacttgttctatgcccagttgtactgatgtcctacagtcctctacctgatctacgttcactggaaagtgtgagtctcagcaggaagcaccttgctctcgtgtccggctaattcgagtgctttacgtagtrgaggaattgctgacttttgggacatttctggtcttgccaaagttcaccttgtagtaaagcccccaaagatacttcccaaatagatgctctcttgaaaataactcagacagcatggcagggcacagtggctcacatttgtaatcccagcactttgggaggctgaagcgggtggatcactggaggacaggagttcaagaccagcctggccaacatggtgaaaccctgtctcttctaaaaatacaaaaattagccggacgtggtggtgcatgcatgtaacactggctactcgggacgctgaggcagaattgcttgaacccaggagatagtggctgcagtgagttgagatcgtgccactgcactccagcctgggcaacagaatgagactctatttcaaagaaaaaacaaaataaaacgaaaaaacacgaccaaacctcagcagagtctaacaggtcctatataagactctatacactggaaagagatgtcgctgcagagatgccagcacaagagagatgtagggcaatccaaaccaggctggccgcgatcaatgccctcatccactcatgtcctctcctttctgtctacatttccattttaattctgcaatgggccatcttccagcatataaaccaataaacatgcagcagttttctaggcgttaagtaactccagaaatggttaagaattttccactttaaggaaccagaccatatcttttaaccacaaaaaaggtagaaaagtgaatagatgaaaaaatatcgctaattatgttagtaataaatcctggtctttcttactgatgaacggtggctgcagtaaaccctagaaatgttctgccaccattcaaacaaatgtccaagctagggtagtgcaggctctggtcctcacgaaagccgagactggccttaggcaagccctccaccatagcccagggaggctgcagctctgatcaatccctgctaaggccatgcccgaggtcgcatcgtgtaggcattcctctcctttccaggccacttgtcttatcctactgatgccattactgggtcagaggcrtcagctacgcttcagtcaagtgctgacaatctccacaggtaaccagccgaggaccttgactgtgcggggaaaagcccatcagaaaagaactgtcacttttcctctgcaaggtgaaacaggaagagtggaagacggacaagggcccagctcgtctgcggcacgttccgctccccaccgcttctccgcgccccgcagcactgcagtgaggagccgccacagcccgtctgcagtgggcgtccgccaccagcacagaagagcttcccccacggcttcagtcagcacaaggctggactgtttcctgggtgactcaggggaacttccaaactygatgactaatgcttgcatccaggataatctacggcacccaccatgattctccctaaaaacatgtcgcatctgccttggagcctttttggaaagagcacctggcatacccgctgctgcgctgtcacgtctgaatgcagtccataccttgggtttgtttgggtgtgccaagcgtgaagtggcagtgaccggagacccaaaaatgtcgctggtcttccctccaggtgggttcaggtgctgtcgagtctgcacgggggttgattcgtcaaagataccacttcctttaccccctgcagaaacgatcacagaacactgagcaaccagacgtccaccggaccccaccccaccccacccccgcagtgctttggagacctcctctcataggaaccccgagtgccagccctgagctccaggccaacagggcaggatgctcagactgaaacccctgaagatccatgaaacccctgaaaaccatggctggatcaggggcctgcctgcagcccttatgtctagaactgagctgatctaggctggcctctagaggtgagatggcatcaaactgcagattttccctctagaatttctttaaccctgaacatttcatgctttcctgttgaagtgtctgctcacaaaacccatgaaaagttcttcagtagattaaaaataaacagctaaatgtttaagtcacacagataagagttctgaatttaataacatgccctattcaagggaaacctgccatcctgaaaatatttattagtcattcttctgacctcattctggctggtacttccagtgactagatatgtcagcaaattagacacatgtaacatctttgttgccaactataagtgacttgataagccataatgaaaatgtgcgtctaagaggtaacttcctagtagcaggtgactaaaggctagatgctcagcataaatgcccgtgcctaacattccacagaaagatggctaccctgtgggaccaactgatcatctcttcactcagcagacaccaagcacccacttttgacaaagtgctatgctaaatggaggttggtgtcattaaaatcatggccctggtgcaccaagaacttataatctaagaggaaagaagatgcattctgctaacttgctgtgtgatcctatggaagttacttggcctttctgtgtcccacagtcctcatctgtagaatggggataataaaagaactccctcacaggactggaagaaagctcagtgagttactgtagctcatatgtcaaatgcttacaacagtgtctgggatggaaataaacatgtcaactctattttctatgcaatgataaagaggtatctatacatatcatccagtgaaaacacaagggtgcaaacaatccatatagcatgcagtgttttcatgtaaaaggggaagtgttcttatttgcttttatctgaagaaaagcagttacctgtgggggatgcctacacgtgtgaagaaacaggactggggaaatgcaggggctccacactgcttaacatggtctcctttttttgtttacagagttttgatcttttgcattttctgttctcgaaaaattacattttgtaaattgatttatttaacttaaagagagtttattcatgtgtaatgcttgagtatagcccacctggaaacaccaactccaaaggaatggagtcagtgttctgaagtagggacattagggtttcatttatataggcagagacagaggagcttttagcaggactacaaacttttctcacacaaggttagtgtacagttacagcaatttggttacaggaaaaaaccacatattcaacagttaattcctagtgttaacaatccacactgctccacagaagcaaccggatgaagagcccacgtgtgcttgcgtggagatgaggctcggctgggggtctgtgcacctgctcgtcttcagacccgcttgagggccccactgctgcggcggggcctaaagcagggtggctttctgggacaccagttctaggggcccagagtgcagcgacaaggaggactataacagagcacagcaagtggggggtcgggcgggcgtgtctaccttttgcaggtggtaacagaacacctggggatatgcgggactcgccctgcagagaaatgtgtacatttttcacatgacttcagggtgataaaccttctgaacctcagccatggacctcccagggacccacagtccccaagcttgacacccctggccagggagagcagcacagcacggtggggagagtgtcctgtggccagactgcctgggtcagggagtctctgctcagctgctcactaactgtgagaccttggacaagttatgtcaaccttccttcatatccatcttcttaactttaaaaaggtaacaaacagtccaagtgcactggctcacacctgtaatcttagcacggtgggaggccaaggtgggaggactgcttgagtccaggagttcaatactagcgtgggaaacaagtgagaccttgtctctacaaaaatattttaaaattagcctctggtcccgctcctcagaaggttgaggtgagaggactgcctgagctcagaagttggaggcggtgagctgtgatggtgccactgcactgtagcctgggtgacagactaagatcctgtctcaaaaaaccaacaaaacaaaaaaaaggtaataaataatcatacctacctagggtcactggtgaggctaaacaagttaactcaggtgacgtggttagaatagtcctggcctgctgagtaagccctcagcaatgctgcagggctgtgtcaacaagcacgtcaggaccacggggcggataaaactgtgtgtgcaacccccagcccccactgcawtgttcctggctgtgctataacggctgactttttttttttttaatgtgactccagctttttaaaatagaagataaaagtaactcaatttgaagtttttggccaaagacatcactcatttttaaaaaatagttaaactgtgaaacataacagaaaagtctgtaagacattaactatcacaaataactacaaggcagacaccaggtaaccactgccaaagtcatcgagaacagtgcccgttcccagaaactcctgtgttccttcactctcacccaaggttaccacactcctgaattttttggaaaccacaaacatttttaccacgtatacgtgcaataggtactaaacaatgtacctctgcttttaaccttcataactaggtagtcataccacatatgtctattaccrttttacttgaaaaataaattcagctttgaagcaagaaaacatgcttaaattcactaataattgaagataaactcgagagatgttttttcctcctgcyaratttttgatttccaagggctctgtgttattttgtttttaaaaatatcatttatttatttgggagattgggcctcgctatgttgcccaagccagtttcaaactcctgggctcaggcaatcctcccacctcggcctcccaaaatgctgggattacaggcgtgagccaccgcacctggcctacaagatttgtttttaaaagcaaaactaaaagataaatactgctggtgcaaataagcacatacacaagaatggtaaacaccaggcaatgccctgaaaaaccggttggaactatctatccatattttaaactcatatatcatctgatctaccaattccattttgagaaatttatcccagtggatacattcaggaagtcagtttaaggcatggaatctggagtcagaaaaacctcaattcaaaggctagctctgccaccgactagcactgctaccggctaggtctgctaccgactagctctgctacggactagttctgctaccgactagctctgctactgactagcttgggatttatgcatgccagtgaccttttccaagcctgtttcctcctctgtgaaaggagcaaaacaacctactcctagttatagcgaacaccaaatgaaaaatacacatgcaaagcacttagcacagtccccggtaaatattaacaattcatagacgttggtcatcattgctagaagaggaagaacaattcatggaacatctaaaccaggtgactaacaaagaacacagagactactgaagattcactgaaacactgaatgggaattgataaacattcgatggctatgatgtggtcggtcacacacactctcggcctctgcatacttttctcaatcaagccctgcaactagagggctgtggggctaggtctgtgtgactaagtgtagaaagaaggcaggactccagatctcgttgggtggtgaacacaactagcagtttccctttcaggcttcccttgataatataccataaaccgtcttccaagagcactggagagataggaaaactcccaacaaccgtgagaaggaccatgagaagcaggaacctggcatggggagccatgatggctggcaccacacactgtgaccaggagtagaggctggctcactaaccgcaaggggccgggctccccactgggcatgagaccatgtggaacgggcaaagtggtaccgcctgccttccatggagtgctctaggaacagctccagacatgactctgctgagtaggggccaaatgagcagattcatacacctggaaatggctcagataggattctatcttgcatgcgatatattattctgctatccttgctaaaaaggacatgcaggagtccctgggcctaaattcataaaccggaaacaacgagaatgttagtcacttaataagaaacactcatttctctaacaaccaaaaaagcaaccaaacagaccaaaaaaaggcaagcagcaaaccwagcttcggccgggcacaagggtgcatgtctgtaatctcagcaatttgagaggccgaggtgggcagatggcttgagcccaggagttcgagaccagcctaggcaacatggttaaaccctgtctccacaaaaaatacaaaaaaaaattacctaagcatggtggcatacgcccgtagtcccagccactcaggaggctgaggaaaaagggtcacctgagcctgggaagtcaaggctgcagtgagtcatggtggtgacactgcactccagcctgggcgacagagtgagaccccgtctcaaaacagactaaaaacaaaagaaaaaactagtttctggatctactgctttttttcctctacatttggtcaataaatattggtaccccaaaacggagtgaggtcgggagtggatctggctctgattcatgacctgcctgacacagtgacacctaagcacggcctctcaaaccttctaaggatggaagagaccatgctttcccctcttgtacagacgggggaaagcgactcaggtaacctccactgggtggttattcaactggacagtctatcagccaagagaaacctttttctatttttttttttttttctttttgagatggagtctagctgtcacccaggctggagtgcagtggcatgaatttggctcactgccacctccacctcccgggttcaagtgattctcctgcctcagcctcctgagtagctgggattataggcgtgcaccaccacacccagctaatttttgtatttttagtacagatggagttttgccatgtcggccaggctggtctcaaactcttgacctcatgatcacctgccttggcctcccaaagtgctaggattacaggcatgagccaccacgcccggctgagaaacctttttctttttctttttctttttttttttgagacggagtctcgctctgtcacccaggctagaatgcagtggtgcgatcccggctcactgcaagctccgcctcctgggttcatgccattctcctgcctcagcctcctgagtagctgggactacaggtgcccgccaccacgcccggctaattttttttcttttttagtagagatggggtttcactgtgttagccaggatggtctcgatctcctgacctcgtgatctgcacaccttggcctcccaaagtgctgggattacaggcatgagccaccgcgcctggccaagaaacctttttcaaagagtccctcctactgtaaccactaggaggttgggtaaatactgaagaactatgtagatgtgtgctagatcaattcttccttgttaagagtttcaatcccactgacgatctgaataaaaacactctccctccctaggaaaaatgtttaaatgcamaataatttgcacgcaatttcaggaatctcatgggggtccgtggaacaattgggagcagctccctggcaggaaccagaagcccccgtccacttttgtgtcctcagtgcctgtattcaaccaaagtctccagaacagatggagaattcaagactactcaagtcaccttcaagagagaaagtacaaatcagaacgttttcattttggaagaactctgataacaagtgattacctgaaccagacaatatgggaraggatcagtataaagaaacagaaaatattttcaaaagagaatcgtggaggccaaaggattaaggatttccaaaggcccatacctgggggatttgtcctcttgggtatgttctgaggttcttctgttggtccaaaaatattagatgccatcctattaggcctgctggaaggagtagcttcttcyggacttccaaaaagattgctcgattctcctcctgggggcttcatggccctacaagcacagagtacatgccaattactgatggcagacctgaaagcttgtcactgtgcaaggattttggcacaactagacagggtaaaagtattttgtttttttctttttgagacaaggtctcattctgtcacccaggctggagcgcagtgacgtgattttggctcactgcaacctctgcctcctgggctcaagtgatcctcccacctcagcctcctgagtagctgggattacaggcacccaccaccacagctggctaattttttgtatttttggtagagacagggttttgccatgttgccaaagttggtcttgaacccctaagctcaagtgatctgcccaccttggcgtcccaaagtgctgtgattacaggtatgagccaccatacccagcaaaagtattttcttaacatctactgagaaatcacataccaccattagttaatactggtatgactagtttacagacgccagactwcttctgctgctctttagtttcccttaaaagtattcttttttttttttttttgagatggagtctcgctctgtcgcccaggctggagtgcagtggcacgatctcagctcactgcaacctctgcctcctgggttcaagtgattctccagcctcagtctcctgagtagctcagattacaggtgcctgccacaacacctggctaacttttgtttgttttttttgagacggagttttactcttgttgcccaggctggaggaatgcaatggcgcaatctcagctcaccacaacctccgcctcctgggttcaagcrattcttctgcctcagcctcccacgtagctaggattacaggtatgcgccaccacacccagctaattttgtatttttagtagagacggggtttcgccatgttggtcaggttggtctcgaactcctgacctggggtgatccacctgcctcggcctcccaaagtgctgggattacaggtgtgggccatcgcacctggctcttgaatcactttttattgtaaaaacttaaacttaagaactaataaggaattgccacaaagctctatttctagagcactatctacattaaaaaccggtgaaacgctgaattcataacaactggaaaaacttttaaatgcatttgagagagaggcttactgaaattgagatttaaaccagtgagtggcacatgctctctcactagtcctaagcaatgggactgtctgtgatcccagacgtttagaaacgaagtcagccctctgtatccacgggctctgcttccatggattcaaccaacctcagatcaaaatgtcagaaataaaaggatggttgcatctgtactgaacatctacagacttcttttctgtcattattccccaggtgatacggtgtaacaactatgtgcatagtattaggtattatatgtaaccttgtaacctagagatgatttaaaagcatatggaggatgtgcataggttatatgcaaacattacaccmctttatatcaaggacttacacatccttggattttggcatcctgggggtcctggaaccaactcccgcaggataccaaggatgaccatacttgaaattacagggctcaacatcacacaaaaactatgatatgaggttagatctcactggaaagctttgcaaacactgaccactcaaggtttggttaacaaaaataacagtttctcctcaaaagatctagaaagagcgctgagggctccttgtgactggatgtgaatggagttctcagatctcctgctataaagcaggaaggcagagagtgcttcagtctccgcctgcagagacccacgggctggctactgtaccccagaaaccaagcgtgtgctggccgacctctgaagtggtgcccagggcccctgtccactcaggaggctgggggaggtggatgccaaacttcctgtcagcagttgccatttcctggaggatttgaggagggagaaaaaaaaagacaggtgcacttaagaaaaattattttttaaaaataaccaataaccaagcttaaatgagaaagggctgtccgggagcagtacctggcacctgtaatcccagcaccttgggaggccgaggtgggaggaytgtttgagcccaggagttcgagacacgcctgggcatatggggagaccctgtctctacaaaaaatacaaaaataaggccaggcgtggtggctcacgcctgtaatcccagcaccttgggaggccgaggtgggcggatcacgaggtcaggagatcgagaccatcctggctaacacggtgaaatcccgtctctactaaaaatacaaaaaattagccgggcgtggtggcggacgcctgtagtcccagctactcaggaggctggggcaggagaatggcgtgaacccgggaggcggagcttgcagtgaaccaagatgcgccactgcattccagcctgggtgacagagcgagattccgtctcaaaaaaacaaacaaacaaacaaaaaattagctgggtgtggtggtatgcgcctgttgtcccagttattcgggaggctaaggctggcttgagcccaggaggtcaaagctgcagtgaaccatgattgcatcactgtacaccagcctggacgaaagagtgaggacttgtttcaccaaaaggaaaaaaaataaagggtggtgggtgggagggcgtggcttaacaagattttaggtgaggtgctcttagagtggccataaggccatctgacttccatatccatttttgaatcacgcagccctcctaattctacatttttttttttttttgagacgaaatctcgctcttgttgcccaggccagagtgcaatggcacaatctcggctcactgcaatctccacctcctgggttcaggcgattctcctgcctcaggctcctgagtagctgggattacagatgcccgccaccatgcccagctaatttttctatttttagtagagacggggtttcaccatgttggccaggctggtcttgaacttctgacctcaggtgatccgcccacctcagcctcccaaagtgctgggattacaggcatgagccactgtgtccggcctattttatttttttgagatggagtctcactctgttaccaggctggaatacagtgacgcgatctcagctcaccgcaacctccacctcccaggttcaagcaattctcccgcctcagccttccgagtagctgggattacaggtgtgcgtcaccgtgcttggctatttttttgtatttttagtacagacggggtttcaccacgtcggccaggctggtctcaaactcctgacctcaagtgatccgcccgcctcggcctcccaaagtgctgggattacaggcgtgagccactgtgcccagccaattctgcgatttttcttggatagtgtagcaggtctaaacatgcacgggtctctacagttctctctttggaaataagggatgaaggcctgcaatctttcgaactgaactgaatttatcaagtcttatgtgagctgagcatgagctataattccttttactgacttatttcaaatatggcttttctctcaagccctcaaggtgctacaaactgtcagatctgattccaggtagactcgccttgactgcaagctctgtaggactctttcccgaccccacattccctacattcacagtctcctgtctcctctgcctttcacccttgcttcagttcaacttgcacatctctcgagcacctatcattggcaatccttccccagacgccgtagatagaggaaagcaagtccttaccccggaggagcttcaagtttaaacaggaaagctagagctctgcacaggtggtttcagtgtctgtgtgagtgacgtgacagacgcctagtgccatcgggactccaaaatttggaagaggtgaaacccaaattgagtctgtggcctccatgtggaatggggaccaatgggcgcaggaggtgagtggtagttacttgcaatgaccagtgttactttggggtgatggaaacacaatatttaatattgttctatgtgcttttctgaattttatttgaaaacaagcaaagaaaaaaaagtggtaccaaagamggttttagcagaaattatggcgcacacaggcccagccccaggcaaggggcagcggctatctcggtcacaaaggmaacaggtcccactgcaggtttcacacagaccgcagggctgggctgcctcaaaggggtctcggatgaatggaactgagcgttcaatagacctttcaacaaaaacagcccgacaacaatggcgcagtgtggctttctctaggctacaggcacttaccactatgacactaatagggggagggggaacgctagagctcacacatttggggacaaattcacaatgtgagtggggggtgcttcccaattattttttgccttttgtggtaccccttccatatatttcagtgaagatattcaaaacacacaagagaaactcaagcgcacaggagaagaaaaacctcacacagctggagtggactgcagcactggagaggtagggaaaagctgtgtgaccctcctcgggggtctccatgctcctgaccctctctaatagtttgtccccgagtttcagaaaggatgaggggactggtcaggcttagagagaagcagtgagaaataaacttggattaaattccttacaaatagaaatgttccagcttgaaggaagacctcaggttaatcgcggctaaagcataacgcttttacgaaacccctttaacacaagacaatccctcagcaaggaaaggagagatgtgaggtctcaggagaggaaaacctggctaggtaatcttacagccaccacctgactcgcttcacagcaaaactaaatgtgacgcttacaaggcgcccgccctgcgactcgaccccgttcagatgagtggcaaatgtgcagcgtctggtggaccccaagcagaagcttccagtgatacctcatcatccagttcagaccggctttccttcctcaccatcctaaaaggaagagttttctccctttctcaacaccttgtccagaaaccagtcccccagggtagtgtgagtatgactttagtgcggccctgtgcagctaacttctggagcgtgaaagtcaatataaaaacatcggcgtcgctcagggtgayaataaacaccatcatttaccgggcagccagtgccaggcagcacaaacaaaaaggaaacgtactaaatgcacacaactgggacagggctggggatgcagtccctccccccactgatgtgggtggtgcaaaactctggccaccaggaaccagaaaccggattcgctctgagcactagtttaaactcctggtcccacatcggtgcagacctaggcataataatcactgttccatggatgaagggctgtttctttgagacggagtcttgctctgtcatccaggctggagtgcagtggtgtgatctcggctcactgcaagctccgcctcccgggttcacaccattctcctgcctcagcctctcaaggaactgggactacaggcacccgccaccccacacccggctaattttttcgtatttttagtagagacggggtttcaccgtgttggccaggatggtctcgatctcctgatctcgtggtccacctgcctcggcctccccaagtgccgggattacagccgttgagtcactgcaccctgccacgggtaattatttggttacaagtattactgaatactgacctaactccctcaaatctaaagggttttttttttttttgagacggagtcttgctctgtcgtacaggctggagtgcagtggcattatcttggctcgctgccacctctgcctctgggttcaagtgattctcctgtctcagcctctccaagtagctgggactacaggcacacaccaccacgcctggctaatttttgcatttttagtagagacgggggtttcaccatgttggccaggctggtctcgaactcttgacctcacgtgactcgcccacctcagcctcccaaagtgccgtgattacaggtgtgagccaccacgcccggccaatctaaagggtttttatttttagcaagttggagcaattcttttacttagtatttattcaatatagtatttgtcttcacttgatcayagccaaaaggctgagaagcaatatagtattggtcttaacagtcatggcacacatattctcttctacttctctggcgaggctgtgccacagagggrctcatcatacagaaaacctcaggcatctgaagacccaaacttcacaatgcaagtttactgctcaagtggcacgaaagaccttgtaagctctgtccctctaattcatgcgagtcccaatacccaaagagtgctttaaaagttcaaaaacataagaaaagtgtgctcagtgttcctggctattaaagctgagtcaggatatcttcgtcccaatccacttcttcctacagcgaagcccaggagcgccatccaccttcccaggagatagaactgactcttccccagacgccctggcactttccaaaggaagtggactcacatgaactagtggaagcgcggccatgggcagggcacaggccacacacacaccagggacacgggcacacggccacacgcacaggagcgggggcatggccagacaccccccacgaacacatcgccgcacaccccttagggacacccccccgggaacatggacacgcatcccacagacaaaatgggccgcacccacgggcacaccccgcccccaggaaaccccccacggaacgcaccacacggaacgcgggcgcccaggcgcgagggagcgcagcccgccctccacacagctttgttcccagagcccgggcgcccctccccgccctcggcctcggtcgcgggcagctctccacagcccgggcctcagcgagcggcccctcgggcttcgggcctcggtctggcggcggcgcagaaaggcgggcggcggccccgagggcctctgtgaggtcgccctgccccccaaccccaccccaaccccacacggctggtggacgccctgggctggcccgctcccgccacgtggtcgcgctatccgcccgcctcccgtgtgccccgcgccgcacctggagccggcgcggccgccctcgctatccgggacctggaacatgtcgaccgccgccaccctcagctcgccgcgcgccgttcccgcccgcccagcgcaggtactcaaggccgcccgccagcgcccattgggcgccaagacgccaatcatccctccgcagcctatctcagcgcggccaccgcccctcacgcccacccccgacgacttaggctttgaacggtcggcgccgcgcccgcagccgattggggaaggcgacgccgctcgcggaggtgggagctcgcattgggcggcgggccgggcgggccctgggacggccgcgccctcgggaggaagcccggtctgcgggagcccgcgagccgaccgcggggccgcacctgggccgcacctgcccgaccagggactgcgggcatgggcgcgcggccctgaagaacaggcacaaacgacagtccttagatcaacattagtatgtatttatgcacaataaaaacatttacaagttgaactggaaatttaaacagaagtttaacagctcttattatattaaataaccaaaacaccttttattcccaaaattggtaaagaataaataatataatttacaatatggtacaaaaaataaccaggaaaggcaggcattctgctttatacatacactgtatatgcatatttataatctataaaacaaattcatatctgaaacgagcggaggcctcgctatggcttaaccgagtaagagagagaaggggagcggggcgcgggaggcagggccaggggctgggctccccacacctcacccaccccaaggacacgcagccactgtgacatcaggagagcgctgacagccgcgaagggtgtgctgtgggtttttttccttcgttgtaaattactctttccttgctttctttttttaacttgagacccagtttcgctcttcttgcccaggctggagtgcactggcgcgatctcgactcactgcaacctccgccgctgaggttcaagtgattctcctacctcaagtctcctcagtagctgggattatgggcatgcgccaccacgcccggctaattctgtacttttagtagagacagggtctctccatgttagtcagggtggtctcatactccccacctcaggtgatccgcccgcctcggcctcccaaagtgctgggattacaggcgtgagccactgcgcccggcctccttccttgttttcttaagacaaagtgctgtatttcctgacaaatgcatcggctagagctcaaggtttaaagagaaaacacaactgtcttcctcctccctcattcccggtgtcttatgccccacaactttctttgcagaagaaattttgaattcaatgctgtgatctaattaaagatgctattaaactaaaaaggttatccaccagaaatgaggccacggcctctcatgcccagaacctggaggtgcggcaaagcaaggaggccaaccgcggaaacgccgccaacaccccactccctgagctggcaccctacagctacaagacacagaaggacaaaacagccaggaagccacgaactaggcatcccccgaggcacgcaatgcccgcttatcactgcacatccacaacagaattgaggccagaggactaacttccctggaccacagatgctctgtcccaatctccagaaaagacgaatcaacagaaagatcccaggcaacgtcagagggattcaggaaagctttttctaagaaactgatctcatcttaattacagcatgctcaaatgcacaaaggaagccacaggctcatacttagacgatcaccgcttctgttggaaaggcagaagatgcaggaagtctctgtttggatcttttgaaaattccagcctttaacagttgcctatgtttgcacataaatattcatttaggccagaagaaaatgtatccattgtttttctgcaacaaatgacaccattttcccttaatgtggcaagcaaatgcgtatcacctgtctagttactagagaagcagaatcctctagaactcttgtcagctttattacaggagaggagtcagcccgtcctcctccctaacccatctccccactggatggcaatggctgcagttggctgctcccaggagtctacgctggagaaccaagtggtaggtgctgtctaaagagcctacgaaagcagactctgacctccaaaacttcaccccactgagttgtcaggggctaacaggtaccctgacaggcagttcacaaaccctcctgtccctggcacagtgcacacagctcagtgctgttgggacttggcatctctggtctagcctgtgggagtatgagaaagctagcagtggcctgaactcggcctggtatcctaaccctctagagacgcagcaaagccagatgcccagagggagatctccttgtcttctctggctcaatgagatgctaattttggaagctggtatacgtagcacaaaacacaagctagtgtaaagatgctgtagttcaaacactgctgtctctctcctaatcaagtggcatgtttcttttttcacccctaagaggtttgggactgtttgcttaagatctcatgtcaatgtctgaaggagggaagccagctcaggcaagagctctaagaaaaactcgtgagacaaaagaaggaagctcttgcctggaagttcactgtcctctccacgtcctcccagtggtgcagtacacggcctgcctgtggtctacagtggctgtggtgggctggcaagactgcaggacggagggcgtccacatgcttgtccacaccaaaggcctttccctcctcttttcaccttctccattgtggatggggagagaagcagtggaggggccagggctggccttgagggctgcagcgtgccacacatgtgggggaagaggaatggtggggaggagggagagtaggtccaagggggttaggaaagcacaatcaatcccggctgctgcgggggatgaaatgaggcaggaagggagagatggcggcacaggcatggcctgcccaacacctctgtagcagctccaggccacactggatgtggatggacggtgactcatgtgcctggaactcctgaggatgagaaggcaaaggggcccttgttagctctgtcctggggaaagactggatgttgggccgtctgcagtaggaacgctggccacccaagagggcgcaaggagggagaccaccacgaaggcatatatttggtgaggtctgaccacatccagatgtctgggccctcacctgggtgtcccaaatgggaaggagacacagaagtctcaaggcaaaggtatgcaagggactgaacacgtatgtcaggcacgcccacaccaatgcccgtgagagacactttccctgcaaaggcaggtttgtctcaagtgccaaacagtcacacatcgagtttgagaacttatcaggaaagtcttcgctgtaatcatattagcgcctaagggtcaccccaggagggagaaatgacaccttagatcgcctggaagcttgcaaagggacacaggaaggaaaccaactacagaggggactttgttcttcctcttccatgtctcctaattcttaaaacacaagaaaaacattttcaaccagcttagcagggtcccatgtaaagtccacacaacctgcatagtacaggactcttcctgcccccactccctgttaagagtacgaacaaaacctctagggaggggaggcaccagcccagggccccacgactccgcagcagccctgtgatcggtatccatgctcttgctgccttgggatgtgacaccaccaggcatgagcccaggccacacccaactgtcctgcccgttacagtccacagagggcacagctgatgcatagcacaggtttggcagaaagcaagcagcaggggctggggcctccctgcagagagggagatcacagctcctagtgcacagcaactacaccaaggcacacatactcccttgtctcagaaggaaatgccaccggaatgtccaacacaacaatcgaggcagagcacaggctgaaatgggatcattatgcagaccctaacatgggcccaggcgtggtgaagaacggctctagtaccacagtgatttctaacgctggcccttgccaagaactcatcctagtctccttggacgccgttgcctgctgctcgtggggaagcagctctgtgaccacgttcctgcccgttgcacagtcttgggtgcggagatgcctctgttcagaccatcttctggggctgctgggcttatctatttttctctagctcgaagagggcttcatccgccaccaggacgtgtggtcactgggacaggtcactgacagcggggccgcctccaccaccatcaaacagagcttctcggcggccaggctcagcgatggacagctcttgggccaggtcattgaaccgagaaatgtaatcaatgctgttttcgttcatcatgcacaccagctgggaatccacaacctgcaggaagaggagacaggaagaacaagtcaccgcgacctgctggcccttcagtggagggcgggtcctgaaacaggacgagaagctcctatcgactcccgctgcaggaagctaagctagggatggcagcccagggctctgtgcagaatcacaatcacctgtcgtctgcccgcacactctttagataagtgctcgcagagagcctatgatgtgcctggcacatctgatggctggggtgagggtgctggtccccccgcccgccatgagacctatgggggaagacacccaacaggtagacagactgtatgcagcagacacaggcactgggggcagcctgcagaaacagatgcagagtgaggggacagagagtgccgggaaaaggaggccagagagggtgctccaaggactgggacctgagcgggaggtggggtaaaacccgaggatacgtgggggacacgtttccatcatagacatgaggacaggtgggggacacattcccatcatagacatgaggacaggtgggggacacgttcccgtcacagacatgaggacaggtgggggacacgttcctgtcatagacatgaggacaggtgggggacacgttcccgtcaagagacatgaggacaggtggggggcacgttcccatcacagacatgaggacaggtgggggacacgttcccatcatagacatgaggacaggtgggggacacgttcccgtcatagacatgaggacagctgggggcacgttcccatcagagacatgaggagagctgggggcacgttcccgtcagagaaatgaggacaggtggagggcacgatcccgtcagaatcccaaggacatgtggtgagggcacgttcccatcagtcctgaggacatgtggggagcacgttcccgtcagagacatgaggacacatggggagtacgttcctttttaaagaagcaacaggcatgttccctgagacaggaagaggctttgactgaaaagcacgaccaaggtggtggccatgacagagtgagtgaggcagcacagagctgaggagacggaggacgggagggcctcggcaccgggatcttgtcccatgagcaaatacgtagaatgtgccgttttcagcgcttattgtctgcgtcctgctctagagtagaagcctcatgaggacaggggccattgtttgcacacagcagaccctgcagaaatatcccttaatgaactgcatgacactgtgaatgcaagaagtctggaaaattctgaatagagctatggcgtaaatgaaattttatgctttgattatgggaaatgtcagacaaattaaaatttgttttcaaaagcagagcaaagagtaattctccttcccctgtatgtccatcagcagctcccacccgtttcatcccagggccacccagctccacccccgcccccttcatgctagccctaccaccagaccctttcatccacaaatgcctcagcccatccttccagatgacgaggacctgctgacaaacatactcacgttctgagtggagggctctcgggaaaatctcatgctaaacgctgatctgctctttctgaaggtgaacacgtttgcattactcgcgacgggcagcgtt

SEQ ID NO: 96966 - DNA, 38972 bp, Homo sapiens
  misc_feature (1)...(38972): n = A,T,C or G
gatcaggaactggattgggatgagctctcagtccaagtggctggatgatatcttgcaccttttggagagactgtaggtaatgtaataaattagcttgtgagatttctgctaaatgggtatcttttagcttaggcaagatcggcggaaccctcttatatatgattttaaaaggtgaaaacctagcctggtaggaagttcatcttactttaagaaggactaaagaaggagccttacctaatcttcaccagtctttaagattaactttgtaaaagtatttttagggtgtggtttatgcattctacctgtgcagagctctgagttcttactgactgactgaggtatggacaaggtgaaggctggtctattatcagaccttatggcagcaggcagcctatgtcaaaggatgatttcatcgagtaaaaacctagctactgtggtggcagtctcgtttttgggggcaaatgcctcagtccatccagaaaatgtatctgctagtaccaaaaggtatttctacttagtccagtgtggttttatttctgtaaagtcaatttcctacctttttcctggcgagtttccccggaggcagtgccctgagatgggtttaggaccttgcttggcatttacttgagcacaagccatacaccagagagctgcttggtttgcagagttctgaaggcgaagggatcttgaaatggctccttaggagctgggccagttttactcctcttaaatgggtggtagaatgaagacgactgattaaagtttccttgagagctcggggtatgaagattctggaatcaggaagaatccaccaaccttcctgattttaattggcctgaagatctgaagcttgtttctttttttttctggggctgccaagttaggttgcggaaaggacacagcggacagcagggttaaaggcatgacagggagccatgctgcctttcgagttacagaatctgctctttggttcccatgggcaatggccaagtcttccttttgatgtcctttgcagtgaattacagccacctgcttcaagcagggctaaaatttcttctttgtttttgacaatctttcctgctgaagtaagtagcccgcattcttgatagacggctccatgtacatgtacagtagcaaaagcatacctgctgtcagtataaatattaatacatttgtccttaacccatcagacagcctgagtgagggcgatcaattcagccttctgtgccgaggtacctgctggcaacacctgggaccacagcacatctgtctccgtagtaaaggctgcaccaatcttttgtactccctgttcgaggaagctgctaccatctataaacatggtatatgtttataggggcatatcttggagatcagttcagccagtttctgtagtttctaacagttcctggcagtcacggacaggtgtagtgaagtttggatcagggaggaaagcagctggatttaaacaccttatggaagagaaagtcaaaagaggctgatctaacagtaaactctgatactgcaggatgcgagcatttgacatccatttgccagaagcacttggtagcaaaatctctatggcgtgaggagccatgagggtgaagttttggcccagagtcaatttattagcctcctggactaggcttgctgtggccactacggctcacagacaagttggccatccagcggccacagggtccagtctcttagacaaataggctactgggcatctccagggtcctaaagtctgagtgagcacccccttagcaactccctggctttcgtgaataaaaggtgaaatggttttgagatattagggagggctagagtgggggcctcagttaatgcctttttcaggtttttgaaagcctattctttggtgtcagtccatactagtgggccattccttccagtagcagtgtacaggggcttggcaatctctgcggaccttaatatccacaggcgacagtatcttatggcccccagaaattcacgtacctgtctcttggtgggagtggggatttgtgggatggcttccttacaagcactgataagtgccctttttcctctgtttatctcataccctaggtaggagactctgggaagacaaagctgggatttttggctgagacttgatacctgagttcctgaaggaggtaaaataggtccttagtgtgttgcaggcaactgtcagtagtttcagtacctaataaaaggtcatctgtgtactgaagaagagtacaattagggttctggcttgaaatggtataagatcctgttgaagggcttccttaaaaagggtgggggaatttttaaaaccttgaggtaactgagtccaggtcaattgggtggtgtttcctgagccaggatctgtccattcaaaagcaaagataggttggcttttgggggccagaggaatagcaaagaaagcatcttttaagtcaaggacagtgcaaattgtgtgttctggtggaagcagtctgagtaaagtataagggttagggacagttgggtggacagtgactatctgtctgttaacttccgttaagtcctgtacaggccagtaatcatttgttctgggtttttggaccggaaaaaatggagtattccagatggactggcaatggtgtgagtatgccagtttgtaacagttgctgaatatgggggttgattctctccctagcctgctgactcacagactattgcttcacctggactggcaaggtggtggccaggagttctactaccactggtggatggtgcttagcccgtcctggggggattggctcagcccagactcaaggaaagagagtctgtaattccagtaggagaggattagttttattttctggtggttttggaggtgaaactaacagatattcttctgacagaggggtggttaacaggagctgagcaatagggggcattgtgtcccctaacatgaggtgagcttgttgggccgagaaggaaatagatgcctacagcttgtggaacaggtctcatcctaggaggggaaaaggacactctgggaccaagaggaatgagtgagttgctcttttctgtcccaaactcacctcttatgactgggtgacaggatattcctgaataactccagtagctccctgtacaaccactttcctattacagacactgcctaggggcatctgcagtactgagtgttccgccctggtgtcaattaggaagtgtacaggctggcgccctactatggcggtcaccatgggctcccgagggccaagtgtaaaggagccctggtcccatcaatcatcagagtcctccgcagcagggagggtgaggacttttttgtcttctggtttttcctctggtcttaatgggcattcctttttccagtttcctatctgcttgcaataagcacattggtttttctttgaagggaaccctggtcacttttctggcttttctagcatggacccagggccccctggctagtgttctgtgatgggggcctttcctttctggcttcctggatggccgccactaagattttcgcttgtctttctgatgctttgtcagcagccttgtcagctgcctcagctgcctgtttttgctttttaaactcttgattgtcaaaaactttttgggctatttctaaaagttgactgatattcatcccagcaaatccttccagtttttgtaggtttcttttaatattaggggctgcctgaaccacaaatgctaaattaagagcacagctattttcaggagactccgggtcagaaagggtgtaagtctgataggcctcctggaggcattctaaaacgttcacagtgactcatcaggcccctagacaacttcagtcatcttagacaagtttacgggtttccaagcggctcacttgatacccacaaggagataccggtgaaaatcgtctaaagatctcttcccacctgaggagtttgggtcctaattaggccgggtagaaggaaaaacttccttaaggaggcctctagcttccacttctggcctattggctgatgtgaggaaatacttactggcctctctttggatctgttccttctcttcagcgttgaaaagggtcaaaaggagctgctgacagtcatcccaggtgggccaatgggtccagagcatggactccatcagtgaggtcaagacctggggcttttcagaaaaggggggtttataatctttcccattatacagctcagaagtagaaaaggggacataaactaagaatggagctaagtgctcatcacccaaagggacttgtgcctctctcagtgggaggaggagggctacctcctcctgccatggccgcaatctagaggcaacaggcggacagcccacaggggacatcctcgaggagacaagggaagattctaaaggagcaagagggttataagctggtggaactgggtgaagaagattctcttcttcttcagaaggaagcagaataggaggagccgagccagctgagggttgaggcaaaagtgaggtctggctcaaaaggaacttagaggtagaattatgaatgatgcattagcggagccatggaggagggctcctgaccaaactcagccactgatcaatgtatggaaactgatctgggtgaccaggagttccagcaacaacccgccacacagcctgaacaactgcgagcttcagtgacccttctgggggccacccagctccaaaatttggccattctgcttcacagagtgtccagagtttgccttttttaaggcagaccccataatcctctgagaagcctagagaaaatttttgtaacatacattggagagggctcaaatctttatgaggccgggaagaagagtatcctattctggggcagtttaacaaggtttgagcagagataataaacccagcactgacagagaaattcatgacctggggggttgtagcatcagaagaacagaaataatatggctaaaagaagcaggaaaacagctattgccagtgcttcctgctacatgagttctgtccttttaagctttgagatttagggagaagacaagaggtgggtccgaggctggtgggacctacatgatttccctctgccttttgacttacagcctaaatatctttggtgtctccacgactgaaaggcaaatagttcaaactcagccttttcttttaagggtttgaggagggagagcagagctaagtcttggaggtgctggacttgctgtgacacaggaaaacgagatgtgcagggcaagggatggggatgaggagaaaaggggccactcagatcctttcaggctgagaggagccatgctgggcagtgctggtttgccaggatgactctgcggtccccggccccacctccaggccccatcaggcgctgcaagcctagcttagaagcctggcccagggccaaggctaccatagcaggctgggtgcctgcattctgagctgggtgtggaagcactggggctcggggaagttggcggctttgatgcctgaaggcgtaggagccgggcacctgaggggtccccttggggagggggtccggcactgtcacctcctactctttgcctgtgggtcaggagcccctgccagaggggaaggaggctgtttcttttgtgtactggtggaagcatgcctggcccctgggcccagcaacctgaagacacacacctgagacctcctgtgttagaaaatctgtactcaggactttgaagaagtccttacccagtcgtcttgggcaatattgatgacctgacatatgaaacttagacaaacactaaacgggacaataaacaccaaacacaacaatagacacaaaacaggcaataaacacaaatcaggcaatagaccctagggtatataaacaattatggaagtttttatagacagacaaaggggagggggtcccgtgatgggatcagtcagatgcccgcctggccactccccctgaggggacttacgctcctcttagcatttgcaggccggtataaacccctggctcagatccagctatgcccgatgctgccttaagccttatgaggtcaccacggaactgcaggtgagggcccacttgaactccatagctttcgctgtggagctacaaactggagattcaagggcaagcctttgaattccacattcatgcacacattcacacagagtttataacaatttttcttattcccgttctaaacagaggtctccgggagacctgaacgagagaaagagaagagatagaaaaagggggagggggagagagaaaaaaaaagagggggagagactgagagactagtcttaatggagaggccggcctgccagaaaccaggactctgtcctccaacatcctggaatatggacagagtcaaagagaaatgccctcatcagggacagttcccgctcaccaaaccagaaccaaaggtgcctaacagaaaaccaaggctctgtcctccagtgtcctggaatgggggcagagtcaaagagagagacacccttatcagggccacttccctctcaccaaaccagagtcagagctgacttacattcctgagaccagaaactgaggactcagaagttgaattttgtgggcacactccagtggtcgatccgttctcctccggaagacggagtcttatggggccctgggacatcttcaggtggtgcctcccctataagtccaccgtatgggggaggctggaatgagtccagctctcacctggtggcaaatatctcgctggggtctccaaatattgtaaccaagtgagttatagagaaacgccacactttgagactaattaaagagacctttattagctggcgactgagagatggctaatgctcgaaattccctcagccctgaagaaggggctagattttcttttatactgtggtttagagaggggagggggaattgagctgaagcaatcttacagaagtaaaacaggcaaaaaagttgaaaagacacatggttacaggaaaacaaacagttccaggtgcaggggctttaaactcatcacaaggtgataggtgcgggggctctgggtgctatctgccagacacaaaagcggggccttagggtactatcacccaggtgaattcctgggaactgtggacatagcttgccaccttaccttatcagttaattgcactctttgatgtgctaagtgtcagcttgcacaagttaagtccttgaggaagggggtgggtaacgagcccttaatgtcttgcaaatgaaggagccaaatggaatccatccagctttttcagctaagagagagtcaataaagttaatacaagttagggtatcagacatctgcatctcgctattgagtcacaggaaatagcagtctgaccctcgtttggtctggggacacaagtgcaggaattcaggccaagataataacctcccataaagatgaatgtcttaatttagttaagaaggtcggaagaccttcaccttcccagcaagccgccttgaaatgcctacttcctgtgccaaattgtagatagtcatttctgtgttttgcttttctctccagggaatctttgccggtgctactgtttttatgcttgcttctgaagacgtgtgaacctaaaactgcaaatgcctttaaaccaaatatcctactgatcatggcggatgatctaggcattggggatctcggttgctatgggaacaatacactgaggtacagttggttgttgctattggtgatgatgtgatgtgagtttgaaggaatagtgcatttaaaatctgcctggagaaattaggaaactccttagggcctcagaactcaacaaaaaactaccaacaggtaaaaaggcccttttaaacgctgcagaactgcggtgagggggtgaatgtattactaccacaaaatgggtagcttaaaacaacagaaatttgttctcccaggtctggagaccagaaatcttaaatccaggtgtgggcagggccgggctccctcggggggccctatgggaggatccttccggactttcccagctcctgggggctccaggtgtccctgagcttgtggccgcatcactacagtctctgcctccatctccacggggccttctcctctgtgtctgtgtcctaatctcctcatcctataaggacaccggccattgcagcaaggcctgcccactgtaaagatctcatcttctgttgattacatttgcaaacaacgtctgttgtgggctgaattctggcctcctccaaatttgtaggttgaagccctaaccaccagtacttcagggtgtgaccgtattcagagatggggtctttgaagaggtaattaagttaaactgaggtccttagggtgagccctaatctgatatggattactaaaagaggagattaagacaccaacagagctccctgagaggctgtaggggaggacccttcctgactctcccagctcctgggggctccaggcatctctggctttgtggccacatcactccagtttgtgcctccgtccccacgtggccttctcccctgtgtctgtgtctcctcctctgtctctcagaaggacactggtcattgcatctagggccctctctaaaccaggatgatcccatctcagggtacctaactaataaggtctcacgcacaggtttgtggagtcagcacatggacagatcggtttgcagacccccattcagcccactgcagtggcatgtgcaaacacagagtagtagcctctatgccagccttaccagcagagcgcttgagtggtgctcacatgctttctgcaacaggagaaaaggtgagaaacctccttattcatttggtgggcttttagaaggactgcctcagaatgcaggctgcatctgctttttaaaagatgccaacctcaggagcagttgccgcagagcagggcctcccttctttgtagaggacaatgcagcacctgcagcagtctgccctgtgggggctgggagggtggctcccgcatgtcatcccagcaccttgggaggccaaggaaggtggatcacttgagcccaggtgtttgagaccagcctgggcaacatggcaaaaccctgtctctatgaaatacacaaaaaatttgccaagcatggtggtgcatgcctgtagtcccagctactcaggaagctgagagtggaggatggcttgagcccgggaggtggaggttatggtgagctgaggttgcgccactgcattctagcctgggccacagagcaagaccctgtctctaaatcaatcaatcaatcaatctgccccttgtccagggatcccctttcgaacaccctgagcaagcctggttgtaattcacagaacatgcagttcatctgtttacagtgtacagttcagggacttttattctattcatggagctgtgcatctgtcaccacaaaccatgttagagcatttgcatacccccaaagaaactctgcatccccttagccatcacctccagcgaggagcgaatctgtgtcccctaaacacctacatcgaagtcctgacccccaggacctcagactgtgactctatttggagactgagtctttagagacgtgattcaggtaaaatgaggtcactagggtgggccctgatccaataggactagggtcctcataagaagaggagataaggacacagacacacatagagcaatgaccacctgaggacacagggagaagatggtgtctacgagcccaggatggtggcctcaggaggaaccagccctgcccatgcttgatctcagacttccagctcccagaaatgtgagagaataaatgtctactgggtttgtttttctgttttattttgttttgtttttttgagagagggtctcactctgttggctggaatgcagtggcatgatcacagctcactgcaacctccctctcctcgtctcaagcaatcctcccacctcagcctcatgagtagctgagactgcaaacacatgccaccacatccttgtattttttgtagaggcaggttttcactatgttgccaaggctggtctcgaactcctggcctcaagtgatccacccaccttggccttggccccccaaagtgctgggatgacactcatgagccactgtgcccgaccaatatctggtgttgaagcggccaggtatgtaggactttgttatggcagccccagctaacactcctccacctctcagcaccctaaccctccgtgtctggcagccactaatgtactttccatctctatagactcccctgttagggacatttcatacaaatgcaattatataacctgtggtcttttatgtcaggatgctttcacagaccagtgttttcagggttcctccctgtggcagcaagtgtcagtaccgtgcctcacgccttgcagtggctgaatctatgagaattccacagattccattctatgtggatacctcttttggcttccttttttttcttttttgagacagggtctcactttgttctttcaccaagcctggagagcactggtgcgatctcggctcactgcaacccccgcctcctgggctcaagctattctcctgtctcagccttccgggtagctgggattacaggtgtgcaccatcttgcctgactaatttttgtattttttttttagtagagacggggttttaccatgttggctaggctggtcttgaactcctgacctcaagtgatctgcccgcctaggcctcccagagtgttgagattattggcatgagtcaccatgcccggccctcactgttttttgatatctgatgctgaaagcttttaggcctcttctctctgtgttccccatctggacaagcagataagaaagcacagggaatgtctactttggtgctgatggcagattcagaccataaacgcccccacccttgcatgggaactctcatccaatccccacaccctcacagcaattaaaaacataaatctcctttctttgcttccttatttcacatgagcttggaaggtctgcactgctctccctagaaagcctcataatgtttgtcataagttgtctcatgtactctgtgtgtgtgtgttggtgtgtgtgtgggtgtgtgtgtgtgtgtgtgacgtcacccatctcaacatcaacaccaaacttaggatagcggtcaatctgcctctacaggaggccataatgcaactaattctgaaatccagtgaagtcttcacagtctattcctgtgcctttcagagcagggatctgcttaagccaaatgcatgtctcccttccagcaatgacatttgtgtgctttgctcagaatgccaaatattgaccagcttgcagaggaaggtgtgaggctcactcagcacctggcggccaccctgctctgcaccccaagccgagctgcattcctcatggggagacattctttcaggtcaggttggtgtcatggagatgatggaagaatgggcacatctgtgtgcactcattctatcatctgtaacagttgagtactgatggtgaagatataggggcaatggtacaaagattatctgcaattcatcctcttccctatatttatgtaaggaatattgtattgtgtgcatacacataaaagttgtgatcattaggatgtgaacagaaaagccaaggtctgttgaatattttaaagaggtttattctggagccagtatgactgatcacaagaccaagtgtgtcttagagagagcaaagtttccccaagttgagaagcattgtgagatagatagatagacagatagacagacagatagatagataattgatagctagatacatgctagatggatgataatggtagatgatggataattgatagataaatatctagatgatgatgatacataatgatagatgattgataatgacatgataggtgattgatagctagacagctagataacaggtgattataatgatagatgatagagaagtgatagatgataatgatagctgattgatagctagatgagtaatgataatgatatataagagatacatagatggatagatatagatgatagatgatggatacatattgggatagataggtgataggtaaacagatagatagcatatgagagatcacatagagtctgtcatcctaaggtagggtgtctctgttttggcatgatggacatttggggctagaaaattctctatggtgaggccgttctgtgcactgtatgtagggtcttgaacagcatacgtgggctccacacacctgatatgagtagcaccacaccccactctttctgagttgtgacaccacaaacatcttcagacattggccatgcttattattttgagaatagtatgataggtaggtaggtaggtaggtaggtaggtaggtagatagatgacagatgatagatgggtagataagtgatagctccatacatgatagatggatgatagataacagcagcttggctcggctgcgcaaatccagatctcagacaccaaatccccatagttgagaagtcctcctctagagaagggaaagtaaattcttactctcttccctgccccacaggcatggacgccagcaatggatactgggcccttcagtggaatgcaggctcaggtggctccctgagaacgaaaccacttttgcaagaatcttgcagcaccgcgactatgcaactggcctcataagtgtggatatgtgggagccttatattatatggtggttgagaagattcatgataaaaaagatcccagtctgggtgcagtggctcatgcccgtaatcccagcactttgggaagatgaggtgggcagatcacgaggtcaggagttcaagatcagcgtgaccaacatggtgaaaccctgtctctactaaaaatacaaaaattagctgtgcgtggtggcgcacacctgtaatcccatctactcaggaggctgaggcagaagaatcacttgaacccgggagacagaggtttcagggagctgagatcgcaccactgcactccagtctaggcaacagagcaagactctgtctcaaaaaaataataataataaaataataaaaataatcctgttttccctcaaaggaaaacaatcctgtctcctctgaatcagaagttggtgcccagggggccaggtcggtgctcatgcctgtaatcccagcactgtggaaggctgcggcgggcagatcatgagggcaggatattgagaccatcctggctaacacagtgaaaccccgtctctactaaaaaaaaggcaaaaaattagccagccacggtggtgggtgcctgtagtcccaggtactcaggaggctgaggcaggagaatggcatgaacccaggaggaagagcttgcagggagccgagattgtgccactgcactccagcctgggcgacaaatcgagactccgtctcaaaaaaaaaaaaaaaagaagttggtgcctggtccgtctcatacctattggattgttcccagtttttttgagtttttttctttttaaattccaaatcctaggagattgccctcttttcttctctagacctatcagtcttcagcttgtccccatttatcatgaccttcttcagacattatctttctctacatgttcactcatcatctcaaaacccccagagttaacaaacactgccttcctttagacaacaagccccagcaggggcacaacaccttctttataacagataccatgtcaggggtctccaagagcaccatttaaaagagacagcatgtcaaaagtctcaaagaccaccctttataagagcatgtcaggggtttccaggaccaccctgtatcagagacagcatgtcaagggtctccgagaccacccttaagttcaggaagttgctaggaggacttggcatacagttgtgctcatgggtgatttatgacagtcaaaggaggtaaggcaaaatcagtgaagggaattacatggatgaagcccaggacagaccagacacaagctcccaagaatcctcccacagtgggatcacataggatgcaccaattcctccagaaatgagttttaacaacacgcatggaatgctgtctattagggaagctccggggagattcagcgcccaggggtttctgttgggggctggtcctgcaggcactcactgcctggcaccaacccgaattccagactcccagagccaaaggagatgtttagcatgtttcactcatgtccttgtgaagggaccaccaaacaggctttgtgtgagcaataaagctgtttatttcacctgggtgcaggcaggctgagtccaaaaagagagtcagcgaagggagatggggatggggccattttataagatttgagtaggtagtggaaaattacagtcaaagaaggttgtttcctggcaggcagcaggggcagccgggagggtcacaaggtgctcagtgggagagcgtttgagccaggataagccaggagaaggaatttcacaaggtaatgtcatcagttaaggcaggaacaggccattttcacttcttttgtggttcttcagttacttcaggccatctggatgtatacatgcaggtcacaggggatatgatggcttagcttgggctcagaggcctgacagcatgaaccacattgcttttgcatatagcttaggcagtcagcttactattttaataatgtgaattctccactggaaatccagatctcaaacaccagccatggggaatcttacaagccggccttcctaaggggcactagctcaggcctgccccttaaactcctttctgcacggagaggaaaggagggagatgttggtttatgccgccaagcaccaggcagtctgctggttacctccttcattccttacacagcctgtgggtttagaggtgctgtccccgtcatacacatgagaacgtgggagcgcagtggtgaggccacccgccccaacctggtggtgggatttctgtgcagggtccccagttcctctctgtgcttttctcacactcaaagccactgtcccattcacaggagccgcaacaccccaacttgtccaaagctgtggttttctaaaggaggacaaccattgttcctccttttcaagtttcctgccactttatttttattttgaatttttttaaagttttttcttcttttatttattatttatttttatttttttgagatggagtcttgctctgtcccctacactggagtgcagtggcacgattgcaactcactgcagcctccacctcctgggttcaagcgattctcttgcttcagcctcctgagtagctgggaccacagacatgtgccaccatgcccagctaatttttttgcatttttagtagagccagggtttcagcatgttggccagactggtctcgaactcctgacctcaagtgatccacccacctcggcctcccaaagtgctggggttacagggccagtgctttatactgtagaagtctgtgtatctcctactctgagggtggatttattctttattttattttttttagagacaggttcttgctctctcacccaggcaggaatgtagtggcaaaatcacagctcactgcagcctcaaacttctgggctcaggcgatcctctcacctcagcttcctaactagctgggaccacaggcatgcgccaccatgcccagctaattttatttcttgtttttgtagaggtgggggtcttgctatgttgcccaggctagttttgaactcctggccccaagagagccttccaccttagcctccaaaactgatgagattacaggtgtcagccactgcactcagccaatttttctttcttttgttaactattttagtggatttacttttgtttaccaagattgcatgcatcttggtaaacatttgcatttcttctaagagtcttcattttgtggtacacatactcagtctgttttggtgaaagcctgttcttcatgttccagagacactcctcactatatccaagcatattttttcccctaaatgtaagaagggggaataggagtgtgtctgggtttgagaaaaagatacatttttagggattctgaggacagtttgtgaggaatggtcaggaggaagtagggagaaaccagcttgaactcctccactgttttgtttgtttgtttgtttttggagacagggtcttacttactgggtgtcccaggctggagttggagtgcagtgtcacagtcttggctcactgaaacctctacctcccaggctcaagcaatcctcccacctcagcctcctgagtagctgggaccacaggtgcctgccatcatgcctggctaattcttgtatttttagtagagacagggttttgccatcttgcccaggctggactcaaactcctggactcacgccatcctcccaccttggcctccaaaagtgctaggattacaggcaagagccaccatgcctggccttatctcctctagtttcaagtggggcaaataaggccctgaaacctttcccatctatttctgtacctgaatttgagttggcaggtggtctggatgtgagatggacagaagggttgcatggacaccccagttctcagacattctcctgaaatttgaggtgtgggcttccccacattctagctctacgatattgttctaacagttattgccttaggaaaaattgtataagggcattttgattacaagttggtggagagagccagtttctgctactacatttcagaattattcaggagtcaactatcattagtaactggttaccttttaagtaacatatatatttatatacatataaaatataatatataatatatactttattttttatacacttaaatatatatttatatactttatttttactttaatacttatatataacttataatacttatatttacttatatacaactattatgtattactcatatataacatataatatcatattagcttataaaatatgtaagtatatattatatatgacatataaaatatataggtaatgtatacttacaaatttgaggtaatatatctgttacttaaagatatttacctgtggtgaggcgtggtggctcacacctgtaatcccagcattttgggaggctgaggcaggcagatcacctgaggtcaggagttcaagaccagcctgaccaacatggagaaacctcatctctactaaaaatacaaaaaattagccggagacggtggtgcatgcctgtaatcccagttactcaggaggctgaggtaggagaattgccttaactgggaggcagaggttgcagtgagccaagattgtgccactgaactccagcctgagtgacacagcatgactccatctcaaaaaaaaaaaaaactatttacctgtatatataggttatatatatttatagattacctatgtatatataaatattaatatttatacagatatatatatctatatgttatgaatgtatatttaaaaattaatacattttatttatattaatatatttgtatatataaatattaatatttttatatacataggttatatatattatatataacctgtattcatataggttatatagaatatatatttgtatttatttatatatataaatttatatatagggtccctttgatgtattgtgtattcttacattataaaggttttcttttttcagtataatatataatatgctataacatataatatgtaactatatatttgtaatgtatatgatatataacctatatttgcattatatataaatataaatattttgaaaggtatgcaactcctatattgaaaggtatgtaactataacattttaaatatttatatttatcacattatatttatagttatataggttatatattacatataaaacctatattataggtaatatattacatataaaacctacattataggttatatatataacctatattataggttatatataaaatctatattataggttatatataaaatctatattataggttatatataaaatctatattataggttatatataaaatccatattatcggtaatatatatcctataatataaatacatgtattacatctatatgtaaatgatattttgtgaattatttaatagaatggnnnnnnnnnnnnnnnnnnnnnnnnnnnnnnnnnnnnnnnnnnnnnnnnnnnnnnnnnnnnnnnnnnnnnnnnnnnnnnnnnnnnnnnnnnnnnnnnnnnnnnnnnnnnnnnnnnnnnnnnnnnnnnnnnnnnnnnnnnnnnnnnnnnnnnnnnnnnnnnnnnnnnnnnnnnnnnnnnnnnnnnnnnnnnnnnnnnnnnnnnnnnnnnnnnnnnnnnnnnnnnnnggccagaggggagggtgaaaaaaaaaagccagtaggagagggtaaaaataaaaacgagaggagaggggaaaaaaaaaagcgaaattggcgggaaaaaataaccgaaaagaaaaaaacagggataacatagagagggaaaggaaaagtcggaaaagaagtaaaagaaagggctaagggtgcaaaaccgtaaaagcaacaggccggaaaagggaaaaaaggggaagaaagtaataaatgaataaggcgaatggtggttttttttttttttttgtggagtctctctctggtcgcccaggctggaaagcagtggcacgatctccggctcagtgtaacgtccgctgcccgggttcacgctgttctcctgcttcagcctcctgagtagctgggaccagcagcgcccgccaccacgcccagctaattttattgtattaagaagagacgggtttcaccgtgttagccaggatggtctcgatctcctgactccgtgtcctcccatctcggcctcccaaagttctgggattacagcgtgagccacgctccccgccaaaagtcttaaacctttaatcacttgccaagggttctgacatggatacattcattagtctttcacggatcagaatgcattcatttaggccgggcgcggtggctcatgcctgtaatcccagcactttggcaggcagaggcgggcggatcataaagtcaggagatcgagaccatcctgactaacaccccgtttctactaaaaatacaaaaaattagccaggcgtggtggcaggcgcctgcagtcccagctaccctggacgccgaggcaggagaatggcacgaacccgggaggcggagtttgcagtgaacccagatcggcgccactgcactccagcctgggcgacagagcgacactccgtctcaaaaataaaaataaccaagaatgacgttcgtttaaacaccgctatgcaatcaattcattgcctttccatttccaagttttgctcttcgcagacttttcttttcctgccgaggcggaatgatcggaaggttctttgcagcagaaagggctgcttcaaagcgggtctccgttgaacgtctgcgtttcttttaggaaaatggcaccagggtgtgaattgtgcattccgcgggatcactgccaccacccccagaaccacggatttgactatttctacgacaagcccttcacgctcacaaacgactgtgacccaggcaggccccctgaagtggaccgcgctgagggcgcagctctggttacaccagttcctggccctggggattctcaccctggctgctggccagacctgcagtttcatctctgtctccgcgagagcagtcaccggcatgggcttcttgtgttttatctcttggtactcctcctttgggtttgtgcgacgctggaactgtatcctgatgagaaaccatgacgtcacggagcaacccatggttctggagaaaacagcgagtcttatgctaaaggaagatgtttcctatattgaaaggtaagcaaccatcacatcttaaagaggagatggggccggacgcgatggctcatgcctgtcatcctgtgtccggaattggtgggttcttggtctcactgacttcaagaatgaagccgcccaccctcacgctgagtgttacagctcttaaggcagcgcgtctggagtctgtcccttctgatgttcggatgtgtttggagtttcttccttctggtgggtccgtggtcttcctggctcaggagtgaagctgcagaccttcgcggtgaatgttacagctcttaaggtggcgcgtctggagttgttcgttcctcccggtggtctcgtggtctcgctgggctcaggagtgaagcggcagacctttgctgtgagtgttatagctcataaaagcagtgtggacccaaagattgagcagtagcaagatttattgcaaagagtgaaagaacaaagcttccacagcatggaagcggaccctagcgggttgccactgctggctggggcagcctgcttttattctcttatttggccccacccacatcctgctgatgggtagagtccagtggtctgttttcacagggcgctgattggtgcgtttacaatccctgagctagatacaaaggttctccacctccccaccagattagctagatacagagtgttgacacaaaggttctccaaggccccaccagagtagctagatacagagtgtggattggtgcattcacaaaccctaacctagacacagggtgctgattggtgtatttacaaaccttgagctagatacagagttcagactggtgtatttacaattcctgagctaggcataaaggttctccacctccctaccagactcaggagcccagctggcttcagccagtggatcttgcacaggggctgcaggtggagatgcctgccagtgccaggcggtccgcgtgcactcctcagcccttgggtggtcgatgggactgggctaggtggagcagggggcggcgctcatcagggaggctcgggcggcacaggagcccatggagggggtggaaggctcaggaatggcgggctgcaggtcccaagccctgcgccgggggaaggcagctaaggcccggtgagaaatcaagcgcagcaccggttggctggcactgctgggggacccagtacaccctccgcagccgctggcccgggtgctaagcccctcactgcccgggcggcaggccggccggctgctccgagtgcggcccgccaagcccatgcccacccataactctagctggcccgcaagcgctgagcctctcccgacacacctccctgcaggctgagggagccggctccggccttggccagcccggaaaggggctcccacagtgccgcggtgggctgaagggctcctcaagtgccgccaaagtgggagcccaggcagaggagacgccgagagcgagcgagggctgtgaggactgccagcacactgtcacctctcaatcccagcactttgggaggtcaagatgggaggatcttttaccccaggtgctttagactagcttgggcaacgtaagaagactggttctacaataaataaaatcattagccgggcatggtggtgtgtgcctgaaatgccagctactcaggaggctaaggtgggaggttcgcttcagcctcagatgttgaggctgcagtaagcaatgatcacaccactgtgcttcagcgtgggtgacagagtgagactctgtccctaaaaaaataaaaataaagtttaattaaaaaaaagaggcagtaactgctcagagcatctgagagtctccttataatctttgggatctcagacaccaaccctcggaagagacagctttgcagaagccaaccttttcatgtggctgggttccccatatgagagtctcgaagtggatgtcatgtgatggcttcaatagcattgacatacacgccattggattctgtacatttttattgacatttctttaaacttttttttttttttttgcattctttgtagagatgaggtctcactatgttgcacaggctgctctcaaactcctgggctcaaacaatccttccatcttggcctcccaaagggctaggattacagacgtgagccactgtgcctggcctttttctaatgtctcatttttatttttttttttttttgagacaaggtctcactatatggcccaagctggtcttgaattcttgggctcaagccatcttcccacctctgccttccaaagtgctgggattgtaagtgtgagccaccgtgcctggcccttactttttaatttgtacaaatgtatggggtatgtgtgaaattttgttacgtgtatacactgaatagcgagcaagtcagcatacttacagtgtccatctcctgagtacaatacattttgctagctttggtcactctactctgctaccagacattgaatgtattcctttaagcttactgtatgtttgtactgtttaaaccacttctctttgtccttcatccttcccagcctctggtctctatcattctattctctatcttcatgtgatcagtttttcttagctcccacatgtgagtaacaacatgcagtattggtcattctgtgcctggcttattttagttaacatagtgacctcctgtttcatctgtattgctgcaaatgacaggatttcattctttttgatggctgaatagtattccatcatgtacatacaccagatattccctttttttctgagacagggttggttctgtcacacatgctggagagcagtggcatgatcacggctccccgcaacctgtctcccaggctcaagcaattcttgtgcctctgcctcttgagtggctaggattataggcgcctgccaccacaccctgttaatttttttatttttactagagacggggtttccccatttcaccatattctccaggctggtcttgaactcctgacctcaactgatctgcaaggcttggcctccaaaagtactgggattacaggcttgagccaccgtgcccagcctccagtctttattatggctgaatggtattccactgtggacatacacagtatatatatatacacacatatatatataaataatatgtgtatataaaatatatatagtagtgtgtatatatataaaaaaatatatatatatatatatatttttttttttttgagcagggtctggctctgtcatccatgctggagtgcagtggagtgatcagggctgactgcaagctccacctcctgggctcaagccatcctcccacctcagcctcccgagtagctgggaccacaggctcgaaccaccatgcccagctaatttttctatttttggtagaggcagcatttcaccgtgttgcccaggcctgtcttgaattcctggcctcaggtgatcctcccacctcagcctcccaaagtgttgggattacaggcatgagccaccgcgtctggcccaccatctattctttctgtgttcacccactgatggcctcagaaggtgatcccctgccttggctcttgtgaatagtgctggagtgaacatatgggtgcaggggtccctttgatgtactgtgtgttctgtgtattctcaaagaggttttcttctttcagacacaagcatgggccatttctcctcttcctttctttgctgcatgtgcacatnnnnnnnnnnnnnnnnnnnnnnnnnnnnnnnnnnnnnnnnnnnnnnnnnnnnnnnnnnnnnnnnnnnnnnnnnnnnnnnnnnnnnnnnnnnnnnnnnnnnnnnnnnnnnnnnnnnnnnnnnnnnnnnnnnnnnnnnnnnnnnnnnnnnnnnnnnnnnnnnnnnnnnnnnnnnnnnnnnnnnnnnnnnnnnnnnnnnnnnnnnnnnnnnnnnnnnnnnnnnnnnnnnnnnnnnnnnnnnnnnnnnnnnnnnnnnnnnnnnnnnnnnnnnnnnnnnnnnnnnnnnnnnnnnnnnnnnnnnnnnnnnnnnnnnnnnnnnnnnnnnnnnnnnnnnnnnnnnnnnnnnnnnnnnnnnnnnnnnnnnnnnnnnnnnnnnnnnnnnnnnnnnnnnnnnnnnnnnnnnnnnnnnnnnnnnnnnnnnnnnnnnnnnnnnnnnnnnnnnnnnnnnnnnnnnnnnnnnnnnnnnnnnnnnnnnnnnnnnnnnnnnnnnnnnnnnnnnnnnnnnnnnnnnnnnnnnnnnnnnnnnnnnnnnnnnnnnnnnnnnnnnnnnnnnnnnnnnnnnnnnnnnnnnnnnnnnnnnnnnnnnnnnnnnnnnnnnnnnnnnnnnnnnnnnnnnnnnnnnnnnnnnnnnnnnnnnnnnnnnnnnnnnnnnnnnnnnnnnnnnnnnnnnnnnnnnnnnnnnnnnnnnnnnnnnnnnnnnnnnnnnnnnnnnnnnnnnnnnnnnnnnnnnnnnnnnnnnnnnnnnnnnnnnnnnnnnnnnnnnnnnnnnnnnnnnnnnnnnnnnnnnnnnnnnnnnnnnnnnnnnnnnnnnnnnnnnnnnnnnnnnnnnnnnnnnnnnnnnnnnnnnnnnnnnnnnnnnnnnnnnnnnnnnnnnnnnnnnnnnnnnnnnnnnnnnnnnnnnnnnnnnnnnnnnnnnnnnnnnnnnnnnnnnnnnnnnnntcaggaaaccatggagaggaccggtgaggctgcagattcttaaaagagcacagacataaaaattcttgcagaatctgaatgtgtctcctgagacaagcatagtgttagagtgggattagttcacattcttagaagtctacattttcaggtggggcaaagtggctcatggctttaatcccagcattttgggaggctgatgtagggagatggcttgaggccaggagttcaagaccagcctgggcaacatagtgagagcccccgcatctctacaaaaaattttaaaaattggacaggcatggtggtgtgcacctgtggtcccagctactccggaggctgaggtgggaagatcatttgagcccaggaggttgaggctgcaatgagctataattattgcaccattgaactccagcctgggcaacatatcaagaccctgtctccaaaataaaaagaaataaaaaatgaataataggaagaaaaacttctctcatatcatttatttgctccttcagtatttccaattacttagtctaattctgcataaaatcaactgtattagtccattcttgcaaagaaataacagattgggtaatttataaagaaaagaggttggattggctcatagttctgcaggctgcacaggaagcatggcggtgtctgcttctggggagaccttggggagcttttgttcatggtggaaggtgaagggagcaggagtctcaagcaggagcaggaccaagagaggaggggaggagccgcacacttttaaacaaccagatctcgagagaagctactcactctgcagcaccaaggggagatggtgctcaaccattcatgagaactctgcccccatcattcagtcacccccccaggccccaccaccaacactgaggatgacaattccacatgagatttgggcggggaaacacatccaaaccatattatcaaccttctacacagccaatgacttaacatcctcattagaagttacagaaactaaagcaataaagttcaggacaatgcagagatgtcaccttccgtctatggccttgaagaaaccctggagaggaccaacgaggctgcaggtcttaagagagtgtagatattaaaatccttgcagaatctgaacatatctcctgagacaagcatagtgatagggtgggattggttcatagtgtaaaccaaaaataaatttaaaggccccccacaaccatctgaatggattcccgcctttgccagggcaccctaaaacttaacctgagagtctggctcatgccatgatgggaagaggagttgggcatgcctcattctacccctccagcacgaacatccacacagaccttaactctgataagtaacatttacaatctgttttctctgaagcctgttacctggaggcttcatctgcatgataaaaccttgagattgagacctgcctcagatacttttcagtttatagcagtcttcaaagtctgcattttcggagctacagatgaccatgtggcttatatcgttttgactttatgtcagtgctttcaatgaccagtggcctccagggataaagcaattgcatggtttgcagggcatcctctgcactgctgagccatcaaactccaaatgccaatgcccatagatgctacttagagccctgcttcctcctacatagacaggattctgtcatcactgagtctcaccatttccctctccccagcatctttattatgtcacacacacacacacacacacacacacacacggcactatgtttacaaaagcatgcccgctggcaacctcttggcattgtgtgttcattctgttttgtattggtggtatcctggggtcgaccaaaagagtcaaactccgtaaaatatttggagagatttattctgagccaaatatcagtgaccagtgacccatgacacagccctcaggaggtcctgagaacatgtactcaaggtggtcggcgtgcagctcagctttatacatttagggagacatacggcatcaatcaatatgtgtaagatgtaccttggttcagtgcagaaaggcaagaccactgaaagggggacttccaggtcaaaggcggatttacagattttctgattggcaggtagttgaaagagttattatctgagaatcaatagaagggaatgtctgggttatgataaggggttgtggaggccaaggtttcatgatgccaaagaagactccaggtagcaggcttcagagggaatacatggtaaatgtttcttatcagacttaaagagtctgttctaccactctttttttttttttttaaacagggtctcagtctgttgcctaggctggattgcagtggtacgatcttgactcattgcagccttgccctcccagtctcaggcgatcctcccactttagcctcccgagtagctgggactacatacaagcatgtgccaccacatctggctaattttgtatgttttgcatgttttgccatgttgcccaggctgttcttgaagtcctgagctcaatcaatcttactgcctcggcctcccaaagtgctgggatgataggcatgagccaccatgcctgacctctcagtcataaggcctctgttttaatgtgaatgctggtcagttgcacctgaattccaaagggagggtatcatgacgcatgtccaccaccgccccaccccccgcccccgccactttccatcacagcctgacctagtttttgttttttgtttcttttttcttcttctttttgcttgttttttagagggagtcttggtctgtcacccatgctggagtgcagcgcagtgctatctcagctcactgcaagctccgcctcctggattcacaccattctcctgcctcagcctcctgagtagctgggactacagttgcctgccaccatgcctggctaatattttgtgtttttagtagagacagggcttcacagtgttagtcaagatggtctcgatatcctgaccttgtgatctgcctgcctcagcctcccaaagtgctgggattacaggcatgagccactgcacctggccctcttttgggtttttttctgaaacagtcttactctgttgcccaggctggagtgaagtggtacaatctcacctcaatgcaacctctgcctcctgggttcaagcgattctcctgcctcagcctcccaagtagctgagattataggcatgcacccccacacctaatttttgtgtttttggtagagatgaggtttcaccataatggccaggctggtcttgaactcctggcctcaggtaatccgctcacctcaggctcccaaagtgttggctcacaggtgtgagccgccatgcctggcctgaccttgtttttcaggttgactttggaatggccttggctgaagtgagagtccatcagttgattagggggcttcaaattttattgttgctttgcattgtaaacagtcctgtggtatcacagtgattagctatgtcttaccctttgggatcacatcgtaaccatggcctccgagtaactgtggtctcttcttatgacttcctagcaagaggtgtctcacgcagaaaggaagaagtgtattgaactagcggacgctgctttgttttcttggtcctgaaactttccattttctgtaaaggtaagattcttaatgccatcgaagacaatgatttaagaaactcaacattcacgtatttcacctctgaccatggaggacatttagaggcaagagatggacacaggagttagggggatggaacagaatttacaaaggtgagctctggacactggggacacatatgcatttgaccaaatagctcccaccactgagggtcccagaacaagtcaaactgaaaatgactttgctcatttcaaaaagaatgtattgaacagctactgtagtacaagttctacctagatgagcaggacaggcagataaaaagtcacatccccttcctttaaagggtttacactttaatagaagagagagaggtataaataaataattcagataaaattaaaatttattatattcttaatttttaaatatttaataaatgcattactattttaatattttaaatgcatcaatattgatgcatatttgataaatatttttaaaattattggtatttaacaagcatttttaaattattaaatgtaatgaatattttaatacattcttttattctaagtaaaggtagcatagatttacaagaacagttgaatcagccacagtgacccaccgatattcaagagcccaggtagtagcacgattctggaaatgttgctgtggctgtttttgggaagctgaggctgccccagtgtgcatgtgtgtgtgcagatggctgtgcatattcatatacctatgcacaaatacatccaggtatatgtatagactgggcagtttccggcaaaatcctaatgatgccttttacttacaggtgggaagggcataggaggatgggaagatgggatccatgtgcccgggattttccactggcccagggtgctcctggctggctgagtgattggagagcccacgagcctgatggacgtgttccctcctgtggtccagctggcaggcggcaaggtgccccaggacaggtacgtggcaataaggctgcgtgttccctattttttttaaattgttcttagtttttatttttttttaattttcagtaggattttggggaacaggtagstggtatttggttacataaataaggtttttttttggttgtttttttggggtttttttgcgatggagtctcacactgttgcccaggctggtgtgcaatggcacgatatcgggtcactgcaacctctgcctcccaagcgattctcgtgtatcagcctcccaagtagctgggattacaggcatgcaccaccatctcctttacccatgtgaccatgtgtcctggggtctattatgattaaaaagtaagaacaggtcaggtgcaatggctcatgccgataatcctggcactttgggaggctgagatgtgctgatcacctttggtcaggagtttgaaagcagcctggccatgtggtgaaaccccatctctacaaaaaatacaaaaattagctgggtgtcatggcttgtgcctgtagtcccaactactcaggaggatgaggtacaagaatcacttgaccagggggcagaggttgcaatgagctgagattgtgccactgcactgcagcctgggcaacatagcaagactctgactcaaaaaaaaaaattaagaaaattcaacctggaaatgtgggctgtccagctggaatttgaaggctttgtgttaacatccacagtgacagtgctgtgtgttggggtgtgtgtgtgtgtgtgtgtgtgtgtgtgtgtgtgcatgtgcactctgcttatgcagtgctgcataataaatgaccccaacacttaagagacaccatgtcttgaaataaccacatgtatcctgctcagcaacctgcaatcttaacagtagctggagagacagcccatctctgctccatttgctgggaaggcttgcattctggaacatgtgttcccaggtgcaaaaggctgcctgggaacctgtggtctgactctgctctgtgttctcttcacggaatcagggtgatcgacaaccgcagcttggtgcccttgctgcagggagctgaggcatgcttagcacatgagttcctgtttcattactgtgggtagcatctccacacagcacactggcaactgaaggacagtaagtacacactgtccacagccagggttgtccagagaaacagccaataagatgtgtggatgtgtggatggatggatggatggatggatggatggatggacagacagctatagaaatacagatagataaaccaatgagtagattatagatagacgagaggagggggagagagaaaaagagagagagagaggataatggatatatatagagagagaataatggatagatagatgatagagagatagataaagatacacaatggatggatagatatatagataagataaatgataagttacatgatggatggatagatagataagacagatgatggatagatagataatatagatagatgaaaagtagaagcagttcatggatggatgaatagatggatagatctttcatggatgatggatgaaaagtagatagagatatctggtgggctgtttgaaaaagacagatgaccatatagttagataatagatagatgatagacaggtgatagataagttgatcgataaatagatgatagatggatagaatagatggtagataggtagatagatgacaggtatgtaggtagatggatgataaatagataagagtctgtagatcaatggacttatagataggtaggtaagtaggtacacagagagagaaagaaacagagacaaattttaatgaatcatctcacgtaggtttcaggctgacagcactgaaatctgcagggcaggccagcagtgtagaaattctggcaggagctgatgttgcagtgttgagcctgaaggctgagggacttatgcagaatttctacactgtcatctgaatccagatttccttcttccttttgggtcattcttgtttcctcaagacagtcaactgattaaatgaggcccaccacattatggagggcaatctgctgcactccaatctgctgacttaaatctcaatctcatctaaaaatacctttacagcaacatctagtgtttgaccaaatatctgggtactgtggcccagctaagctggcagataaaattcaccatcacagagcagatccctttctttcaagctaagaagagtcagtctgttatctcagagagggtgacgactggtatttggctgtgtttcttttttttttgggggggggggttgggggagacagagtcttgctgtgttgcaaaggctggagtgcagtcagtggtctcagctcactgcaacctctgcctcctgggttcaagcaattctcctacctaagcctcccaaggagctgggattacaggtgcccaccaccacgcctggctaatttttgtatttttagtaaagatgggtttcaccactttggccagggtggtctcaaactcctgacctcaagtcatccaccaacctcagcttcctaaagtgttgggattacaggcgtgagccaccgtgctcagcctggccatgtttctaaggaaagaaatgtgctgagtccacaccatgccctcttcttattgcctttattatccataattaatccaactgaagaccctgagcacacatgattagcagacagatagaggtagacagatgattagataggtacatgtgtaagctgatggatacatagataaatagttagatacatatagatgatagaagagaggagatagatgataaatagacaagtaggtagatagatgatagagatatagataagataaattgatggacagatacagatagatgatagaggataaatagaagatagacgatagattgacagatagacaggtgggtagacagatgatagagatagatgatagataagataaattgatggataaataggtagtcagagatagaccatagaggctagacagataatagggagacacagcatagatagataattgataaatagatagctagataggtaagtagatgatagatgaatggatggatgatggataagatacattgattgataaataagtagagataaacagtagataggtgatggataggtaaacaagagacagatgattgataggtaaagagatcattcatagataaatagatgatcgatagatgagatcgataggtaagataaatggatggattgatagataaatagctagtgatagataggtaagtacccaattgtgccgtttaaaatatcttggttgtttctgtatagaaaggtagtagatcaacgctgaacagtttcaacacggaggaaaggggaagaattaaggaacctctatgattctgatttctgaaagcagccacagtgagcactctgcaatgagtccctttgcctggggcatgcgatgcagagacacaaacggacacacacgggtgcacgcacgcacacacacacgctctgacttgacaagctgaaggctgtgattgtgtgaactgcctcgtgcccgccctccttttcattgaacagggaggttcatgctgatttcacagtgctgacatctgcatcctgtgttcacacctgcatggatttctgccaccctgactcccttcttgtctgcagccaggtggaagcatctggaaggttcattacgtgatcccacagttccaccccatgggagcaggggcctgctacagctgaggcatctgcccatgctccagggagggcatgacccatcacagaccccctttgctctttgacctctccacggaccactctgaggcacagcccctgacccctgactccaagcacctgtaccacgccatgatagcaagggtaggtgccgcagtgtcgaagcattggcagaccctgagtcctgtgccccagcagttttccacaagcaacatcttgtggaagctgtggctgcagccgtgctgcagacatttcccgttctgctcatgcccaaggatggggatggcaccccgaatgccaagactgtgagagaggatccaggagagcctgactgcgttgcaaacaaaattctccaagcttggttctatcttcagcttccctttttgcaaggaacatgccctggactgacagtgagtccccattttctttttttttgagacagagtgtcactctgtcccccaggctggaatgcaatggtgcaatctctgctcactgcaatctctgccaaccaagttcaagcgattttcctgtctcagcttcctgagtacccaggattacaggtaccaggcaccccccaccatacctagtgaatttttgtagttttagtagatacagggtttcaccatgttgcccaggctggtctcgcactcctgacctcaagtcatccacctgcctcagcctcccaaagtgctgggattacaggcacaagccactgcgcccatgtagggtttccctttcctgatttgtgaaataagactgtcccagtaggcacccactgatgcctcttcttcctcttctaaatctcagggttcgtcattgtgccaatgccggatgttttcacccctccgtcttaaagcattgttgcaatttcatcacctagatgacataacagccttacaaaaggacagggaggagtgtctgttcctactctcacatagcagaggaaagttagagcctctcagtctctgtttatgaggactcattgatctcaaagaattgatgcgtttttcatacattagggtctctgtccatgtgtcttcctgatattgttatagaaatggcttcaggctgctggtaacagatgctgggggaaacaaatgccttaaacaaagccaggcacggtgacttacacctgtaatcccagcactttgggaggccaaggtgggaggaccacttgaacctaggagttagacacctacccagcctgagcaacacagtgagatctcatctctacaaaaaaacaaataattagctagatgtcgtggtgcacagctgtagtctcagctacttaggaggccgaagtgggaggattatttgagcctgggaggttgaaactgcagtgaactatgattgcactactgcactccaggctggggggcagagtaagaccctgccttaaaaaaaaattacttaaagaattaagaacaagagaagggtgtgttctcttccaagtagtgaaccaatcaagggtaaacaacccaaggctagcaggctcttttcaattcccagctctgccactcttagcatggcagagagttggcctcattatgtcagcatggctgccacagtgccagacactccaggcagcaggaaggagaaagaaccaaagggcatccctttctcttgaagcagtccctacgacgggggattatctgaaagccccaacccaatttctgcttgcaaccattatccatagaaacaactggaggttgagaagtgcagtcttttaggtggggacctggctgccctgtatgaaaccagaattaggttggttagcaggaaaagaaaatgcttactgagttgactgaggtttttgatgcattgctttattgtcatattaaatgactttatctcactctgcagtgaaacacgtactatcattgcctataattggcaaatgatcctcagatgcacagaagatgcccagatggaaagtttgccccttgggcaaagagacagtgttgggaaccttcagacatgcagagagaaggcagcttttcttcctacattcctcgaatagctaagatttgaccaatatgttttctaagtcaattctcgtgtgtttcatcctcacctcttaccctgtgtcactttgatgatggaagtatagtccgaacctactgcacagctgggaccccctgcccccacatcccagctaatttttgtatttttcgtagagatagggtctcactacgttgcccaggctggccttaaactcctggcttcaagcagtcctcccacttggcctcctaaagtgctgggattacaggtttgagccactgtgccttgcaatttttaaaacttttaacttttatggatacatcagagttgcacatatctatgggattggtgtgatatttttgatacaaacatacaatatgtagtcatcaaatctgggtaactgggctatccattacctcaaatatttatcatttctttgtgttgggaacatttctaaatatactcctctagttgttttgaaatatacaattggctgggcacagtggctcacacctgtaatcccagcactttgggagactgaggtgggtggatcacttgaggtcaggaattccacagtgaccaacatggtgaaaccccatctctgctaaaagtacaaaaattagctgaacgtgatggtgggtgcctgtaatcctagctactcaggaggctgaagtgggagaattgcttgaacctgagagatggaggttgcagtaagctgagatggcaccactgcactccagcctgggtgacagagcaagactccatctaaaaaaaataaaaacaataaattattgttaaaaaagcaaatgtttggccagccacagtggctcaggcctgtaatcccagcactttgggaggccaaagcgggtggattgcttgaggccaggagttcaagaccagcctagccaacatggtgaaaccccatctctactaaaaatacaaaaattacctgggtgtggtggtgcgcacctgtaatcccagctacttgggaggcagagacaggagactcgcttgaactgggaggcggaggttgcagtgagccaagatcgtgccacttccgcctgggcgacaataaagagacttcgtctcaaaaaaagacaaaaacaaaaacaaacagtcaaatgtcttaaagggaagaaagccttgaggttaaaggtcatctccaggttgaatacctcaccctctgtccttggcctccacgtcaccccatcccattatttgggcaaatattaccttcatgctatccattaacataaaaaaaaaagaaacatcacactcccccaggccatcgtgaaaacctggaatacaagaatgacatgttttcttctttgttttcagaaaccacagcacattccccacccggagaacatgctcaaaagaaaaaaaagaagattcagaagtgttcatcttcttttttactttttttttaaatttaaaaatctcaactttcctccacacctgttaagacctatgacatgaacagatatgctttaaaggtagaggttctggctggcttataagcacccaggatttctgcagaaaacctcactggggctttaaaaaaatacattctttaaaactttcttgtatggctctttgtttttgtttttgttttttattttgttttgttttgtttttggagacagggtttcgctctgttgcccaggctggagtgctgtggtacaatcacagctcactgcagcctccaactcccaggcttaagcgatcctccagacttaacctccagagtagctgaggcaacaggcacatgccaccatgcccaactaattttttttttatgtatagagatagggtttccctatgtttcccaggctggtctcgaactcttggcacaagcaatcctccacttcggcctcccaaagtgctgggattatggctccttgagagttaggttccctttgagtctaactgtggcaggccaggtttccattagcaggcagagcaaccagtttttcccctaatgctttattataattctgatgaatgcgtaaattaaacattaaagaactggagaaagtggtgctggggaaggagggccaaaatgccaaaacaaacctatgaaggccctgcgtgagtttcctcagaccctaaagtcggatcaaataataaaagcattcttacacatacacctcataccagggcttacagaggattaagaaactttccaagggtctagagaaagcttcgtagaccccagaccctagttaaagattatatagggactgaatgaaatactcccgcttgtaggtgcaatcctacacgtaggcatagagcttaaaaatgcatagaaaccctggaaaaaacttgtcactttgagttgacctcgtgagttaatctgaccttctccctgtaacccgttggagaaataaattcccttctccccaatctgtctgcacctcattattgaaccccaagaacaagcagtcagccctcgttcgttcgtccagcagcaaaacctttgttaaagaaaaaaactattcagtgatattaggttggtaattgcagttattacttctgcacaaacctcaaacttgtgaaagcgtcaccaaaaagataatgaagacattatccaggcttatcgtatgaagtacagggaccactgcaatggcggttcacagtgcaggagagaggctgggctcaacttccaatatgaatacagcaagggcaagtgggaatgtatagccacgggggcaggcagtgggtgtatagatggcaaagcactaaaaggaaacatcagaggtgaagcgggtcctggctaaaccaacctggcttgttaaagccagccaagggggttaaacatcaaccaggggtggtggacgatgaggaacctgatatcaagaatggtggcttcttgccaaactgacttagcaggtactttgctgaaatctaattttataaggaaacgcacaaccgggcctgggaggggcttcaggagcctggctacggtttggccaggcagagactttttgtcacatctccttctcacctaaaggtgtctgcggtgaattcttgcatctttccttttcatgcatttccccagtcatgtgttgcaaacctaaccctgaaaataccaagtatgcagccggtctgtgagctgagggaatattcggagaaacctgcagagaagcagcgttgtctgcagatttaaagaggaaggaagcaggactcggataaggagggggccagccagaggagtggaggagagctgacttacagctgccttgcagagggcctacctttatcttgggggatgcctgcaagtctggtctttgactcttgttcaagataagagctgggatttatgatgcattagttaaagttcaaacctccctgctgacctgagtccgtttctttacttaaggtttgcacatttgcaagtggcctaaccagttagacagcctggatgcactgaatgaccggagtggcaaccgcctcccctacctcctcaatgtctggtttgaggccccatgaaaccaagattcctctcgccgtccttggtgtgccaaccatgagacagaacaaaggagaccctgggaagctcgtgcccgggatgtccctgaagctccaacactggctgcatgctcttttctctcctcgcacgttctcacaatcttacacgaaagagcatgctgtgtgcgggctgggaagtccactcaaatatccaaactagaaactggctgagtgcagtggctcatgcttatcatcccagcactttgggagaccaaggtggaaggatcactcaagcccaggagttcgagaccagcctggccaacacagtgggaccctgtctacaaaaaatataaaatcaggcaagtgtggtggtgcacacttgtggcctcagctacttgggaggctgaggtgggaggatctctagagcctgggaggtcaaggctgcagtgagctgtgattgcaccactgtactccagcctgggtgacagtctcaaaaagaaaagaaaagaaaagaaaaactttgcgggaaatttttcatatattgaccttttagaaatccaactgcatgttccatgaatggaaaacccagcaccaaaattaactcaaagtggatcagagacccaaatgtaagtgcaaactctataacacatgcagaagaaaacagaggagaaagtctttttcgctgtgggttaggaaaactttttagataagacaccaaaagcctgacccatttaaaaaaaaacttgattgagtttaccaaattccggacgggtgcggggtggctcatgcctgcaatcccagcactttgacaggctgaggcaggcagatcacg

SEQ ID NO: 96967 - DNA, 233286 bp, Homo sapiens
  misc_feature (1)...(233286): n = A,T,C or G
gacagagcgagactctgtctcaaaacaaaacaaaaaaagaaggcaaaggaattctgtgaccaacatgtttcacaatttctgctcgattttataaatgatggcagtttccccctgaaatctctgcagttttatcagtctccctccctgtctgactgcctcagtccttttctatctctgccaactcaaaatggttgaagcaataaagacagcatccgtaacaagatgtacttagattcaggacctctgggctggatcaatttgagggcttaacaatgtcctccagtagccagttccctgtgtcttgcagtcctgtgtttcatatgtcattggcccacttcactcatggcagaagctgctgtacctccagacatcacagcctcatccactaatatccggaggcccagttaagatcatttcctctcagattttctcttttaaaaacaaagacattctttcaggtatcacccccaattcctcatccctgatttacacacagcccctaactaaaagtaatcaggtgtaggccagccatggcagctcatgactataattccaacactttgggaggctgagtcaggaggatcacctaaggtcaggagttcaagaccaacctggccaacatggtaaaaactcgtctctactgaaaatacaaaatcagccaggcatagtggtgggcgcctatatttctagctgcttgggaggctgaggcaggagagtcacttgaacccaggaggtggaggttgcagtgagccaagattgtgccatttcacatttcactccagcctggtcaaaaaagtgagactccctctcaaataaataaataaataaataaagggatcaggtgagaaagcatgaaggaaccctgggaaaaaatacaggctccaccaacaataaggaaaaataatggttgactgggtagccagcagcatgtgctgcaaattatttgcttatttttgtgtcaagttgtttgccaatgtagttctttatatattatcatgttaatcattatcaaaatataaaatattgagtagtaattgcaattgtgacccacacacatacatatagatgcatgttctgtgtatcgcaaatgtgttccctcatcctgtacttgtcttcaattcttagaactttgtcacaatcattttgtgcaatgaaatagcttggcacaaacatctgtttttgatttttttttgtggttgtttgagacagagtcttgctctgtcacccaggctggagtgctgatcatggcttactgcagccttgaacttccaggctcaagcaatcctcccactttagcctcctgagtagctgggactacaggcatgtgccaacactcccagctgtttttttttttaaatttttttttgtaaagatgaggggtatctcactagattggccaggctggtcttgaattcctgagctcaggtgagcctcccactttagcctcttgagtagctgggacaacaggcgtgtgccaacactttgtgctaatttttaaaatttgttgtaaagacagagggatctcactatattggccaggctgttcttgaactcctgagctcatgcgatcctcctgcctttacctcccaaagtgctgggatggcaggcatgagccaccatgcccagctgcctgctgggtttcaatccttcctttcccagtacacatgtaactttaaaaaggtcttgtaactaactctccaataaaattgtcccaggcatataaatgtcttgacgttttcttcaaatgcctccctaggaaaattggcattcacctattcccaccaacagggaggagagaaatgtttactctgaatgcacccatgacaaagctcacctgctgtcaagctctccatggcttcctggagaccaacacacacaagaacagaagcccggcaacccccaggggaagatgcctcctccgggtttaaagacggagctacccttttgcccggggatcatgaatgttgccttgtgacttggtgccttatactctgctttcagagcaccaattctcagtggaatgggagaaacaggcgggtgaggagaggtggggtgatttatggggcagagaatggtgcaacacctacacttgtttgtgttgggagactgaggcctcctgcgttccctaaacatgctgtttaaacatccctgcaactgggccaacgtctctttctctgtggctgtttcaacccttttctgtctctgccaaatccatgccccaccttctccagccctcctggctccagctacccctccccaacaccctcaaatctcagaaatgcaagcagtgcctctcaagcctgcgcattaggaactcctggaggcctggttcacatagcggggttgggggaagccccgagacgcagggttctgatttcagagttcggatgcctaagaatgtgcatgacacagtttcccaggtgatgctgatgctgctggaccaggactgagcctgcacatcttaccccgaattcaaaatcaaaagatgtggtgagggttctcagcaaaacgcagcctgagactctattttggagacccctgttccagagagaagaacagtgctcctgacacttggtgggtggggcccagggacgctgctcaacaccctgcagtgcacaggacgccccccacagtcattcaacttaatagtagtaaagttgagaaagattctgtctattgcctatctatgtatctatctgtctatccatccattcatctatcatcatcatttatctattacctatgtatcatttatctattatctgtccatctatctagccatccatcatccatctatcgtcattatttacgtattatctatcatttatctagtatctgtcttcctatcttcctcctcctcattttcttcttcatcttcttctatcaatctattatctatctgtctgcttgcctccctgtctttctgcctctcaatctaatctatcctcatcatttatctgtccattgtctacatataatctatgtatctaacatcaatctatatgtctatccacccatccatctatcatttatctattacctgtcatttatctatctatgtctatctattatggctttctgcctgtctacctatcatcatcatcacatttatctattatctatgtgtctatcatcatcatcatttatctattatctatcatcaacatttatctattatttatctgtttctctaatctatcagtcctcatttatgtctctgtctctatcatctgtctacctgtcatccctctatatttatcattgtttttctaccatctacttattttctgtttatttatatctatcattatcttcctatcatctattgattatctagctattatctgttttctattatctatcatccatctctctacatctaaccatggcagtggctgtcacttgggtgattttgatgccagagaacacatggtaatgtgtgcagtcccttgtgcttgttaggattaggtggggtgtggtactgcacgtagcaggtggagcccagcggatgctgctaaacaaggcacagtgcacaggatggctccacagtaattatctagccccaaatatggttgaagagtctgagaaagcctgccataggctgaagaaaccaccagtgtaatttgaagtttttcacatccttgctgaagcacaggaaagctctgtttactttgttttcttaatttagggagtgcattaaaaacatcataaggaaatagaagcccaagtttttgttctgttgggggactcttggtgatgtcgtcaccattgtgtgggggtgctccaggtatcaggtgggtggagccctgggacactgctcaacacgctgtagtgcacaggatgatgccaccgcaaagacctcaagcccttaagcactgggactccataatgaagatgggttttccccaacttctgctctggataagatgcccaggggtgggtgatgtgtgttaaggagatcagaggcttctgttatgcatggggagaaaaatgtgttcaccaggccagagagataagagctgcctagaaggaggcaggaggcaggcccctgcctgtctaccctgccagtgagctgctcgacagctgacagaatctatcctgaggatgccagcatggggttgtgttcattgggttcattgtgacaactgtcactgtactttgggaatacctggaaacacaaggtgaagacgccataggaaggttgaggaaggggcagcattcccatgtctttccttagggcctggcagtggctctgcttggtgcagttccaagttgcttccacccagaaggcgctctcttgctacagagcagggtttctcacttattcacttaactcatgcactcgtacacacttgcattcacacaatcatcactcattcaactcatgtattcatacatgcttgcattcacacattcattgattcattcaattcactcacgcatgcatgcattcacactttcacttaattcattcatgcatccattaacttgttcatgcattcaattcattcattcacttatacataatacatgaattcatgaaatgtatgcagtcttcactcattcactcgtgtgtgtgcattaacacacatgctagtttgttcagcttattcatgtactcatacatatttattcactcattcattcatccacatattcacttgtcatgtattctgttcattcactcacacacacacattcattcctgtataaatgcatgactttacctgctcgttcaatcctgcatggatgaattcactcactcactcatgcaggcatgaattcacttgttcactcagtcattcacgtgctcactcatgcatatacgaattcgcttagttactcgttcatacactcactcatgctggcatgaactcacttgttcactcattcatgcactcaagcatacatgaattcacttgctcactcactcatacatgcactcatgcatacatgaattcacctgttcacttactcatacatgcacttacacaagcatgaattcacttaagtcattcatgcactcaatcactcatgaattcagttgttcactcattcatgcactcattcatgcaggcattaatttatttgtttactcatgcatacatgaattcacctttcactaattcatgcactatgcatgtatgaattcacttgttcattcaatcattcatgcattcaactcattcattccctcattcatagattcatgccttcattcatgcatgcatgcattcacctattttttccacacagtcactcctccattcatgcatgtatctctaaattccttcatacatgcattggcccattcatgccttcaactcatgcattcattccctccttggcgcaaatgttgagtcactggttcattcatttcctcgctatctcattcacgaattgttgtttgttcattctcgcctcacatgcattcacgcatacatgcagtcactcatacatgcactcaccgcgtgcgtatagccactcactcgctatgtattcaacagctgaggcctgaacactcattttttctctctttcgtgcattcattcattcattcatgcgtgcaagtttgcgcacgtgtatttttcatgcattcaacaagatagtgtatgagctctgctttctcctctgggaggcttccagagcggcctccactcgggctgcgcgctggccttgggcccagggccttaagtcatcgcaaacatttactttggggccggccaattaaaggttaaatgtccaaacctagaaaccgccaactgccaagggggccgcggtgggcgaggggctgggcgccggcgtggagcgcagccactggcggttcctgggtctctctccttggtagctggggctggacaccaggaggcgcgcgggcttgcgggcaggggctgcagggctgaggagctgacccgcgcctaccagggctgggcggaggcggggccgggcttcaggacagaggccaatcgctgccctccgggcccccagcgccggctttgggcagaggcagccagggcgccggaagaggtgcgggggctgcagcggggtgcaggggatcgtatgcagtggaggaggcctgggcgcggctgggggccggggggcgctgaggctgcccgaacgcctaggaggtctcgagggtgggtggcgtacagcggggcgcgggcggaacccagaggcagaggctgggggctgggggaggggcgccggccttggagtgcagaggtggggcgagaggcgctgggagctggaggtcagagagaggttgcccaaaagcaaaggcggggaggggtgcggggcgcagggataggctagcggcgcttgcgggtgggtgggccgagccgaggcgccgagtgctgaggagtacaggtggtccaggcgcagtgggcacggggagacggaggctgcctcagtatggaggacagacgggggcggggacgtagagctgagaggcttggggagggaggcgcaggcccaaggcagaggctgcgggagcgcgcggggagggagaggtgcagggcgtggaggggattcgggggcgcttggagaggatgggcagaaggccgggacggggaggaggggcggcgagaggcgcaggagtgggctggggtggggcggcactggagtgacgggggagggggcgcctggcctggggacacgggcagaggcagctcaagctcggaggaggtgcagatactggggtccgggagcgcaggggtgggccagggagtggagaggggtgaccgggtcggggggcagctgggttgggggaagaggatgtaccagtactccaagcaagtgcgctgggcgacggggcagctgctgacaccgctgaggtcgggcggtgttccgcgtgcggtgtcgttgctgggcgcatgggtattaagaatcagcggggtcgcaggtgactgtggggaggacagggggtcaaggggcccctggccagagggcacgaggctgacctagagcgccgaggaggaattgcggggcgtgggggtctcaggggcgtcgggggaggccggggccccatggggcgcaggtgacatggagtgagtaggaggccgggggtgacaccggcgaggcctgcagccgagggtgtcgaggcagccacgctgtcgcccccaggcctggaaatccacgcggcttcccaaagacggcgcctctgttctgcgggttcgtgacgaggatttatttccacccactgcgcctgggcgcaggtctgcgggtccgcgcccactgcgtgcggcgccacggaccatgtcgggtgagtagctcaagctccttcagttcagcctgcctgttcctactggcatgggtgagagattggtctgcactggggagaaccccactttgaccgcaggattgccccaaaccccaagtctccccctcactccctcgcccaggtctctctggggctggagggaatggagataccagcctcagctgctgggagggggtgatttacagcaagtgaaggggaccttgggttctcaccagtttccttttgtaaaatatagtcctgaaactcaatgggcttgtttcttcggaatagcattggctattcccaatagcagtgtctgagcctgtcactgcctggaaggcccatgggaagaagtctgttctgaaacggccctaactaaagctctgggaagacgctgccttgagttcttaaagttcagatcgtgggtttaatttctgtttccagtacagataaagggatggccgggcttggtggctcaggcctgtaatcccagccctttgggaagctgagacgggaggactgcttgaggccaggactttgagaccatcctgggcaacatagggagaccatatctgtaggaaaataatttaaaaatcagctgggcattgcggcacgtgcctgtagtcccagctactagggaagctgaggtaggagggtcctgagcccaggagttcaaggtggcagtgagctatgattgcaccactgcactccagcctgagtgacagagtgagaccttgtctctaaaaaaattgaaattaaaaaaaataacaattcaggttaatcctcctgcaggcagagggctggctggcaggaatggcaggaatggcagaaaaggcctgccccgcaaggaccggtgagccccatctccctgtccttgggttttgtggacttcagatataccggttgacttaagaggcctagatatgtgaacatagattgtaacctcatcccacaagaaagatgctggctctattttttatcattaaatcattaagacacctcctttttgtactagaccacactggatcattcatgagtgcattttatgtatttatttttaaatgtgcatatatacatatatacacatacacacacatatatacacacatataaatatatataaacacatatatacacacatataaatatacatatacatatatacacatatataaatatataatacatacatatatgtacacacacatatatatatacacacgtgtgtgtgtgtgtgtgtatatatatgtatgtgtatatatatatatattttttttccctagagagtctcactttgttgcccaggctccagttcagtgttgcattctcagctcaccgcagcctctgccttccgggttcaagtgagtcttctgcctcagcttcccgagtagctgggactacagatgcgcgtgcctgtagtagctaatttttgtattttcagtagagacagggttttaccatattggctgggctggtctcgaactcctgaccttgtgatctgcctgcatcggcctcccaaagtgctgggattacaggcgtgagccactgtgcctggcccttaattgtatattttttaaattttgtagagacagagtcttgctatgttgcccaggctggtcttgaacttctaggctcaagcagtcttcctcctttggcgtctcaaagttctgggattataggggcaagctagcacgcctggccatgaatgcaatttaaaacacacaaacagaacagatgacttcttaattcagaggagagatttggtaaatcacagagctgcttctctcttgttttctctcactctggacttagagaggaaaattttcggggcagggatcttaagggctgttttcatgaggtgtactggaagactctattcccaggaatagcagaaaagattctctgttctagggacgcgtttggagctctctaaagtgaaagctacaggtttccccaagcctgcttgtgtctgtataataacagcattcaagacagacatttgcatacatcttggtcagcctcatgccagaagagaagactcaactctttgcagaaaacagaaactgcctttgagtagagaagggctgagaaggaagatgctaaggatattctgaggggtgatcagaagattccttgagtgcaggggggcaggcaaggggtagaaagaaactgttgtcacagagtcataaaattctaagccactgcaatctccaggctggacttgattttgtgacagtgtctcctttttgtgggctgtagtgtagtgacaagttcttttgctgtttttccactccgtgcctttgctgaaagtctgccgcactggcacatgaagtggaaactccctctttgaatgcagcagcattggataattgtggatgttctgtggcgccgcaccacgacttgatcaccagttgtttcttcagggcaaggtgatgtggaagctaagcacctatcaatcaatgtttcatgatctgttctatttcaatcygctggtctgtctttgcactttagatgggttttacagtgtcctggatgggaagtggctaaccttcaggaggtgcacatttttgttccaaagcagaagtctgagtctcggataccttgttgctggagagctcttgtgccaactggtgttgtcttgtcattgtgtgactgtggtcagtattcccccaactctaaaccaaagagagaaacagggtgtccagtagttccataaaactctcactctaaatgcagccctgtctgcattctcttttgggtttgagatcaaggtaagtgtgggcagggctggttcctcctgaggcctctctcctgggcttggtcctcacagggtcatccctctgtgtgtgtctgtgtcctaagctcctctttttttttttttttgagatggagttttgctcttgtcacccaggcaatggtgcaatctgcctcctgggttcaagcaattctcctcctcagcctcctgagcagctgggattacaggcatgcaccaccatgcccagctaatttttgtatttttagtagagacagggtttctccatgttggttaggctggtctcaaactcctgacgtcaagtggtccacctgcctcggccttccaaagtgttgggattacaggtgttagccatcatgctcagcgtaatctcctcttcttataaggacaccaatcctattggatcagaccatcctagtgacctaattttaccttgatatcttctttaaagaccccatctccaaatacactcacattttgaggtcctggaggttatgacattcatatatgaattttggaggtgtgcaattcagcccataataggataactcatgtatttgaatactactgtttttttctgctggggctgccataacaaagtcccacagactgggaagcttgaacaacagacatttactctcacacagccctggaggctggaagtctgagatcagggtgtgggcagggctgtttcctcctgacgcctctctccttggcttgtagatgtggtcttgtggtctttctctgtatctccacaaggtcatccctctgtgtgtgtctgtgtcctcatctcctcttgtagtgaggccagcagtgctactgtattagggcccaccctagtgacctcattttaccataatcacctctttaaagaccccatcttcaaatgcagacacattcagaggttctgtggggtagggtttcatcctaggcgtttcaggatgggttatcatccgtctataacacccattaatcctcatgttttccctgaggtccccatgaagagctataaagccagagcatgtggttatcaatcaatgatcactctgccatttctcttagttgtcactgagatcctcatgaagagattaaaaaaaccagcgcacctcgctatcaatcattgatcactttgccagttcgcatagttgtcactcacgtcctgatgaagagataaaaaggccatgcacatggttatcaatcattgatcactctgtcatttctttcagttgtcactgagatcctcatgaaggggtaaaaaaccagtgtctgtggttatcagtcactgatcactttgccatttctcttagtcgtcagtgatgccctcatgaagaactataaaactagcacaggtggcgatcaatcactgatcactttgccatttctctgtgttgtcctctgcaccttgctttgggccaattcacttgcatcctccttttctttagacagccagagggccctccctggcaatggagatgagaccttcttacaggtcttagaaccctgaaatagctcctcataagcctcaggataatagaaaaggctgcatatcaccttcgtaatcctggccctctgaccccatctcttcctgtgggtccttattctccagctgctgttgctacactgtgaggaatgcaggatgcagcatgcaacctatcatctccacctctgatcttggttcatggactttttctgcctcttccttctttgccttattatttttagtttagtttcttattggaggcaggagagagtagctattttgagggcttttgttggtgttggagtcagaggtgacctcagacatttagttactcattgaagccccagtttacttgtttttgaagcacatgtctgtgttggaaagggaattaatgatagtgcataggtatgccccatctagacactcctggatggatgggagccatattcattcttgtttattgatccactgatttcttgatggataagttcttcctggccatttatccctgagcttggatggtgccctttcaaaaactgctgcctgccataggacttgccttgcagtattgaaacacccatttcttagggctgatgtttctcatggagttgtgggtgtctgaggacagagcttgtaccttgttagctgctgggcccagcacgtagcagattctcgtgcctgggaattgcctgggacgtgaacccacagtgaacgtgtaatgcactgacagcatgtcattaggcccacacagacatcttctgccccttcaccttctttgtcttctgcttccagcttcaaaccttcactctttctctaagcaggtgccattgtgtgggcagcttatgggacagcactgttgactggggtaagcagtgccccccataaaactcacatctccccagaagctgtgaatgggacctgtgaacccaaaagtatctgagacaggtctcaatcaatttagaaagtttattttgccaaggttaaggacatgcctgtgacacagcctcaggaggtcctgacaacatgggccaaaggtggttggggtacagcttgcttttacacatttcagggagacatgagacatcaatgaatacatgtaagatacacaatgctttgatctgaaagggtgagactacttgaagcaagggggttgcggggggtggtgccaggtcataggtagatttttaaatgttctgattagtcgaaagagttattttcaatagaagagaatgtctgggttatgataagagtttgtagagaccaaggttttatcacgcagatgaagcttccaggtagcaggcttcagagagaatagattgtaaaggtttctcatcagacttgaggtctgtgtggatgtttatggtggtcagcttttcctgaattccaaaatggaggagggtatgatgaggcatgtctgaccctctcctcattatggcctgaactcgtttttcaggttaactttggaatgcccttggccaattaggtagttgcgaggcctagaattttagtttagatttacagaccttattgggaaatagggtctttgcagatgtaattagttaagcatctcaagataagattatcctggaatatttgggtgggccctaaatccaatggcaggtgttgtcccaagagatagaagaagagacacagacacagaggaggccatgtggagttggaggcagagattggagtaatgtggccacaagcccagggacatctggagccaccaggagctggaagaggcaggaaggacccttctctagagtttggttttggaatcctggccttcagaactgcaagagagtaaatgtgtgttgtttaagtctcccagcgtgtggtactttctcacagcagccccaggaagctcattcatgggtttgctagggaaaggagtcagcaatgagcccaccagtaagcaaaatgagcatagcaggtaagatggcacaagagatgaagggtcctgtgtcataggaggtgagggactgtgatgagaagggtcgtcttggggagcagggtttgcaggaagatctctgagggatgggtggttttttccatggccaccatgtgctgggaggagagtgagttccaggtgagttaagggagtggtagtagccccatggtagtagcacacatcataggatgtgcttgaggacccagaggggtggagctggacgtggggacttagtgtgggggatgagatgaccagcatcctgaacccagcttacatttgcagacaatgagaaaacccttggtgttgggttggctttcagggcagctgatggctttcactctgtgttgggggagaaaatgtggtttttaaggactgaggaaacagataacaggaaccagaatctacagggtggagcagagaatgcaaaggagagaagtgtggctcagggtgattgatcagagacccattttaaatgttttctagtctggtgcggtggctggctcacacctgtaatcctagcactttgggaggccaggacgggaggactgcttgaggctaggagtttgagaccagtctgggtgacagagcaagagaccccatctctacagaaaaattaaaaataaattaaccaggtgtggtggtgagcatctgtagtcccagctactcaggagaccgaggcaggaggattgcttgagcccaggagttccaggcttcagtgagctgtgatgctgctgctgcactcaaatctgggtgatagacagagaaagaccctgtcaaaaaagaataaaaaggccaggcacagaggcacacctgtagtcccagcattttgggagcatgaggcaggcagattgcctgagcccaggagttcaagaccagcctgggcaacataatctgtctctacaaaaaatataaaatagctggacgtagtgatgtgcactcgtggtcccagctactcaggaggctgaggtaggaggattgcttgcttccaggaagttgaggctgcagtgagctgaagtcataccactgcactccagcctaggcaacagagggagaccttctctcaaaaaccaccaccacaacaacataatgaacaaccccaacattttctgttgtgcctctcggttaagatctcagttagttatgcaagagtagaatgtgggattggaggcaagtggacttctccttacctcagaattcatgtcataaatgctctgcacagacgaggcttctagggctctcagggagacctaggaggtgggtaacagggatctgaatctacccggtggagcccatgtcccaggtcagatggtgccaaatttcattttatacattctctgttcttcttctctgctacttaagagcgcaggtcagtaagtggggttggaaacagtagactcttccttactagggtataggagttggcacgctaaatattctgcaaagcttgctcttgcaggaccaagcatctaaatagcaaggtctaacctcagtcatctgtttctggaggaaaatcccaaagcatggcctttggagtgtgatttagccctcattctcagattcagtggtgaagttcagaggggagccaatccctctgagcatctcgaaggtggacagaacagtcagctcaggaggaaatctcaaaacaacgcccctcctcgggagttctattacctttgtcattgtagttcctaaaggatgcactccttttcctttctattctttaattcacagggtccttaaacatggttcctcagatttcaataatctatacattggagatcacaaagaaatcttaatattgccaatggaaggctaaaaatggtaaatggcactttgttttcagtttgacattactttgctgatgattcttctcataacatatattatttgatttatcttattttttactttgccatctactttgcaattacacagacacacacacacacacacacacacgctttctctttaaagacagggctctgctctgtcacccaagctggagtgcagtggcacaattatatctcactgcagcctccaatttctgggctcaaacaatcctgctgtctcagcttttcaagttagctaggacttcaggcatgtgcaaaaaaatgtatttttaaattaaaagaatacaagtctattcttactgtgaaacacatactcaaatacctgcctgagaaatggtatgtggcgtataaatgtgcagcagatgtgctaattggcctgggcctagaaatttagctacttggtctgggtatacaattttaggttgaggaccattgcactcaaagagtttagatatggtgctttgttttagtgtccactattcatgataagaagtctcagtctcatccttaataggattgacctgtatttttattttactttcattttcttggcattatcacgatgttctccttatccttggtgtttttaaactccagaaacatattgtcaggataaggactgttgagtttctttctttctttccctgtctctctgtccccatctcccctcccctcctctctcctcccctcccctccctccctccctcccttccttccttccttcctctctctttctttctttcttttttctttttcttttgctgcatactctctgggcttttaaaatctgaagactgactttctgctgctgttgagaacatttcctgtttaatttctttgaaaacttttcttctatttttttttctgttctcttactctgaaacttatgttggtgaaccttctgaatcactcctgtaggcttctagctttctgaaattttccatttgtcccttaattgtactttctgcgagatttcctcattgacattttccaaaccttctgttattccattttcatttcagcaaatcatatttttaacttctaataactatttcttatccttggagtgatcttttctatagcatttgattcttggtttatagatgtatccctctccctgtaatcttttgaaagaatactaattaatgcagtcagaatttttatgtctgtctgtctgttccttgaatttctattccatgaattctctggtatttatggggttcttcccattctaccccataactttttagttttctcttttgtgttgaaggtgtttttcaaatgcctgtaatggtttatatctacatgtataaaaatgaggaatgtcagttgagctgtgcctacttgcaagggttgccgacttgtctgaatttgtcaaggttatgttataggttaggaattccacttctgtgtggtggtaattattttttcttgggcttttggtttcctgtagagtaggtcctattatctgattttgcctctcgtgatgggtatatttggccttcgagaattctgcagaatttcagtgacttctccagtttctcttattggctgacagttttctcctgcctccttgttggcttggggttcacacttgccttccttagcacactttttagtttgttctccttttatctcagaaggaaggaaagagaaactaggagctccgcatccaccatctttgcttggaagattcctggtttacacttttaattacacggttgaattgatgaaaatgcatggaccttgaaaacatcatgctgatggaaagaagccggacacaaaaggccatatgatgcttgattccatttacatgaaatatgcagaacaggcagatccacagagataaaaagtgattggtggttgtcacaagctagggaagggagaaagggaagatactccttaatgagtgcagggtctctttttggggtgatgaaatgtcccaggattagatagaggtggtgggtgtacaacattgtgatgaattgtgctctttacaatggtgaattttatgtcatctgaagtttactgtgataaataaaaaggaaatacaaaattattccattttcaaaaactacatagtgtttgattccatttataggaaatatccaaaataggaatgtagagacagaaagcagactcatggttgccagaatggggagtgactgcgtaatgggtacagggcctccttttggagtgatgagaatatcctcggattgcctggagttagttgttgcacaacattgcgcatggactaaatgcgagtcacttgtgcactttaaaatggtttgttttacgttatgttaatttcccgttaattttttgagagtttgcatggaaaggtgaagctcttagcaggtcgtatgtttaggtgtggggatacccattatgctgcttagaaatatgttcacacttagggttcaacactgggggttctacttggtaattctttctgtttccacaatctttcaagatacgggtcagagaaaccttggtgaggacggggtaggggattggatctctggctctgttttgggcattgtgtgattttcgaggtctgtgggtgaagctcacacagtaccttggccagctttgggctttgcggatgccagtcctgaatgtctgcttcctctcccatctctctcctctgcttagagacaaaagagccttacagatggctgaacgggtccatgacagctatgcctttcttgggaaatacttttggtcagagcttaggccttgggaaatgtctaaaggagtaataatcaccattattatcattttaaagctagtaattaagaaaactatagatagattatagataatggtgctagagacaatttataatctatagactgtaggtaggtagatgtttgaaagattgatagatataaagaagtagatacagagaggacacatatatgataggtagatgacagatggagatagataaatggataatagaaaattataggtggagagatgatggagatagatggatgatagatcatagatacatagatgataaatttacatagatgatatatgataaatagatgatagagatagatggattagatagatatacagatacatgatagtaagatagataataaataatagatgtgaatagaattggtagatgataggtggatagatggaaggatggatagatgataggtagatggatagatagatgatggatggatagatatatgattgattgatagatgataaagacagatttatagtaagatagataataaatagatgtacagagaattggtagatgatggatggatggatgcatgaataaatggatagatagatgatggatggataaatgatagataatggaaggatggataaatgagagatagatggatagctggatggatggatagagatagataatagtaagatagaaagtaatagatgtgcagagaattggtagatgataggtagatggatggatgaatggatggatagataataggtagatggataatacagatattatccaatgatagatgatagacggatagatagatgatagatgaacggatgggtggatggatggatgatggatagatggatagatatggactgatgacagatatcttttattctacagaattaagttgtaaagtttgctgtctatgatactcactcccagtggagatgtcaggaattcttgttcttccttcctgcaagggtagggagaggaatctacaggagcagctgtaacaggcgcattttggaatttaccccattgcaatgtaaaggtcaaggaggcagccctgggccacacgtctgggacacttgtgtttgttatatttagtgcgaattgtggtttggcttctcttggagtgctgcttctggggaaggtgccatggttgcctgcatgctgagcattttaatttccatagacagtacactgggctgcacactgtgtgggacttgttggtgttgctggctgccctcctgactgttgtctttctcctggcaacaggggcttgggtgcccaagaattgagtggtttaaaagtcattaccaaagttcacatcagtcttatgcacagagacttaaaagccattaattatatctaatgtgagagttccttcctctcctattgaggcattaggaaactgagcacattctacctaatgaaacaatacacttctccttatgttgactgtaccacctcatacaaccctgagttgaagttgaagtctttgtaagaaatggtctgtccagaatttaaataacatgtttggctgcttctttgtggagcatgattcttttcttttctttcttttttctttttctgaagacagggactcactctgttgaccaggctggagttcagtggtgtgatcatggctctttgcagccttgacctcctgtgctcaagcaatcctcctccctcagcctcccaagtagctaggactataggtgtgcaccaccttgcctggctaatttttttttttccagtagagatgaggtcttgctgtgcttcccaggctggtttcaaactcctgggctcaattagtcccccttcttcagccctagcactgggattacaggcatgagccactgcatctagcccagaacacagttctttgagttggattacatctttgctgtaactcaggtcatcaagtcatcacttccactttttgccttttgtttccacctaagatctaaacactttgggtgagttttcaagagtcaaacacaacataaaataagggatagtagctatgagtttccatggcattgcagcatcaggaaacgggcatagccattgggttgactttgtctcatgtttaaggttccttcattctcctcctgtgttttgttttgtttagaatgaaaggaagaatgtttgtgaattagaatactgaatattcactgcaagtcgtgatttttttttttcttttttgagacagggtctcactctgtcacccaggctggagtagagtggtacaatcacagctcactgcagcctcaaactcccaggctcaagtatcctcctacctcagcctcccaagtagctgtaactacaggtatgccaccatgcccagctaatttttgtatttttcatagagacagagtttcaccatgtggcccaggctagtctcgaacttcttaggtcaagcaattcacccacctcagcctcccaaagtgctgggatgacaggtgtgagccaccacatctggcccaagccatgaatcttgggagaggagaggaggtgactatggccttgtcacccctgctgtccctcaggagtgtaactctggtgtttctgttgattttcacagtgactgatcaggcttttgtcacactggccacagatgacatctactgccagggcgccctggtcctggggcagtcactgaggagacacaggctgacgaggaagctggtggtgttgatcactcctcaggtgtccagcctgctcaggtaaggctcagagatgtggcttgtgcccagatgggtcctatagaaggagggtcacctctcccccaagaggtcctaggagttattctgatgactgaccaccgttcttcaccggcctggatggctggcaatcatgatgggcatcttacatttgtaatgaaccttcgaatcatgtgaaaatataggcgtgtgatcggcttcacaatactttaaaaaacaatactgggtatggttacagttcattctcccaaccacggaaactgaaaattcaattctttttttttgttttttgagacagggtctcactcgtcgcccaggcttgagtgcagtgataccatctcggctcactgcaacctctccctcactggcccaagtgatcttccctcctcagccttctaagcagctgggaccacaagtatgtgcccgcatgcttggctatttttatttttattttttgtatttttggtagagacagggtttcgtcacattgcctaggctgatcttgaactcctggactcactcagtccacccaggttggcctcccaaagtgctgggattacaggcatgagccacggcgccctgccaaggagtctttttaaaaataatttccttttacaattccctttgtctttaattctcaaataaagcaaatacataaataaatgcatctaatgaataaagcataaggcttctcttaaatgtcatacattatgtaagcaataatctttttctttcatcaaccatggaccacttagaaaaagtgattttatatgaatgggacgaggaggcatttaatatgtagatgtagcaggaattgaatgtcatattctttgacaacgaaataataaatccagacattaatagctaaactaaaaagagaacaaataaaaaaccaaccagtgtgtcctcagacattttaaactagaagtgctctcctaaataacttgatctgggtataaatgaaagcttgaattacgtactatttcagaaaatgattccaatgtgagtgctacctatacaaagcaaagacagcaactaaagtggtacaagaaagaaaatttaaatcagtgaagaaatcatccagttcaaatatatacatatttttatatatacatatatatgtttatgtatacgttcatgtatgttcatatatgtttaaatatatatataaatatatacgttcaaatatatatatatattttttgagacaaagtctcactctgtcatcaaggctggagtgcaggggtgggatcttggcttagtgcaacctccacctcccaggttccagtgattctcctgcctcagcgtcctgcgtagctgggattacaggcacccaacgtcatgcctggctaatttttgtatttttagtagagacagggtttcaccatattggacaggctgatctccaactcctgacctcaagtgatctgcccgccttggcctcccaaagtgctgggattacaggtgtgagtcaccatgcccagctccaaatatttttaaaataaaaaaaagtaaagcaaacagcagtaaaaaaattcataaagataaaacaacacaactaataattgggaacaagaaacaaattcaggcatttgattaacgcatcttcaggggggccaaggtgggaggattgcttgaggccaggagtttgacaagacagtttgggtgatatagcaagaccctatctctacaaaaaataaaaagagccagatgtggtggtgcgcacctgtagtcccagctactcaggaggctgaggtgggaggattgcttgagcccagaggttcgaggctgtagtgagccatgatcgtaccactgcgctctagactgggcaacagagtgagctcctctctctaaaaataaaaataacaaataaaaatgaatctttcatttgagaaaacataaatgtacaaaatagaaattggaaagaagtcatttggaggcagttttaaaagcgaatactatatagaaccccttatagtaataacactggaagtattgaagaagcgcttgatccttctagggaaatcagtgagatgttggttgttgtcatcagaagaaatagaaaccttctatttgacaataactatgagaaaaactgaaaatgttaccaaaggcttatcttgtagaaaggccctggtttgggcaattttaagggaagttctggtaaattgcttatgatgaattaatttccctgctgcataaagtgtcacagagcctagcaaaagatgaatgtgttcacttattttaagaaactgttataatcttgaaacccaaacttgatttacacatttgattgtgtttatatttggattgagaaagccctcaaatacaggatgttaataaggcaactctagccctgtagtaaagaaataaatagagcttaccctaagaaagcaaagatatttttgtatttgtctatctttgcttctggtgtgctagagacgagcccctgcaaacccctcaagtgttttaagagttctttgtatgtgagggacaataagaacctctccattataatattgtcaatgtggccctccgtttgttttatcttttactttcacacatactatctctgacacacagcagttctggtgtcctcttccaacttgtttaatttacaacagcatttccagcttctagataaacgaaacatccacctgcatcaatatgtggagatatttttagttgtcacaactgccacctcctgctagcatctggtgggtggagctcagggatgctgcccaacaccctgcagtacacaggacacccgaccacatggaaccccccagtcccagacagcagcagtgctgagaaactttcatctactttcttctaagatttctctatgttttaaatgtttacctctatatttataatatatgtgtttttgtttttttttgtttttaagacacagtcttgctctgtcacccaggctggagcacagtggtgccatcttggctcactgcaatcttaacctcctgggttcgagcaattctcctgcctcactctctcaagtagctgggattacaggtgatcaccaccacaccctgctaatttttttttttttgtatttttagtggagacggggtttcaccatgttggccaggctagtctcaaactcctgacctcaagtgatccacccaactcggcctcccaaaatgttgggattacaggcataatccaccatgcctggcttggaattcttttacccatcatctctttacttatactttctatctatctatctatctatctatctatctatctatctatctatctatctatcttctatttatcatctatctgtctccacctatgtatctatctatctgtatatctatcaccttgaatctattaattcaagatagattaaagacttaaatgttagacctaaaaccataacaactcgagaagaaaacctaggaagtaccattcaggacataggcatgggcaaggacttcatgtctaaaacaccaaaagcaatggcaacaaaagccaaaactgacaaatgggatctaattaaactaaagagcttctgtacagcaaaggaaactaccgtcagagtgaacaggcaacctacagaatgggagaaaatttttacaatctacccatctgacaaagggcaaatatccagaatctacaaagaacttaaacaaatttacaagaaaaaatcaaagaatcccatgaaaaagttggcgaaggatgtgaacagacacttctcaaaagaagacatttatgcatccaacagacagatgaaaaaatgctcgtcatcactggccattagagaaatgcaaatcaaaaccacaatgagataccatctcacaccagttagaatggcaatcattaaaaagtcaggaaacaacaggtgctgtagaggatgtggagaaataggaacacttttacactgttggtgggactataaactagttcaaccattgtggaagaaaatgtggcgattcctgaaggatctagaactagaaatgccatttgacccagccatcccattactgggtgtgtacccaaaggattataaatcatgctgctatgaagacacatgcacacgtatgtttattgttgcactattcacaatagcaaagacttggaaccaacccaaatgtccatcaatgatagactagattaagaaaatgtggcacatatacaccatggagtactatgcagccataaaaaaggatgaattcttgtcttttgtagggacatggatgaagctggaaaccatgactctgagcaaactattgcagggatagaaaaccaaacactgcatgttctcactcataggtgggaattgaacaatgagaacacttggacacagggtggagaacatcacacactggagccagtcgtggggcggggagaggggggagggatagctttaggagatatacctaatgtaaatgatgagtaaacgggtgcagcacaccaacatggtacatgtatatatatgtatcaaacctgcacattgtgcacatgtaccctagaacttaaagtataataaaaaaaatttataaataaaaatgtttaggcaattaaaaaatgtttcattgatctggaaatgttatgagattattcattttaccaaaaagacacctggactagtgtgttcactgcagtactattcacaatagcaaagacaaggaattaacccaggcgcccatcagcattggactggataaagaaaatgtggtgtatctataccaaggaatacttcacagctataaaaaggaatgaagtaatgcaacatggatgcagctggaggccactatgttaagtgaattaataaagaaagagaaaaccaaatacagcatgttctcataagttggagctaaccagtgggtacacatggacatgaagatggggatgtcagacactgggcactcctagaagggggagggaaggaagacagctagggttgaaaaaccacctgttgggtgttgaaaggaaaataaattcgggggcccccaaatcactaaaggaaaagtccatctgggaactgcttagggcttctgcctcccattctattcaaagtcccccctctgctcactaagatagatgaatatctgattgcctcatttggaaaggctcatcaggaactcaaaagaatgcagccatttttctcttatgtatctgtgacccggaagcccccctccccacttcgagtctccccgcctttgctttttttctttttttgtcctgcctttccagactgaaccagtgttcaacttgtatatgttgattgacgtctcatgtctctctagaatatataaaaccaaactgtgctctggccaccttgggcacatgtcgccaggacctcccgaggccgtgtcgcgggtgtgtgtcctcaaccttggcaaaagaaactttctaaactaactgagacttgtctcagattttcagggttcacaggtacagtgctgagtacgtgggtggggggttcatgcataccccatacctcactaccatagaatataccccagtgacaaaccggcacgtgtaccccttagacctaacataaaagttgaaattatttaaaaataaataaataaatattatgagattattatcttgtggcaagtggaaatgatgtgggaaggaaaggatttctagatctgttgaattggcagggtggattgatgcctatagatccataggaataagttatagtatttttgttcctcaaagccacttggtcaaatcttgccgaaacctttggctgatacttggaagtgtgaaacagatcctagtgttaaagcgtttttgggtggaactgtagtttgagtaagaaaggggtttctttccaaccaccattgaattaggaaaagcagagcactttttctttctggtttcatagacctctgctctttagtgtacagtactgttttaaaaattacttatttatgtatctttggccgattacagtggctcgtgcctgtacctggtactttgggaggccaaggcggacagatcacttgaggtcaggagttcaggaccagcctggccaacctggtgaaaccctgtctctaccaaaaatacaaaaactaatgaggcacggtggtgcatgcctgtcatcccagctactcaagaggctgaggtatgagaatcacttgaacccaggaggtggaggttgcagtgagctgagatcataccactgcactccagcctaggcaacagagtgagactccatctaaaaaataatagtaataatagaaaaataaaataattgaaataaataatgtgtttattttaaaataaataattttattttttattttatttctatttttttgacatggagtctcacgctgtcttccaggctggagtgcagtggcccagtcactgcttcctgcagcctccaactccagggcttcagtgatcctcccacctcagcctctcaattagctgagattacaggcatgtgccaccacacccagctaattttttaaactttttagaggtatgttctcataggagtctccctatgtggaccagactggtctccaactcctgtcctcaagcagtcctcctgctttggcttcccaaagtactgaggattacaggcatgaaccactgtgcctggctcccatttttttaatagatcaaatgagttgcataggtttacaaacttgatgtcttctatccctgctctatccatcatcctaagaaacaaaatgaagtttttattggcacagacaatatctgttggaagcacattcgtgcaaatccagctatacctagtatgtgacatatactgtgcaagaatatactttacatgagattttagcatgccttgaggatgcttgtctggattccattgcatagttgctaaatgctgatgctctgtgagtctgtcattattgcagcatttatggcctaacactcagctgcacaaaagagcttttctgtttctcttccctccctagcacactccttctcctgaatatcactactgttttgattgttcaatatgtaaaaagcagtccaatttattatttttttaatgtttaaactgttcctttttttttttccttaaataacacagggtcttactctgttgcccaggctggagtgcagtggcatgatcatatagctcactgtagcctcaacctcctcggttcaagtgatcctgccatctcagcctcccaggtggctgggactacaggcaagatccaccatgtttggctcaaattgtaccagatttaccagtggaattctctttagatggattcttaagactatgaactgatcccattagtatttttaaatttttatttatatttatttttgtttcagacagagtctcgctctgtcacccaggctggagtgcagtggtgcgatcttggctcgctacaacctccacctcccaggttcaagagattctcctgcctcagcctcccaagtagctgggattataggcacatgccaccatgcctggctaatttttgtatttttagtagagatggagtttcaccacattggccaggctggtcttgaactcctggcctcaagtgatctgcctgccctggcctcccagagtgctgggattccaggcgtgagccacagcacctggcccccattagtctttgatcacttccttgcttcctggcaaaatgagattctccagaaccatcatagattttctcccctcacagctggggccagacatttctccaaggtcttatttttaagaacaagccaatttttatgttctaaattgacttcacacctcctcagggaaacgcagccagtagtttaaaaacatctttgtaacaaatgaatgctaagccccacatcttctctccttatctataaaatagggattacaataccacctgctcatgggaattttctgaggataaaacgagacaataaacataaagctcttagcacagtctgtgggaacaattaagcatgaaagcataagctgctgctctcattgtcaacatctgattgaaatcttgtttttgagacagggtcttaccgtgttgcttaggctggagtgcagcggcaccgtcagggctcacagcagtcttgacctcccaggctcaagtcatcctcttgcctcagccccgctagtacctgggatgacagacttgcacgaccatgcacaggtaatttttttttttttttttttttcagtagagacagatttcgccatgttgcccaggctggtctcgaactcctggactcaagcgatctgcccacatctacctcccaatgtgctgggattacaggtgtgagccaccgttcctggccttattgagatctgtagagacactgccaataacttgggttttaaaaattacattgcttgagcctgggaggtggaggctgcagtgagccaagatcacgccactgcattccagcttgggtgacacagtgagactatgtctcaaaaaaaaaaagaaaaaaattaacaaattaacattgagataaaaaatgtttatgactgtgtatgataatgtttacaaatttagccagcctacgcaacatagcaagaccctgtctctacaacaacaacaaaaataattagctgggtgtggtggtatgtgcctgtagtcccagctaatcgggtggctgaggtgggaggatcacttgtgcctaggagtttgagaacaccctaggcaacatagcaagaccccagctctataaaaatacataaatatagccaggcatggtggtgcatgcctgtagtcccagctacctgggaggctgaggtgggaggatcgcttgagcccgggaagttaaggctgcagcaagccatgatcgcaccacgtactgtccagcctgagcaacagagcaagaccctgtctcaaaaagtaaaagacttagaaatattagtaaacatggtggacacctcttcattaattctgcttgaacacatggtgaaggaaaagaagtgacttgaatagagctaagggcttttattcagcagatcctcacccgacagcccctgtgcacagataattgattcactgtggcacagcaggatctgagttttgtaagatgaggagaagagaggggtacaagtttttgaggactcacccaaatttcacttttctggccaggcgcagtggttttcgctggtaatcccagcactttgaaaggctgaggcgggtggatcacttcaggtcaggagttggagaccaacctgaccaacaggcgaaaccccatctctactaaaaatatgaaacctagccaggcgtgttgttgcactcctgtaatcccagctacttagcaggctgaggtgggagaatcgcttgaaccttggaggcagaggttgcagtgagccaagatctggccattgcactccagcctgtgcaacagagcaagactctgttttaaaaaaacaaaacaaaacaaaagcaaaaaacaaattacacttttcttcgtcttcagctgttgcaaaacctggcatcgtatcaattggagacttgttgctgtggtttaaatgcctttttcttggtattattggtgcagtcccttttcagcaactctcaggactgtttattttgcaaggctttgcaatatgtcaaggttcagaggaaagtgggggtaacaaaaaaggaggagagaacaaaacagaagagaaacatataggaaaaggaggcaagagttgaagcaacataaactgggatgacacagtttgcaaaacacaaaacattaaatttaccatcttaaccattttcaagagtacatttcaggccagctgtggtggctcatgcctgtaatctcagcactttgggaggccatggtgaatggatctcttgagctcaggatatggagatgagcctgtgcaacatgccgaaacctcgtctctacaaaaaaatacaaaaattaaaaaaagaaaaggtggggagcagagttaagagttcagtagagttaagtctaatcacattgctgtgcatgggtctccaaaactttttcatcttgcaaaactgaaactctgtgtctgatagcagtggggagatccgagttaccctgagttaccagtggcgaatctgtaggggtctgcagcgatttcaatacttgcctccttggaagaaagaatttgactgaggacgtaaggcagaaaaagagaccaaggcaagtttcagagcagtagtggaagtttattttaaaaagccttagaacagaaagaaaggaaggtactcctggaagagacgcaagtgcatgcctgaaggtcaaagagagcgagagcgagggagtttaaccttgatcctgggagtttacatgctggcctctttcttacccatgattcttcccttggggtgggctgcccacataagcagtgcccttcttacccttggaaagtgagcatgtgcagtgtgtttagggattgtacaaatgcccatctgaggctttcttccttttctggtggaggctcctggagggtcatacttcatacttcactgtttcatctcttttccctggcatttgcaatcaattaacactttaatgttaatagctgtgttactggaaaggagtccaggtccagaccccaagagagggtttttggagttcgtgcaggaaggaattctgagtgagttcatagagtaaagtgaaagcaagtttattaagaaagaaaaggaatacatgaatggctcttccgtagagcagcgccgagggctcctggtttcccatttttatggttatttcttgatgatatgctaaacaaggggtggattattcattctttccctttttagaccatatagggagacttcctgacattcccatggcatttgtaaactgtcacagcgctggtgggagtgtagcagtgaagaccaccagaggtcactcttgtcaccatcttggtttgggtgggatctggccggtttctgtactgcaacctgttttatcaccgagggctttgtgtggacctcctgtctcatcctgtgactatgaatgcctcacacacctcctgggaatgcagcccagcaggtctcagcctcatgttacccagcccctattcaagatggagtggctctgcttccagtgcctctgatagtgtcacaggccatgctcactcacatttggctcagaataaatctcttcaactattttagagttttactctttttatcagcagcatcttgtccgattccaatgaggaactcttgaaagctaaaaccaagaagtcttccccatgggagaagcacccccaaatcttgttctcaccaatcaggcgcattggtggatcttcctttcctccctgtcctccccttctcctcctgcaccatttgctgtttcccttctcccatgaatgctctccagggcctgctgcacttctcacagtgccctaactcctggctctgcaggaaaatgactttacaggaatttctccttgtaaggattttataacccaaaggatgtaccctgatgggacaaaacctaggggtgaaaaattaaaatagcagtgttaccggaaacgggtccctatctagatcctaagagagggttcttggatcttgtggcaagaaagaatttggggtgaatccatagattaaagtgaaagcaagtttaccaagaaagtagaggaataaaagcatggccactccatagacagagcagcagcatgggctgttggttgccttttttaatggttatttcttgattagatgctaaacaggggttggattattcttgagttttctgggaaaggggtgcgcaattcccagaactgagggttcctccccttttagaccatatagggtaatctcctgacattgccatgacatttgtaaactgtcatggccctggtgggagtgtctcttagtattctgtgctttataattagcatataatgagctgtgaggacggccagaggtcacatttgtcacctcttggttttggtgggttctggccaggttctttcatgcaagctgttttatcagtaaggtctttatgacctgtgtctcgagctgacctcctatctcatcctgtgacttagaatgccacacctcttgggaatgcagctcagcaggtctcagcctcattttacccaggctctattcaagatggagtcactctcatgcaaaagcctctgacagcaagattgaaatagcttcagtagagctcttccagctcatgagctattttgaacttctccttccttccttcattactgccttctaccccagttcaggtcatgtgacttggtgacttggcctctctacaagaacactgagacaccttgtcattttgtacactggtcagtgatcttgcattcaaatggatttcttctctcaggggagtccattggggatgaagtgaagggtcaaaggccatccagaattcataggatagagtcggcagagagcctggaaagcgggaatcttgttgatggctggcagaggccagtccaggcattctgccttttaggaggttgtgtagagcctcgtagaagacaatggcagctgtttgggcattctttggcagtgttgtggatttggctgttgctatggtctcaatgcttgccttgaacattgcgtgccttgaacattcatgtgttgaaacttaatccccaagacaatagttttaggagatggtgcttttaggaaacaattagaggtctagactcataaatgggataagtgttcttataaaagggaccccaggccaggcacagcagtggctcacacctgtaatcccagcactttcggaggctgatgcagctggatcacctgaggtcaggagtttgagaccagcctggctaacatatagtgaaaccacatctctacaaaaaataaaaaaacaggcatggtggtgcacacctgtaatcccagctacttgggaagctgaggcagaagaatcgcttgaatccaggaggcggaggttgtagtgagccggggttatgccactgcactccagcctgggtgacagagcaagactccatctcaaaaaagaaaaagaaaagaaatttaggaatttaggccaggtgtggtggctcatgcctgtaatcccagcacttttggagactgaggcaggttggtcacctgaggtcaggagctacagcccagcctggccaacatggtgaaacaccgtctctactaaaaatacaaaaatcagccaggcgtggtggctcatgcgtgtaatcccagctactcagggggctgaggcaggagaattgcttgaacccaggaggtggaggctgcagtgagcagagatcatgccactgtactccagcctgggcaacaagagtgaacaaaactccatctcaaagaaaaagaaattttttttttttgagatggagccttgctcgtcaccaggctggagtgcagtggtctgatatcggtcccttgcaaccccctcctcctgggttcaagtgattcttctgactcagcctcctgagtagcacaggcacgtgccaccacgctgagctatttttgtacttcttactagaaatggggtttcaccatcttggccaagaggatctcaatctcttgacctcgtgatctgcctgcctcagcctgtcaaagtgctgggattgcaggcatgagccaccccgcacccgtccggaatttggtaaactcaatcaagtttttttttaaatgggtcaggcttttggtgtcttatctaaaaagttttcctaacccacagcgaaaaagactttctcctctgttttcttctgcatgtgttatagagtttgcacttacatttgggtctctgatccactttgagttaattttggtgctgggttttccattcatggaacatgcagttggatttctaaaaggtcaatatatgaaaaatttcccgcaaagtttttcttttcttttcttttctttttgagactgtcacccaggctggagtacagtggtgcaatcacagctcactgcagccttgacctcccaggctctagagatcctcccacctcagcctcccaagtagctgaggccacaagtgtgcaccaccacacttgcctgattttatattttttgtagacagggtcccactgtgttggccaggctggtctcgaactcctgggcttgagtgatccttccaccttggtctcccaaagtgctgggatgataagcatgagccactgcactcagccagtttctagtttggatatttgagtggacttcccagcccgcacacagcatgctctttcgtgtaagattgtgagaacgtgcgaggagagaaaagagcatgcagccagtgttggagcttcagggacatcccgggcacgagcttcccagggtctcctttgttctgtctcatggttggcacaccaaggacggcgagaggaatcttggtttcatggggcctcaaaccagacattgaggaggtaggggaggcggttgccactccggtcattcagtgcatccaggctgtctaactggttaggccacttgcaaatgtgcaaaccttaagtaaagaaacggactcaggtcagcagggaggtttgaactttaactaatgcatcataaatcccagctcttatcttgaacaagagtcaaagaccagacttgcaggcatcccccaagataaaggtaggccctctgcaaggcagctgtaagtcagctctcctccactcctctggctggccccctccttatccgagtcctgcttccttcctctttaaatctgcagacaacgctgcttctctgcaggtttctccgaatattccctcagctcacagaccggctgcatacttggtattttcagggttaggtttgcaacacatgactggggaaatgcatgaaaaggaaagatgcaagaattcaccgcagacacctttaggtgagaaggagatgtgacaaaaagtctctgcctggccaaaccgtagccaggctcctgaagcccctcccaggcccggttgtgcgtttccttataaaattagatttcagcaaagtacctgctaagtcagtttggcaagaagccaccattcttgatatcaggttcctcatcgtccaccacccctggttgatgtttaacccccttggctggctttaacaagccaggttggtttagccaggacccgcttcacctctgatgtttccttttagtgctttgccatctatacacccactgcctgcccccgtggctatacattcccacttgcccttgctgtattcatattggaagttgagcccagcctctctcctgcactgtgaaccgccattgcagtggtccctgtacttcatacgataagcctggataatgtcttcattatctttttggtgacgctttcacaagtttgaggtttgtgcagaagtaataactgcaattaccaacctaatatcactgaatagtttttttctttaacaaaggttttgctgctggacgaacgaacgagggctgactgcttgttcttggggttcaataatgaggtgcagacagattggggagaagggaatttatttctccaacgggttacagggagaaggtcagattaactcacgaggtcaactcaaagtgacaagttttttccagggtttctatgcatttttaagctctatgcctacgtgtaggattgcacctacaagcgggagtatttcattcagtccctatataatctttaactagggtctggggtctacgaagctttctctagacccttggaaagtttcttaatcctctgtaagccctggtatgaggtgtatgtgtaagaatgcttttattatttgatccgactttagggtctgaggaaactcacgcagggccttcataggtttgttttggcattttggccctccttccccagcaccactttctccagttctttaatgtttaatttacgcattcatcagaattataataaagcattaggggaaaaactggttgctctgcctgctaatggaaacctggcctgccacagttagactcaaagggaacctaactctcaaggagccataatcccagcactttgggaggccgaagtggaggattgcttgtgccaagagttcgagaccagcctgggaaacatagggaaaccctatctctatacataaaaaaaaaattagttgggcatggtggcatgtgcctgttgcctcagctactctggaggttaagtctggaggatcgcttaagcctgggagttggaggctgcagtgagctgtgattgtaccacagcactccagcctgggcaacagagcgaaaccctgtctccaaaaacaaaacaaaacaaaataaaaaacaaaaacaaaaacaaagagccatacaagaaagttttaaagaatgtatttttttaaagccccagtgaggttttctgcagaaatcctgggtgcttataagccagccagaacctctacctttaaagcatatctgttcatgtcataggtcttaacaggtgtggaggaaagttgagatttttaaatttaaaaaaaaagtaaaaaagaagatgaacacttctgaatcttcttttttttcttttgagcatgttctccgggtggggaatgtgctgtggtttctgaaaacaaagaagaaaacatgtcattcttgtattccaggttttcacgatggcctgggggagtgtgatgtttcttttttttttatgttaatggatagcatgaaggtaatatttgcccaaataatgggatggggtgacgtggaggccaaggacagagggtgaggtattcaacctggagatgacctttaacctcaaggctttcttccctttaagacatttgactgtttgtttttgtttttgtctttttttgagacgaagtctctttattgtcgcccaggcggaagtggcacgatcttggctcactgcaacctccgcctcccagttcaagcgagtctcctgtctctgcctcccaagtagctgggattacaggtgcgcaccaccacacccaggtaatttttgtatttttagtagagatggggtttcaccatgttggctaggctggtcttgaactcctggcctcaagcaatccacccgctttggcctcccaaagtgctgggattacaggcctgagccactgtggctggccaaacatttgcttttttaacaataatttattgtttttattttttttagatggagtcttgctctgtcacccaggctggagtgcagtggtgccatctcagcttactgcaacctccatctctcaggttcaagcaattctcccacttcagcctcctgagtagctaggattacaggcacccaccatcacgttcagctaatttttgtacttttagcagagatggggtttcaccatgttggtcactgtggaattcctgacctcaagtgatccacccacctcagtctcccaaagtgctgggattacaggtgtgagccactgtgcccagccaattgtatatttcaaaacaactagaggagtatatttagaaatgttcccaacacaaagaaatgataaatatttgaggtaatggatagcccagttacccagatttgatgactacatattgtatgtttgtatcaaaaatatcacaccaatcccatagatatgtgcaactctgatgtatccataaaagttaaaagttttaaaaattgcaaggcacagtggctcaaacctgtaatcccagcactttaggaggccaagtgggaggactgcttgaagccaggagtttaaggccagcctgggcaacgtagtgagaccctatctctacgaaaaatacaaaaattagctgggatgtgggggcagggggtcccagctgtgcagtaggttcggactatacttccatcatcaaagtgacacagggtaagaggtgaggatgaaacacacgagaattgacttagaaaacatattggtcaaatcttagctattcgaggaatgtaggaagaaaagctgccttctctctgcatgtctgaaggttcccaacactgtctctttgcccaaggggcaaactttccatctgggcatcttctgtgcatctgaggatcatttgccaattataggcaatgatagtacgtgtttcactgcagagtgagataaagtcatttaatatgacaataaagcaatgcatcaaaaacctcagtcaactcagtaagcattttcttttcctgctaaccaacctaattctggtttcatacagggcagccaggtccccacctaaaagactgcacttctcaacctccagttgtttctatggataatggttgcaagcagaaattgggttggggctttcagataatcccccgtcgtagggactgcttcaagagaaagggatgccctttggttctttctccttcctgctgcctggagtgtctggcactgtggcagccatgctgacataatgaggccaactctctgccatgctaagagtggcagagctgggaattgaaaagagcctgctagccttgggttgtttacccttgattggttcactacttggaagagaacacacccttctcttgttcttaattctttaagtaatttttttttaaggcagggtcttactctgccccccagcctggagtgcagtagtgcaatcatagttcactgcagtttcaacctcccaggctcaaataatcctcccacttcggcctcctaagtagctgagactacagctgtgcaccacgacatctagctaattatttgtttttttgtagagatgagatctcactgtgttgctcaggctgggtaggtgtctaactcctaggttcaagtggtcctcccaccttggcctcccaaagtgctgggattacaggtgtaagtcaccgtgcctggctttgtttaaggcatttgtttcccccagcatctgttaccagcagcctgaagccatttctataacaatatcaggaagacacatggacagagaccctaatgtatgaaaaacgcatcaattctttgagatcaatgagtcctcataaacagagactgagaggctctaactttcctctgctatgtgagagtaggaacagacactcctccctgtccttttgtaaggctgttatgtcatctaggtgatgaaattgcaacaatgctttaagacggaggggtgaaaacatccggcattggcacaatgacgaaccctgagatttagaagaggaagaagaggcatcagtgggtgcctactgggacagtcttatttcacaaatcaggaaagggaaaccctacatgggcgcagtggcttgtgcctgtaatcccagcactttgggaggctgaggcaggtggatgacttgaggtcaggagtgcgagaccagcctgggcaacatggtgaaaccctgtatctactaaaactacaaaaattcactaggtatggtggggggtgcctggtacctgtaatcctgggtactcaggaagctgagacaggaaaatcgcttgaacttggttggcagagattgcagtgagcagagattgcaccattgcattccagcctgggggacagagtgacactctgtctcaaaaaaaaagaaaatggggactcactgtcagtccagggcatgttccttgcaaaaagggaagctgaagatagaaccaagcttggagaattttgtttgcaacgcagtcaggctctcctggatcctctctcacagtcttggcattcggggtgccatccccatccttgggcatgagcagaacgggaaatgtctgcagcacggctgcagccacagcttccacaagatgttgcttgtggaaaactgctggggcacaggactcagggtctgccaatgcttcgacactgcggcacctacccttgctatcatggcgtggtacaggtgcttggagtcaggggtcaggggctgtgcctcagagtggtccgtggagaggtcaaagagcaaagggggtctgtgatgggtcatgccctccctggagcatgggcagatgcctcagctgtagcaggcccctgctcccatggggtggaactgtgggatcacgtaatgaaccttccagatgcttccacctggctgcagacaagaagggagtcagggtggcagaaatccatgcaggtgtgaacacaggatgcagatgtcagcactgtgaaatcagcatgaacctccctgttcaatgaaaaggagggcgggcacgaggcagttcacacaatcacagccttcagcttgtcaagtcagagcgtgtgtgtgtgcgtgcgtgcacccgtgtgtgtccgtttgtgtctctgcatcgcatgccccaggcaaagggactcattgcagagtgctcactgtggctgctttcagaaatcagaatcatagaggttccttaattcttcccctttcctccgtgttgaaactgttcagcgttgatctactacctttctatacagaaacaaccaagatattttaaacggcacaattgggtacttacctatctatcactagctatttatctatcaatccatccatttatcttacctatcgatctcatctatcgatcatctatttatctatgaatgatctctttacctatcaatcatctgtctcttgtttacctatccatcacctatctactgtttatctctacttatttatcaatcaatgtatcttatccatcatccatccattcatctatcatctacttacctatctagctatctatttatcaattatctatctatgctgtgtctccctattatctgtctagcctctatggtctatctctgactacctatttatccatcaatttatcttatctatcatctatctctatcatctgtctacccacctgtctatctgtcaatctatcgtctatcttctatttatcctctatcatctatctgtatctgtccatcaatttatcttatctatatctctatcatctatctacctacttgtctatttatcatctatctcctctcttctatcatctatatgtatctaactatttatctatgtatccatcagcttacacatgtacctatctaatcatctgtctacctctatctgtctgctaatcatgtgtgctcagggtcttcagttggattaattatggataataaaggcaataagaagagggcatggtgtggactcagcacatttctttccttagaaacatggccaggctgagcacggtggctcacgcctgtaatcccaacactttaggaagctgaggttggtggatgacttgaggtcaggagtttgagaccaccctggccaaagtggtgaaacccatctttactaaaaatacaaaaattagccaggcgtggtggtgggcacctgtaatcccagctccttgggaggcttaggtaggagaattgcttgaacccaggaggcagaggttgcagtgagctgagaccactgactgcactccagcctttgcaacacagcaagactctgtctcccccaacccccccccccaaaaaaaaaagaaacacagccaaataccagtcgtcaccctctctgagataacagactgactcttcttagcttgaaagaaagggatctgctctgtgatggtgaattttatctgccagcttagctgggccacagtacccagatatttggtcaaacactagatgttgctgtaaaggtatttttagatgagattgagatttaagtcagcagattggagtgcagcagattgccctccataatgtggtgggcctcatttaatcagttgactgtcttgaggaaacaagaatgacccaaaaggaagaaggaaatctggattcagatgacagtgtagaaattctgcataagtccctcagccttcaggctcaacactgcaacatcagctcctgccagaatttctacactgctggcctgccctgcagatttcagtgctgtcagcctgaaacctacgtgagatgattcattaaaatttgtctctgtttctttctctctctgtgtacctacttacctacctatctataagtccattgatctacagactcttatctatttatcatccatctacctacatacctgtcatctatctacctatctaccatctattctatccatctatcatctatttatcgatcaacttatctatcacctgtctatcatctatctattatctaactatatggtcatctgtctttttcaaacagcccaccagatatctctatctacttttcatccatcatccatgaaagatctatccatctattcatccatccatgaactgcttctacttttcatctatctatattatctatctatccatcatctgtcttatctatctatccatccatcatgtaacttatcatttatcttatctatatatctatccatccattgtgtatctttatctatctctctatcatctatctatccattattctctctctatatatatccattatcctctctctctctctttttctctctccccctcctctcgtctatctataatctactcattggtttatctatctgtatttctatagctgtctgtccatccatccatccatccatccatccatccatccacacatccacacatcttattggctgtttctctggacaaccctggctgtggacagtgtgtacttactgtccttcagttgccagtgtgctgtgtggagatgctacccacagtaatgaaacaggaactcatgtgctaagcatgcctcagctccctgcagcaagggcaccaagctgcggttgtcgatcaccctgattccgtgaagagaacacagagcagagtcagaccacaggttcccaggcagccttttgcacctgggaacacatgttccagaatgcaagccttcccagcaaatggagcagagatgggctgtctctccagctactgttaagattgcaggttgctgagcaggatacatgtggttatttcaagacatggtgtctcttaagtgttggggtcatttattatgcagcactgcataagcagagtgcacatgcacacacacacacacacacacacacacacacacaccccaacacacagcactgtcactgtggatgttaacacaaagccttcaaattccagctggacagcccacatttccaggttgaattttcttaatttttttttttgagtcagagtcttgctatgttgcccaggctgcagtgcagtggcacaatctcagctcattgcaacctctgccccctggtcaagtgattcttgtacctcatcctcctgagtagttgggactacaggcacaagccatgacacccagctaatttttgtattttttgtagagatggggtttcaccacatggccaggctgctttcaaactcctgaccaaaggtgatcagcacatctcagcctcccaaagtgccaggattatcggcatgagccattgcacctgacctgttcttactttttaatcataatagaccccaggacacatggtcacatgggtaaaggagatggtggtgcatgcctgtaatcccagctacttgggaggctgatacacgagaatcgcttgggaggcagaggttgcagtgacccgatatcgtgccattgcacaccagcctgggcaacagtgtgagactccatcgcaaaaaaaccccaaaaaaacaaccaaaaaaaaaccttatttatgtaaccaaataccasctacctgttccccaaaatcctactgaaaattaaaaaaaaataaaaactaagaacaatttaaaaaaaatagggaacacgcagccttattgccacgtacctgtcctggggcaccttgccgcctgccagctggaccacaggagggaacacgtccatcaggctcgtgggctctccaatcactcagccagccaggagcaccctgggccagtggaaaatcccgggcacatggatcccatcttcccatcctcctatgcccttcccacctgtaagtaaaaggcatcattaggattttgccggaaactgcccagtctatacatatacctggatgtatttgtgcataggtatatgaatatgcacagccatctgcacacacacatgcacactggggcagcctcagcttcccaaaaacagccacagcaacatttccagaatcgtgctactacctgggctcttgaatatcggtgggtcactgtggctgattcaactgttcttgtaaatctatgctacctttacttagaataaaagaatgtattaaaatattcattacatttaataatttaaaaatgcttgttaaataccaataattttaaaaatatttatcaaatatgcatcaatattgatgcatttaaaatattaaaatagtaatgcatttattaaatatttaaaaattaagaatataataaattttaattttatctgaattatttatttatacctctctctcttctattaaagtgtaaaccctttaaaggaaggggatgtgactttttatctgcctgtcctgctcatctaggtagaacttgtactacagtagctgttcaatacattctttttgaaatgagcaaagtcattttcagtttgacttgttctgggaccctcagtggtgggagctatttggtcaaatgcatatgtgtccccagtgtccagagctcacctttgtaaattctgttccatccccctaactcctgtgtccatctcttgcctctaaatgtcctccatggtcagaggtgaaatacgtgaatgttgagtttcttaaatcattgtcttcgatggcattaagaatcttacctttacagaaaatggaaagtttcaggaccaagaaaacaaagcagcgtccgctagttcaatacacttcttcctttctgcgtgagacacctcttgctaggaagtcataagaagagaccacagttactcggaggccatggttacgatgtgatcccaaagggtaagacatagctaatcactgtgataccacaggactgtttacaatgcaaagcaacaataaaatttgaagccccctaatcaactgatggactctcacttcagccaaggccattccaaagtcaacctgaaaaacaaggtcaggccaggcatggcggctcacacctgtgagccaacactttgggagcctgaggtgagcggattacctgaggccaggagttcaagaccagcctggccattatggtgaaacctcatctctaccaaaaacacaaaaattaggtgtgggggtgcatgcctataatctcagctacttgggaggctgaggcaggagaatcgcttgaacccaggaggcagaggttgcattgaggtgagattgtaccacttcactccagcctgggcaacagagtaagactgtttcagaaaaaaacccaaaagagggccaggtgcagtggctcatgcctgtaatcccagcactttgggaggctgaggcaggcagatcacaaggtcaggatatcgagaccatcttgactaacactgtgaagccctgtctctactaaaaacacaaaatattagccaggcatggtggcaggcaactgtagtcccagctactcaggaggctgaggcaggagaatggtgtgaatccaggaggcggagcttgcagtgagctgagatagcactgcgctgcactccagcatgggtgacagaccaagactccctctaaaaaacaagcaaaaagaagaagaaaaaagaaacaaaaaacaaaaactaggtcaggctgtgatggaaagtggcgggggcggggggtggggcggtggtggacatgcgtcatgataccctccctttggaattcaggtgcaactgaccagcattcacattaaaacagaggccttatgactgagaggtcaggcatggtggctcatgcctatcatcccagcactttgggaggccgaggcagtaagattgattgagctcaggacttcaagaacagcctgggcaacatggcaaaacatgcaaaacatacaaaattagccagatgtggtggcacatgcttgtatgtagtcccagctactcgggaggctaaagtgggaggatcgcctgagactgggagggcaaggctgcaatgagtcaagatcgtaccactgcaatccagcctaggcaacagactgagaccctgtttaaaaaaaaaaaaaaagagtggtagaacagactctttaagtctgataagaaacatttaccatgtattccctctgaagcctgctacctggagtcttctttggcatcatgaaaccttggcctccacaaccccttatcataacccagacattcccttctattgattctcagataataactctttcaactacctgccaatcagaaaatctgtaaatccgcctttgacctggaagtccccctttcagtggtcttgcctttctgcactgaaccaaggtacatcttacacatattgattgatgccgtatgtctccctaaatgtataaagctgagctgcacgccgaccaccttgagtacatgttctcaggacctcctgagggctgtgtcatgggtcactggtcactgatatttggctcagaataaatctctccaaatattttacggagtttgactcttttggtcgaccccaggataccaccaatacaaaacagaatgaacacacaatgccaagaggttgccagcgggcatgcttttgtaaacatagtgccgtgtgtgtgtgtgtgtgtgtgtgtgtgtgtgacataataaagatgctggggagagggaaatggtgagactcagtgatgacagaatcctgtctatgtaggaggaagcagggctctaagtagcatctatgggcattggcatttggagtttgatggctcagcagtgcagaggatgccctgcaaaccatgcaattgctttatccctggaggccactggtcattgaaagcactgacataaagtcaaaacgatataagccacatggtcatctgtagctccgaaaatgcagactttgaagactgctataaactgaaaagtatctgaggcaggtctcaatctcaaggttttatcatgcagatgaagcctccaggtaacaggcttcagagaaaacagattgtaaatgttacttatcagagttaaggtctgtgtggatgttcgtgctggaggggtagaatgaggcatgcccaactcctcttcccatcatggcatgagccagactctcaggttaagttttagggtgccctggcaaaggcgggaatccattcagatggttgtggggggcctttaaatttatttttggtttacactatgaaccaatcccaccctatcactatgcttgtctcaggagatatgttcagattctgcaaggattttaatatctacactctcttaagacctgcagcctcgttggtcctctccagggtttcttcaaggccatagacggaaggtgacatctctgcattgtcctgaactttattgctttagtttctgtaacttctaatgaggatgttaagtcattggctgtgtagaaggttgataatatggtttggatgtgtttccccgcccaaatctcatgtggaattgtcatcctcagtgttggtggtggggcctgggggggtgactgaatgatgggggcagagttctcatgaatggttgagcaccatctccccttggtgctgcagagtgagtagcttctctcgagatctggttgtttaaaagtgtgcggctcctcccctcctctcttggtcctgctcctgcttgagactcctgctcccttcaccttccaccatgaacaaaagctccccaaggtctccccagaagcagacaccgccatgcttcctgtgcagcctgcagaactatgagccaatccaacctcttttctttataaattacccaatctgttatttctttgcaagaatggactaatacagttgattttatgcagaattagactaagtaattggaaatactgaaggagcaaataaatgatatgagagaagtttttcttcctattattcattttttatttctttttattttggagacagggtcttgatatgttgcccaggctggagttcaatggtgcaataattatagctcattgcagcctcaacctcctgggctcaaatgatcttcccacctcagcctccggagtagctgggaccacaggtgcacaccaccatgcctgtccaatttttaaaattttttgtagagatgcgggggctctcactatgttgcccaggctggtcttgaactcctggcctcaagccatctccctacatcagcctcccaaaatgctgggattaaagccatgagccactttgccccacctgaaaatgtagacttctaagaatgtgaactaatcccactctaacactatgcttgtctcaggagacacattcagattctgcaagaatttttatgtctgtgctcttttaagaatctgcagcctcaccggtcctctccatggtttcctgannnnnnnnnnnnnnnnnnnnnnnnnnnnnnnnnnnnnnnnnnnnnnnnnnnnnnnnnnnnnnnnnnnnnnnnnnnnnnnnnnnnnnnnnnnnnnnnnnnnnnnnnnnnnnnnnnnnnnnnnnnnnnnnnnnnnnnnnnnnnnnnnnnnnnnnnnnnnnnnnnnnnnnnnnnnnnnnnnnnnnnnnnnnnnnnnnnnnnnnnnnnnnnnnnnnnnnnnnnnnnnnnnnnnnnnnnnnnnnnnnnnnnnnnnnnnnnnnnnnnnnnnnnnnnnnnnnnnnnnnnnnnnnnnnnnnnnnnnnnnnnnnnnnnnnnnnnnnnnnnnnnnnnnnnnnnnnnnnnnnnnnnnnnnnnnnnnnnnnnnnnnnnnnnnnnnnnnnnnnnnnnnnnnnnnnnnnnnnnnnnnnnnnnnnnnnnnnnnnnnnnnnnnnnnnnnnnnnnnnnnnnnnnnnnnnnnnnnnnnnnnnnnnnnnnnnnnnnnnnnnnnnnnnnnnnnnnnnnnnnnnnnnnnnnnnnnnnnnnnnnnnnnnnnnnnnnnnnnnnnnnnnnnnnnnnnnnnnnnnnnnnnnnnnnnnnnnnnnnnnnnnnnnnnnnnnnnnnnnnnnnnnnnnnnnnnnnnnnnnnnnnnnnnnnnnnnnnnnnnnnnnnnnnnnnnnnnnnnnnnnnnnnnnnnnnnnnnnnnnnnnnnnnnnnnnnnnnnnnnnnnnnnnnnnnnnnnnnnnnnnnnnnnnnnnnnnnnnnnnnnnnnnnnnnnnnnnnnnnnnnnnnnnnnnnnnnnnnnnnnnnnnnnnnnnnnnnnnnnnnnnnnnnnnnnnnnnnnnnnnnnnnnnnnnnnnnnnnnnnnnnnnnnnnnnnnnnnnnnnnnnnnnnnnnnnnnnnnnnnnnnnnnnnnnnnnnnnnnnnnnnnnnnnnnnnnnnnnnnnnnnnnnnnnnnnnnnnatgtgcacatgcagcaaagaaaggaagaggagaaatggcccatgcttgtgtctgaaagaagaaaacctctttgagaatacacagaacacacagtacatcaaagggacccctgcacccatatgttcactccagcactattcacaagagccaaggcaggggatcaccttctgaggccatcagtgggtgaacacagaaagaatagatggtgggccagacgcggtggctcatgcctgtaatcccaacactttgggaggctgaggtgggaggatcacctgaggccaggaattcaagacaggcctgggcaacacggtgaaatgctgcctctaccaaaaatagaaaaattagctgggcatggtggttcgagcctgtggtcccagctactcgggaggctgaggtgggaggatggcttgagcccaggaggtggagcttgcagtcagccctgatcactccactgcactccagcatggatgacagagccagaccctgctcaaaaaaaaaaaaatatatatatatatatatatttttttatatatatacacactactatatatattttatatacacatattatttatatatatatgtgtgtatatatatatactgtgtatgtccacagtggaataccattcagccataataaagactggaggctgggcacggtggctcaagcctgtaatcccagtacttttggaggccaagccttgcagatcagttgaggtcaggagttcaagaccagcctggagaatatggtgaaatggggaaaccccgtctctagtaaaaataaaaaaattaacagggtgtggtggcaggcgcctataatcctagccactcaagaggcagaggcacaagaattgcttgagcctgggagacaggttgcggggagccgtgatcatgccactgctctccagcatgtgtgacagaaccaaccctgtctcagaaaaaaagggaatatctggtgtatgtacatgatggaatactattcagccatcaaaaagaatgaaatcctgtcatttgcagcaatacagatgaaacaggaggtcactatgttaactaaaataagccaggcacagaatgaccaatactgcatgttgttactcacatgtgggagctaagaaaaactgatcacatgaagatagagaatagaatgatagagaccagaggctgggaaggatgaaggacaaagagaagtggtttaaacagtacaaacatacagtaagcttaaaggaatacattcaatgtctggtagcagagtagagtgaccaaagctagcaaaatgtattgtactcaggagatggacactgtaagtatgctgacttgctcgctattcagtgtatacacgtaacaaaatttcacacataccccatacatttgtacaaattaaaaagtaagggccaggcacggtggctcacacttacaatcccagcactttggaaggcagaggtgggaagatggcttgagcccaagaattcaagaccagcttgggccatatagtgagaccttgtctcaaaaaaaaaaaaaaataaaaatgagacattagaaaaaggccaggcacagtggctcacgtctgtaatcctagccctttgggaggccaagatggaaggattgtttgagcccaggagtttgagagcagcctgtgcaacatagtgagacctcatctctacaaagaatgcaaaaaaaaaaaaaaaagtttaaagaaatgtcaataaaaatgtacagaatccaatggcgtgtatgtcaatgctattgaagccatcacatgacatccacttcgagactctcatatggggaacccagccacatgaaaaggttggcttctgcaaagctgtctcttccgagggttggtgtctgagatcccaaagattataaggagactctcagatgctctgagcagttactgcctcttttttttaattaaactttatttttatttttttagggacagagtctcactctgtcacccacgctgaagcacagtggtgtgatcattgcttactgcagcctcaacatctgaggctgaagcgaacctcccaccttagcctcctgagtagctggcatttcaggcacacaccaccatgcccggctaatgattttatttattgtagaaccagtcttcttacgttgcccaagctagtctaaagcacctggggtaaaagatcctcccatcttgacctcccaaagtgctgggattgagaggtgacagtgtgctggcagtcctcacagccctcgctcgctctcggcgtctcctctgcctgggctcccactttggcggcacttgaggagcccttcagcccaccgcggcactgtgggagcccctttccgggctggccaaggccggagccggctccctcagcctgcagggaggtgtgtcgggagaggctcagcgcttgcgggccagctagagttatgggtgggcatgggcttggcgggccgcactcggagcagccggccggcctgccgcccgggcagtgaggggcttagcacccgggccagcggctgcggagggtgtactgggtcccccagcagtgccagccaaccggtgctgcgcttgatttctcaccgggccttagctgccttcccccggcgcagggcttgggacctgcagcccgccattcctgagccttccaccccctccatgggctcctgtgccgcccgagcctccctgatgagcgccgccccctgctccacctagcccagtcccatcgaccacccaagggctgaggagtgcacgcggaccgcctggcactggcaggcatctccacctgcagcccctgtgcaagatccactggctgaagccagctgggctcctgagtctggtagggaggtggagaacctttatgcctagctcaggaattgtaaatacaccagtctgaactctgtatctagctcaaggtttgtaaatacaccaatcagcaccctgtgtctaggttagggtttgtgaatgcaccaatccacactctgtatctagctactctggtggggccttggagaacctttgtgtcaacactctgtatctagctaatctggtggggaggtggagaacctttgtatctagctcagggattgtaaacgcaccaatcagcgccctgtgaaaacagaccactggactctacccatcagcaggatgtgggtggggccaaataagagaataaaagcaggctgccccagccagcagtggcaacccgctagggtccgcttccatgctgtggaagctttgttctttcactctttgcaataaatcttgctactgctcaatctttgggtccacactgcttttatgagctataacactcacagcaaaggtctgccgcttcactcctgagcccagcgagaccacgagaccaccgggaggaacgaacaactccagacgcgccaccttaagagctgtaacattcaccgcgaaggtctgcagcttcactcctgagccaggaagaccacggacccaccagaaggaagaaactccaaacacatccgaacatcagaagggacagactccagacgcgctgccttaagagctgtaacactcagcgtgagggtgggcggcttcattcttgaagtcagtgagaccaagaacccaccaattccggacacaggatgacaggcatgagccatcgcgtccggccccatctcctctttaagatgtgatggttgcttacctttcaatataggaaacatcttcctttagcataagactcgctgttttctccagaaccatgggttgctccgtgacgtcatggtttctcatcaggatacagttccagcgtcgcacaaacccaaaggaggagtaccaagagataaaacacaagaagcccatgccggtgactgctctcgcggagacagagatgaaactgcaggtctggccagcagccagggtgagaatccccagggccaggaactggtgtaaccagagctgcgccctcagcgcggtccacttcagggggcctgcctgggtcacagtcgtttgtgagcgtgaagggcttgtcgtagaaatagtcaaatccgtggttctgggggtggtggcagtgatcccgcggaatgcacaattcacaccctggtgccattttcctaaaagaaacgcagacgttcaacggagacccgctttgaagcagccctttctgctgcaaagaaccttccgatcattccgcctcggcaggaaaagaaaagtctgcgaagagcaaaacttggaaatggaaaggcaatgaattgattgcatagcggtgtttaaacgaacgtcattcttggttatttttatttttgagacggagtgtcgctctgtcgcccaggctggagtgcagtggcgccgatctgggttcactgcaaactccgcctcccgggttcgtgccattctcctgcctcggcgtccagggtagctgggactgcaggcgcctgccaccacgcctggctaattttttgtatttttagtagaaacggggtgttagtcaggatggtctcgatctcctgactttatgatccgcccgcctctgcctgccaaagtgctgggattacaggcatgagccaccgcgcccggcctaaatgaatgcattctgatccgtgaaagactaatgaatgtatccatgtcagaacccttggcaagtgattaaaggtttaagacttttggcggggagcgtggctcacgctgtaatcccagaactttgggaggccgagatgggaggacacggagtcaggagatcgagaccatcctggctaacacggtgaaacccgtctcttcttaatacaataaaattagctgggcgtggtggcgggcgctgctggtcccagctactcaggaggctgaagcaggagaacagcgtgaacccgggcagcggacgttacactgagccggagatcgtgccactgctttccagcctgggcgaccagagagagactccacaaaaaaaaaaaaaaaaccaccattcgccttattcatttattactttcttccccttttttcccttttccggcctgttgcttttacggttttgcacccttagccctttcttttacttcttttccgacttttcctttccctctctatgttatccctgtttttttcttttcggttattttttcccgccaatttcgcttttttttttcccctctcctctcgtttttatttttaccctctcctactggcttttttttttcaccctcccctctggccnnnnnnnnnnnnnnnnnnnnnnnnnnnnnnnnnnnnnnnnnnnnnnnnnnnnnnnnnnnnnnnnnnnnnnnnnnnnnnnnnnnnnnnnnnnnnnnnnnnnnnnnnnnnnnnnnnnnnnnnnnnnnnnnnnnnnnnnnnnnnnnnnnnnnnnnnnnnnnnnnnnnnnnnnnnnnnnnnnnnnnnnnnnnnnnnnnnnnnnnnnnnnnnnnnnnnnnnnnnnnnnnccattctattaaataattcacaaaatatcatttacatatagatgtaatacatgtatttatattataggatatatattaccgataatatggattttatatataacctataatatagattttatatataacctataatatagattttatatataacctataatatagattttatatataacctataatataggttatatatataacctataatgtaggttttatatgtaatatattacctataatataggttttatatgtaatatataacctatataactataaatataatgtgataaatataaatatttaaaatgttatagttacatacctttcaatataggagttgcatacctttcaaaatatttatatttatatataatgcaaatataggttatatatcatatacattacaaatatatagttacatattatatgttatagcatattatatattatactgaaaaaagaaaacctttataatgtaagaatacacaatacatcaaagggaccctatatataaatttatatatataaataaatacaaatatatattctatataacctatatgaatacaggttatatataatatatataacctatgtatataaaaatattaatatttatatatacaaatatattaatataaataaaatgtattaatttttaaatatacattcataacatatagatatatatatctgtataaatattaatatttatatatacataggtaatctataaatatatataacctatatatacaggtaaatagttttttttttttttgagatggagtcatgctgtgtcactcaggctggagttcagtggcacaatcttggctcactgcaacctctgcctcccagttaaggcaattctcctacctcagcctcctgagtaactgggattacaggcatgcaccaccgtctccggctaattttttgtatttttagtagagatgaggtttctccatgttggtcaggctggtcttgaactcctgacctcaggtgatctgcctgcctcagcctcccaaaatgctgggattacaggtgtgagccaccacgcctcaccacaggtaaatatctttaagtaacagatatattacctcaaatttgtaagtatacattacctatatattttatatgtcatatataatatatacttacatattttataagctaatatgatattatatgttatatatgagtaatacataatagttgtatataagtaaatataagtattataagttatatataagtattaaagtaaaaataaagtatataaatatatatttaagtgtataaaaaataaagtatatattatatattatattttatatgtatataaatatatatgttacttaaaaggtaaccagttactaatgatagttgactcctgaataattctgaaatgtagtagcagaaactggctctctccaccaacttgtaatcaaaatgcccttatacaatttttcctaaggcaataactgttagaacaatatcgtagagctagaatgtggggaagcccacacctcaaatttcaggagaatgtctgagaactggggtgtccatgcaacccttctgtccatctcacatccagaccacctgccaactcaaattcaggtacagaaatagatgggaaaggtttcagggccttatttgccccacttgaaactagaggagataaggccaggcatggtggctcttgcctgtaatcctagcacttttggaggccaaggtgggaggatggcgtgagtccaggagtttgagtccagcctgggcaagatggcaaaaccctgtctctactaaaaatacaagaattagccaggcatgatggcaggcacctgtggtcccagctactcaggaggctgaggtgggaggattgcttgagcctgggaggtagaggtttcagtgagccaagactgtgacactgcactccaactccagcctgggacacccagtaagtaagaccctgtctccaaaaacaaacaaacaaacaaaacagtggaggagttcaagctggtttctccctacttcctcctgaccattcctcacaaactgtcctcagaatccctaaaaatgtatctttttctcaaacccagacacactcctattcccccttcttacatttaggggaaaaaatatgcttggatatagtgaggagtgtctctggaacatgaagaacaggctttcaccaaaacagactgagtatgtgtaccacaaaatgaagactcttagaagaaatgcaaatgtttaccaagatgcatgcaatcttggtaaacaaaagtaaatccactaaaatagttaacaaaagaaagaaaaattggctgagtgcagtggctgacacctgtaatctcatcagttttggaggctaaggtggaaggctctcttggggccaggagttcaaaactagcctgggcaacatagcaagacccccacctctacaaaaacaagaaataaaattagctgggcatggtggcgcatgcctgtggtcccagctagttaggaagctgaggtgagaggatcgcctgagcccagaagtttgaggctgcagtgagctgtgattttgccactacattcctgcctgggtgagagagcaagaacctgtctctaaaaaaaataaaataaagaataaatccaccctcagagtaggagatacacagacttctacagtataaagcactggccctgtaaccccagcactttgggaggccgaggtgggtggatcacttgaggtcaggagttcgagaccagtctggccaacatgctgaaaccctggctctactaaaaatgcaaaaaaattagctgggcatggtggcacatgtctgtggtcccagctactcaggaggctgaagcaagagaatcgcttgaacccaggaggtggaggctgcagtgagttgcaatcgtgccactgcactccagtgtaggggacagagcaagactccatctcaaaaaaataaaaataaataataaataaaagaagaaaaaactttaaaaaaattcaaaataaaaataaagtggcaggaaacttgaaaaggaggaacaatggttgtcctcctttagaaaaccacagctttggacaagttggggtgttgcggctcctgtgaatgggacagtggctttgagtgtgagaaaagcacagagaggaactggggaccctgcacagaaatcccaccaccaggttggggcgggtggcctcaccactgcgctcccacgttctcatgtgtatgacggggacagcacctctaaacccacaggctgtgtaaggaatgaaggaggtaaccagcagactgcctggtgcttggcggcataaaccaacatctccctcctttcctctccgtgcagaaaggagtttaaggggcaggcctgagctagtgccccttaggaaggccggcttgtaagattccccatggctggtgtttgagatctggatttccagtggagaattcacattattaaaatagtaagctgactgcctaagctatatgcaaaagcaatgtggttcatgctgtcaggcctctgagcccaagctaagccatcatatcccctgtgacctgcatgtatacatccagatggcctgaagtaactgaagaaccacaaaagaagtgaaaatggcctgttcctgccttaactgatgacattaccttgtgaaattccttctcctggcttatcctggctcaaacgctctcccactgagcaccttgtgaccctcccggctgcccctgctgcctgccaggaaacaaccttctttgactgtaattttccactacctactcaaatcttataaaatggccccatccccatctcccttcgctgactctctttttggactcagcctgcctgcacccaggtgaaataaacagctttattgctcacacaaagcctgtttggtggtcccttcacaaggacatgagtgaaacatgctaaacatctcctttggctctgggagtctggaattcgggttggtgccaggcagtgagtgcctgcaggaccagcccccaacagaaacccctgggcgctgaatctccccggagcttccctaatagacagcattccatgcgtgttgttaaaactcatttctggaggaattggtgcatcctatgtgatcccactgtgggaggattcttgggagcttgtgtctggtctgtcctgggcttcatccatgtaattcccttcactgattttgccttacctcctttgactgtcataaatcacccatgagcacaactgtatgccaagtcctcctagcaacttcctgaacttaagggtggtctcggagacccttgacatgctgtctctgatacagggtggtcctggaaacccctgacatgctcttataaagggtggtctttgagacttttgacatgctgtctcttttaaatggtgctcttggagacccctgacatggtatctgttataaagaaggtgttgtgcccctgctggggcttgttgtctaaaggaaggcagtgtttgttaactctgggggttttgagatgatgagtgaacatgtagagaaagataatgtctgaagaaggtcatgataaatggggacaagctgaagactgataggtctagagaagaaaagagggcaatctcctaggatttggaatttaaaaagaaaaaaactcaaaaaaactgggaacaatccaataggtatgagacggaccaggcaccaacttcttttttttttttttttgagacggagtctcgatttgtcgcccaggctggagtgcagtggcacaatctcggctccctgcaagctcttcctcctgggttcatgccattctcctgcctcagcctcctgagtacctgggactacaggcacccaccaccgtggctggctaattttttgccttttttttagtagagacggggtttcactgtgttagccaggatggtctcaatatcctgccctcatgatctgcccgccgcagccttccacagtgctgggattacaggcatgagcaccgacctggccccctgggcaccaacttctgattcagaggagacaggattgttttcctttgagggaaaacaggattatttttattattttattattattatttttttgagacagagtcttgctctgttgcctagactggagtgcagtggtgcgatctcagctccctgaaacctctgtctcccgggttcaagtgattcttctgcctcagcctcctgagtagatgggattacaggtgtgcgccaccacgcacagctaatttttgtatttttagtagagacagggtttcaccatgttggtcacgctgatcttgaactcctgacctcgtgatctgcccacctcatcttcccaaagtgctgggattacgggcatgagccactgcacccagactgggatcttttttatcatgaatcttctcaaccaccatataatataaggctcccacatatccacacttatgaggccagttgcatagtcgcggtgctgcaagattcttgcaaaagtggtttcgttctcagggagccacctgagcctgcattccactgaagggcccagtatccattgctggcgtccatgcctgtggggcagggaagagagtaagaatttactttcccttctctagaggaggacttctcaactatggggatttggtgtctgagatctggatttgcgcagccgagccaagctgctgttatctatcatccatctatcatgtatggagctatcacttatctacccatctatcatctgtcatctatctacctacctacctacctacctacctacctacctatcatactattctcaaaataataagcatggccaatgtctgaagatgtttgtggtgtcacaactcagaaagagtggggtgtggtgctactcatatcaggtgtgtggagcccacgtatgctgttcaagaccctacatacagtgcacagaacggcctcaccatagagaattttctagccccaaatgtccatcatgccaaaacagagacaccctaccttaggatgacagactctatgtgatctctcatatgctatctatctgtttacctatcacctatctatcccaatatgtatccatcatctatcatctatatctatccatctatgtatctcttatatatcattatcattactcatctagctatcaatcagctatcattatcatctatcacttctctatcatctatcattataatcacctgttatctagctgtctagctatcaatcacctatcatgtcattatcaatcatctatcattatgtatcatcatcatctagatatttatctatcaattatccatcatctaccattatcatccatctagcatgtatctagctatcaattatctatctatctgtctgtctatctgtctatctatctatctcacaatgcttctcaacttggggaaactttgctctctctaagacacacttggtcttgtgatcagtcatactggctccagaataaacctctttaaaatattcaacagaccttggcttttctgttcacatcctaatgatcacaacttttatgtgtatgcacacaatacaatattccttacataaatatagggaagaggatgaattgcagataatctttgtaccattgcccctatatcttcaccatcagtactcaactgttacagatgatagaatgagtgcacacagatgtgcccattcttccatcatctccatgacaccaacctgacctgaaagaatgtctccccatgaggaatgcagctcggcttggggtgcagagcagggtggccgccaggtgctgagtgagcctcacaccttcctctgcaagctggtcaatatttggcattctgagcaaagcacacaaatgtcattgctggaagggagacatgcatttggcttaagcagatccctgctctgaaaggcacaggaatagactgtgaagacttcactggatttcagaattagttgcattatggcctcctgtagaggcagattgaccgctatcctaagtttggtgttgatgttgagatgggtgacgtcacacacacacacacacacccacacacacaccaacacacacacacagagtacatgagacaacttatgacaaacattatgaggctttctagggagagcagtgcagaccttccaagctcatgtgaaataaggaagcaaagaaaggagatttatgtttttaattgctgtgagggtgtggggattggatgagagttcccatgcaagggtgggggcgtttatggtctgaatctgccatcagcaccaaagtagacattccctgtgctttcttatctgcttgtccagatggggaacacagagagaagaggcctaaaagctttcagcatcagatatcaaaaaacagtgagggccgggcatggtgactcatgccaataatctcaacactctgggaggcctaggcgggcagatcacttgaggtcaggagttcaagaccagcctagccaacatggtaaaaccccgtctctactaaaaaaaaaatacaaaaattagtcaggcaagatggtgcacacctgtaatcccagctacccggaaggctgagacaggagaatagcttgagcccaggaggcgggggttgcagtgagccgagatcgcaccagtgctctccaggcttggtgaaagaacaaagtgagaccctgtctcaaaaaagaaaaaaaaggaagccaaaagaggtatccacatagaatggaatctgtggaattctcatagattcagccactgcaaggcgtgaggcacggtactgacacttgctgccacagggaggaaccctgaaaacactggtctgtgaaagcatcctgacataaaagaccacaggttatataattgcatttgtatgaaatgtccctaacaggggagtctatagagatggaaagtacattagtggctgccagacacggagggttagggtgctgagaggtggaggagtgttagctggggctgccataacaaagtcctacatacctggccgcttcaacaccagatattggtcgggcacagtggctcatgagtgtcatcccagcactttggggggccaaggccaaggtgggtggatcacttgaggccaggagttcgagaccagccttggcaacatagtgaaaacctgcctctacaaaaaatacaaggatgtggtggcatgtgtttgcagtctcagctactcatgaggctgaggtgggaggattgcttgagacgaggagagggaggttgcagtgagctgtgatcatgccactgcattccagccaacagagtgagaccctctctcaaaaaaacaaaacaaaataaaacagaaaaacaaacccagtagacatttattctctcacatttctgggagctggaagtctgagatcaagcatgggcagggctggttcctcctgaggccaccatcctgggctcgtagacaccatcttctccctgtgtcctcaggtggtcattgctctatgtgtgtctgtgtccttatctcctcttcttatgaggaccctagtcctattggatcagggcccaccctagtgacctcattttacctgaatcacgtctctaaagactcagtctccaaatagagtcacagtctgaggtcctgggggtcaggacttcgatgtaggtgtttaggggacacagattcgctcctcgctggaggtgatggctaaggggatgcagagtttctttgggggtatgcaaatgctctaacatggtttgtggtgacagatgcacagctccatgaatagaataaaagtccctgaactgtacactgtaaacagatgaactgcatgttctgtgaattacaaccaggcttgctcagggtgttcgaaaggggatccctggacaaggggcagattgattgattgattgatttagagacagggtcttgctctgtggcccaggctagaatgcagtggcgcaacctcagctcaccataacctccacctcccgggctcaagccatcctccactctcagcttcctgagtagctgggactacaggcatgcaccaccatgcttggcaaattttttgtgtatttcatagagacagggttttgccatgttgcccaggctggtctcaaacacctgggctcaagtgatccaccttccttggcctcccaaggtgctgggatgacatgcgggagccaccctcccagcccccacagggcagactgctgcaggtgctgcattgtcctctacaaagaagggaggccctgctctgcggcaactgctcctgaggttggcatcttttaaaaagcagatgcagcctgcattctgaggcagtccttctaaaagcccaccaaatgaataaggaggtttctcaccttttctcctgttgcagaaagcatgtgagcaccactcaagcgctctgctggtaaggctggcatagaggctactactctgtgtttgcacatgccactgcagtgggctgaatgggggtctgcaaaccgatctgtccatgtgctgactccacaaacctgtgcgtgagaccttattagttaggtaccctgagatgggatcatcctggtttagagagggccctagatgcaatgaccagtgtccttctgagagacagaggaggagacacagacacaggggagaaggccacgtggggacggaggcacaaactggagtgatgtggccacaaagccagagatgcctggagcccccaggagctgggagagtcaggaagggtcctcccctacagcctctcagggagctctgttggtgtcttaatctcctcttttagtaatccatatcagattagggctcaccctaaggacctcagtttaacttaattacctcttcaaagaccccatctctgaatacggtcacaccctgaagtactggtggttagggcttcaacctacaaatttggaggaggccagaattcagcccacaacagacgttgtttgcaaatgtaatcaacagaagatgagatctttacagtgggcaggccttgctgcaatggccggtgtccttataggatgaggagattaggacacagacacagaggagaaggccccgtggagatggaggcagagactgtagtgatgcggccacaagctcagggacacctggagcccccaggagctgggaaagtccggaaggatcctcccatagggccccccgagggagcccggccctgcccacacctggatttaagatttctggtctccagacctgggagaacaaatttctgttgttttaagctacccattttgtggtagtaatacattcaccccctcaccgcagttctgcagcgtttaaaagggcctttttacctgttggtagttttttgttgagttctgaggccctaaggagtttcctaatttctccaggcagattttaaatgcactattccttcaaactcacatcacatcatcaccaatagcaacaaccaactgtacctcagtgtattgttcccatagcaaccgagatccccaatgcctagatcatccgccatgatcagtaggatatttggtttaaaggcatttgcagttttaggttcacacgtcttcagaagcaagcataaaaacagtagcaccggcaaagattccctggagagaaaagcaaaacacagaaatgactatctacaatttggcacaggaagtaggcatttcaaggcggcttgctgggaaggtgaaggtcttccgaccttcttaactaaattaagacattcatctttatgggaggttattatcttggcctgaattcctgcacttgtgtccccagaccaaacgagggtcagactgctatttcctgtgactcaatagcgagatgcagatgtctgataccctaacttgtattaactttattgactctctcttagctgaaaaagctggatggattccatttggctccttcatttgcaagacattaagggctcgttacccacccccttcctcaaggacttaacttgtgcaagctgacacttagcacatcaaagagtgcaattaactgataaggtaaggtggcaagctatgtccacagttcccaggaattcacctgggtgatagtaccctaaggccccgcttttgtgtctggcagatagcacccagagcccccgcacctatcaccttgtgatgagtttaaagcccctgcacctggaactgtttgttttcctgtaaccatgtgtcttttcaacttttttgcctgttttacttctgtaagattgcttcagctcaattccccctcccctctctaaaccacagtataaaagaaaatctagccccttcttcagggctgagggaatttcgagcattagccatctctcagtcgccagctaataaaggtctctttaattagtctcaaagtgtggcgtttctctataactcacttggttacaatatttggagaccccagcgagatatttgccaccaggtgagagctggactcattccagcctcccccatacggtggacttataggggaggcaccacctgaagatgtcccagggccccataagactccgtcttccggaggagaacggatcgaccactggagtgtgcccacaaaattcaacttctgagtcctcagtttctggtctcaggaatgtaagtcagctctgactctggtttggtgagagggaagtggccctgataagggtgtctctctctttgactctgcccccattccaggacactggaggacagagccttggttttctgttaggcacctttggttctggtttggtgagcgggaactgtccctgatgagggcatttctctttgactctgtccatattccaggatgttggaggacagagtcctggtttctggcaggccggcctctccattaagactagtctctcagtctctccccctctttttttttctctctccccctccccctttttctatctcttctctttctctcgttcaggtctcccggagacctctgtttagaacgggaataagaaaaattgttataaactctgtgtgaatgtgtgcatgaatgtggaattcaaaggcttgcccttgaatctccagtttgtagctccacagcgaaagctatggagttcaagtgggccctcacctgcagttccgtggtgacctcataaggcttaaggcagcatcgggcatagctggatctgagccaggggtttataccggcctgcaaatgctaagaggagcgtaagtcccctcagggggagtggccaggcgggcatctgactgatcccatcacgggaccccctcccctttgtctgtctataaaaacttccataattgtttatataccctagggtctattgcctgatttgtgtttattgcctgttttgtgtctattgttgtgtttggtgtttattgtcccgtttagtgtttgtctaagtttcatatgtcaggtcatcaatattgcccaagacgactgggtaaggacttcttcaaagtcctgagtacagattttctaacacaggaggtctcaggtgtgtgtcttcaggttgctgggcccaggggccaggcatgcttccaccagtacacaaaagaaacagcctccttcccctctggcaggggctcctgacccacaggcaaagagtaggaggtgacagtgccggaccccctccccaaggggacccctcaggtgcccggctcctacgccttcaggcatcaaagccgccaacttccccgagccccagtgcttccacacccagctcagaatgcaggcacccagcctgctatggtagccttggccctgggccaggcttctaagctaggcttgcagcgcctgatggggcctggaggtggggccggggaccgcagagtcatcctggcaaaccagcactgcccagcatggctcctctcagcctgaaaggatctgagtggccccttttctcctcatccccatcccttgccctgcacatctcgttttcctgtgtcacagcaagtccagcacctccaagacttagctctgctctccctcctcaaacccttaaaagaaaaggctgagtttgaactatttgcctttcagtcgtggagacaccaaagatatttaggctgtaagtcaaaaggcagagggaaatcatgtaggtcccaccagcctcggacccacctcttgtcttctccctaaatctcaaagcttaaaaggacagaactcatgtagcaggaagcactggcaatagctgttttcctgcttcttttagccatattatttctgttcttctgatgctacaaccccccaggtcatgaatttctctgtcagtgctgggtttattatctctgctcaaaccttgttaaactgccccagaataggatactcttcttcccggcctcataaagatttgagccctctccaatgtatgttacaaaaattttctctaggcttctcagaggattatggggtctgccttaaaaaaggcaaactctggacactctgtgaagcagaatggccaaattttggagctgggtggcccccagaagggtcactgaagctcgcagttgttcaggctgtgtggcgggttgttgctggaactcctggtcacccagatcagtttccatacattgatcagtggctgagtttggtcaggagccctcctccatggctccgctaatgcatcattcataattctacctctaagttccttttgagccagacctcacttttgcctcaaccctcagctggctcggctcctcctattctgcttccttctgaagaagaagagaatcttcttcacccagttccaccagcttataaccctcttgctcctttagaatcttcccttgtctcctcgaggatgtcccctgtgggctgtccgcctgttgcctctagattgcggccatggcaggaggaggtagccctcctcctcccactgagagaggcacaagtccctttgggtgatgagcacttagctccattcttagtttatgtccccttttctacttctgagctgtataatgggaaagattataaaccccccttttctgaaaagccccaggtcttgacctcactgatggagtccatgctctggacccattggcccacctgggatgactgtcagcagctccttttgacccttttcaacgctgaagagaaggaacagatccaaagagaggccagtaagtatttcctcacatcagccaataggccagaagtggaagctagaggcctccttaaggaagtttttccttctacccggcctaattaggacccaaactcctcaggtgggaagagatctttagacgattttcaccggtatctccttgtgggtatcaagtgagccgcttggaaacccgtaaacttgtctaagatgactgaagttgtctaggggcctgatgagtcactgtgaacgttttagaatgcctccaggaggcctatcagacttacaccctttctgacccggagtctcctgaaaatagctgtgctcttaatttagcatttgtggttcaggcagcccctaatattaaaagaaacctacaaaaactggaaggatttgctgggatgaatatcagtcaacttttagaaatagcccaaaaagtttttgacaatcaagagtttaaaaagcaaaaacaggcagctgaggcagctgacaaggctgctgacaaagcatcagaaagacaagcgaaaatcttagtggcggccatccaggaagccagaaaggaaaggcccccatcacagaacactagccagggggccctgggtccatgctagaaaagccagaaaagtgaccagggttcccttcaaagaaaaaccaatgtgcttattgcaagcagataggaaactggaaaaaggaatgcccattaagaccagaggaaaaaccagaagacaaaaaagtcctcaccctccctgctgcggaggactctgatgattgatgggaccagggctcctttacacttggccctcgggagcccatggtgaccgccatagtagggcgccagcctgtacacttcctaattgacaccagggcggaacactcagtactgcagatgcccctaggcagtgtctgtaataggaaagtggttgtacagggagctactggagttattcaggaatatcctgtcacccagtcataagaggtgagtttgggacagaaaagagcaactcactcattcctcttggtcccagagtgtccttttcccctcctaggatgagacctgttccacaagctgtaggcatctatttccttctcggcccaacaagctcacctcatgttaggggacacaatgccccctattgctcagctcctgttaaccacccctctgtcagaagaatatctgttagtttcacctccaaaaccaccagaaaataaaactaatcctctcctactggaattacagactctctttccttgagtctgggctgagccaatccccccaggacgggctaagcaccatccaccagtggtagtagaactcctggccaccaccttgccagtccaggtgaagcaatagtctgtgagtcagcaggctagggagagaatcaacccccatattcagcaactgttacaaactggcatactcacaccattgccagtccatctggaatactccattttttccggtccaaaaacccagaacaaatgattactggcctgtacaggacttaacggaagttaacagacagatagtcactgtccacccaactgtccctaacccttatactttactcagactgcttccaccagaacacacaatttgcactgtccttgacttaaaagatgctttctttgctattcctctggcccccaaaagccaacctatctttgcttttgaatggacagatcctggctcaggaaacaccacccaattgacctggactcagttacctcaaggttttaaaaattcccccaccctttttaaggaagcccttcaacaggatcttataccatttcaagccagaaccctaattgtactcttcttcagtacacagatgaccttttattaggtactgaaactactgacagttgcctgcaacacactaaggacctattttacctccttcaggaactcaggtatcaagtctcagccaaaaatcccagctttgtcttcccagagtctcctacctagggtatgagataaacagaggaaaaagggcacttatcagtgcttgtaaggaagccatcccacaaatccccactcccaccaagagacaggtacgtgaatttctgggggccataagatactgtcgcctgtggatattaaggtccgcagagattgccaagcccctgtacactgctactggaaggaatggcccactagtatggactgacaccaaagaataggctttcaaaaacctgaaaaaggcattaactgaggcccccactctagccctccctaatatctcaaaaccatttcaccttttattcacgaaagccagggagttgctaagggggtgctcactcagactttaggaccctggagatgcccagtagcctatttgtctaagagactggaccctgtggccgctggatggccaacttgtctgtgagccgtagtggccacagcaagcctagtccaggaggctaataaattgactctgggccaaaacttcaccctcatggctcctcacgccatagagattttgctaccaagtgcttctggcaaatggatgtcaaatgctcgcatcctgcagtatcagagtttactgttagatcagcctcttttgactttctcttccataaggtgtttaaatccagctgctttcctccctgatccaaacttcactacacctgtccgtgactgccaggaactgttagaaactacagaaactggctgaactgatctccaagatatgcccctataaacatataccatgtttatagatggtagcagcttcctcgaacagggagtacaaaagattggtgcagcctttactacggagacagatgtgctgtggtcccaggtgttgccagcaggtacctcggcacagaaggctgaattgatcgccctcactcaggctgtctgatgggttaaggacaaatgtattaatatttatactgacagcaggtatgcttttgctactgtacatgtacatggagccgtctatcaagaatgcgggctacttacttcagcaggaaagattgtcaaaaacaaagaagaaattttagccctgcttgaagcaggtggctgtaattcactgcaaaggacatcaaaaggaagacttggccattgcccatgggaaccaaagagcagattctgtaactcgaaaggcagcatggctccctgtcatgcctttaaccctgctgtccgctgtgtcctttccgcaacctaacttggcagccccagaaaaaaaaagaaacaagcttcagatcttcaggccaattaaaatcaggaaggttggtggattcttcctgattccagaatcttcataccccgagctctcaaggaaactttaatcagtcgtcttcattctaccacccatttaagaggagtaaaactggcccagctcctaaggagccatttcaagatcccttcgccttcagaactctgcaaaccaagcagctctctggtgtatggcttgtgctcaagtaaatgccaagcaaggtcctaaacccatctcagggcactgcctccggggaaactcgccaggaaaaaggtaggaaattgactttacagaaataaaaccacactggactaagtagaaataccttttggtactagcagatacattttctggatggactgaggcatttgcccccaaaaacgagactgccaccacagtagctaggtttttactcgatgaaatcatcctttgacataggctgcctgctgccataaggtctgataatagaccagccttcaccttgtccatacctcagtcagtcagtaagaactcagagctctgcacaggtagaatgcataaaccacaccctaaaaatacttttacaaagttaatcttaaagactggtgaagattaggtaaggctccttctttagtccttcttaaagtaagatgaacttcctaccaggctaggttttcaccttttaaaatcatatataagagggttccgccgatcttgcctaagctaaaagatacccatttagcagaaatctcacaagctaatttattacattacctacagtctctccaaaaggtgcaagatatcatccagccacttggactgagagctcatcccaatccagttcctgatcagatggggccctgccactcgttccagccaggtgacctggtgttcgttaaaaagttccagaaagaaggactcctgcttagaaaagacctcatactgtcatccttaccaccccaatggctctaaaagtagaaaggaatgcttacattcatgacaccccctagtacaaagcatgtttaactgtaatctatgactaactaccctaattactggattggcagaaccctttttctccttctcttgtttagtcttccaaccattatatattaaaattagtttcttaaatttgtaaaacaacgcatagcttctgtcaaacttaggtatcttaaaacccaatgtaactaacccccttgttataaccgaggaatcccctcagtcgcctcctatccctgggctctgatgtctggcgtctttcccaggcacagaagccgcctccagctacattctggggactacagggcgccggatataaccacgccctttacagggacccttcgtgctcgcgaccccctccccaggccctcaccccaagccttagtgtgggccacatcccagggtccctggcacctggcggcgggcgggtgcgtccactcaagctggctgatcgcatggcccatcgctggcccagagcgagggacctttgcgcactctgcgcagggctctgctagtgccaaggtgatctctctcagctatgggatctagggtgtacgcctgcccctccttcatccgcctcatgtcctggctctcgggacctcagggatctccaggacctgggcgtggaagcaggtttcccaggtcgtcactcagagaggccgatgctaaggaggagctgattaaacccagttgtgattgacccagagctgcggctcccgcctaggatcccagcaatttgggaggccaagaggagtaggtcacctgaggtcaggagttccagaccagcttggccaacatggtgaaatcctgtctctactaaaaatacaaaaattagccaggcgtggtagctcacgtgtgtagtcccagctattggtgaggctaaggcaggagaattgcttgaatctgggaggtggagtttgcgccactgcactccagcctgggctacagagtgacactctgtctcaaagaataaaataaataaataaacaaataaacaaacccagttaggtttgagcacacggagtctcttttctttttgttgggaagggtcttatgacctgcccagagcaatcaagctgcaatttcagtttctcaaaacttggtgtttgaaatgtctgttccagatgctggacttgtactctaagtttgggatggggaatgctagatggactcttttttttttccttttattaccattattattattttaagatagggtctcactctgtggcccaggctggagtgcagtggtgcgatcccagctcagtgcagcctccacctccacctgggttgaagcgattctcctgcattagcctcccgagtagctgggactacaggtggccaccaccaagcctggctaattccaactgctatttttatctttattccttccatcagactgatgttgaaattactccttttgattaaccactgtgccctggacccctccccgtcttttctgtgactcatccttttgtttttgagtgatgcagttttgctcattaccctctcatgtaattcttttcttttcttttttttttttttgtaggtagagaaagacagatttattacagtaattaggaaaacgccaggatagcagggaggtaacttgcattttttttaaaatagtatttattgatcattcttgggtgtttcttggagaggggaatttggcagggtcataggacaatagtggagggaaggtcagcagataaacatgtgaacaagggtctctggttttcctaggcagaggaccctgcggccttccgcagtgtttgtgtccctgggtacttgagattagggagtggtgatgactcttcacgagcatgctgccttcaagcatctgtttaacaaagcacatcttgcaccgcccttaatccatttaaccctgagtggacacagcacatgtttcagagagcacggggttgggggtaaggttatagattaacagcatcccaaggcagaagaatttttcttagtacagaacaaaatggagtctcccatgtctacctctttccacacagacacagtaacaatctgatctttctttcttttccccacatttcccccttttctattcgacaaaactgccattgtcatcatggcccgttttcaatgagctgttgggtacacctcccagacggggtggtggccgggcagaggggctcctcacttcccagacggggtggccgggtagaggcaccccccacctcccggatggggcggtggccgggtggaggctgccccccacctccctcctggacagggcggctggtggggcgggggctgccccccacctccctcccggatggagcggctgtcatgtaattcttttctttgtatctttgggtccccctttttttgtttgtatgttttgtttttaactcttttgacctctagaaagatcaaggctgagagttgaggctgcagtgaacctttttgtctttaactctcttgaaccctagtcactgattttctcaagccccttcatttcgtacctcatcccctcacatcccctcacaatgcaagatctgctcaaagtataaatccatattttgtaggaaatcctagcttacaaaacaatatcacatctctacctccagcccaggtgacccattttccctcaaagggggttgcttaggtcctcttgcactgttcaggggcaaaataattccatagtcttcaagataacagtacttttttcttctaaggctctggctgtcaagggtgaggctatcaccacctcttaaggaagtggaactaccggtgtgcatcaccacccctgacccatttttattaatttattttttctgtagagactaggtcccactatgttgcctaagctggtctcaaactcttggcctcaaggagtcctcctgctttggcctcccaaagtactggattacaagtgagccactgtgcctgaccatccagaagactctatattaagtgtataggtaggaggtaaatccaggtcctcctcaccattattatgcctccaacagttatgccttttttttccccctttgtaactagttctctatgcttaccaaatagagtcagtaaggccagggaggtggggtagaagtttgtgttgaaaacatagaatcagaagtccctccttaaattcactgagttaggattttcatatatgagagagctgccccacactcccctggcatgggataatggggctgcttgttcaagacaatacagtcaggagcccccgactccctcaattgattgaattggaatctcccaaaatggtgctgggaattctatttagaaaaaagaccattaacttttaattggcaaattaggatcatttacatttattatgctccattgcctagtctgaagtgcagtggtgcaatgttggctcacagcaacctccgcctcccaagttcaagcgattcttctgcctcagcctcctaagtagctgggactacaggcacacatcaccacacctagctaatttttttatttttagtagagacagagtttcaccatattggccaggctggtattgatctcctgacctcaggtgatccatccgcctcggcctcccaaagtgcagggattataggcgtgagccaccatgtccagacagagctagtccttgagcactgtttattgcttctctctttgccctgttactctgaaagagcttttatcagactaggcatggtggcttacacctgtaatcccagcactttgggagactgaaggggaaggattgcttaaaagcaggagtttgagaacagcctgggcaacacagagagaccctatttctacaaaaaaaaaaaaaaaaaaagccgaatatggtggtgtgccagtagtcccagctacttgagaggctgaagtgggagagtcacatgagcacaggaatttgaggttgcagtgagctgtgattgtaccactgcactccagactgggtgacagagcaagaccctgtctctaaaataaaaatttaaaaaataacttttttatccttgagggctttgaactgggatttcttgctgagccattatcacacagatggagaaggccaggaaaaggcctggaaggagcgggcaggagacagcccataagcagttctgcagggaggtttagcaggggtggagtggagatttgatccttggaagaaatcctgtactgctgggagttgagattcctgagaactagagatcctgagaactagagagaaaagagccttgggtgcacttaggtaaattatataaacacactgagctgtcttgggtgcccaggatttggaaatggggcctgggggcagtagaagctggtgtaccagaagtcatatttgggggaggttgtgggaatggaaagggtgggtaagccctgaccctgaggtctcacatgactttcagcacatggagcctccattggggactttggcttcaaagcatcaaggtcaagagtgtggacaagtgtggacacagatgtgactctccccagtggatgctgaagatcttaaaggcgactctatgggccaggaacatctggcacagctgacccaaagtgctggtcttgttccataagccatggctatggggaaagccttaggggttaactggttcctcctgccatccctccctccctctctcccttcctttttctttttgcttctttcctttccttcttcctttctttttagagacaagatctcaccctgtcacccagactagagtgtagtggcacaatcatagttcagtgcagccttgaacacattcggaggccagagactcaagtgatcctcccacctcagcctcccaagtaggtgggactataggcacgtgtcacctcacctaattatttaaatgttatgtggaggcaaggtctcgctatgtcaccccagctggtctgaaactcctggcctcaagccatcttagtgccctaaagtgctgggactacagatgtgagtcatcgcacctggcctactatttctttcttgacccaagagaattggctggagatggatttgacttttttggtctctgtgcacagcctgaattcttggaggctgatgtggattggataatttgaggacatgttcttgaagtggtgacaaggtggggcattgcttatcatatacctaggcttggaatagtgggaggagggaactgttcttgaatctggagacagaaagaactattggaaagacctccttactcccaggagagaatatgttgggaactgaattgtgttgccctcaaattcacaggaataaggtttttagtcatcctttaaaatgaggtcacaagagtgggccctattccaataggagtggggtccttataagaagagtagattagggctgggtgcagtgactcatgcctgtaatcccagcaatttgggaggccaaggcgggaagattacttgaggtcaggagttccagagcagcctgggcaacatggcaaaaacctgcctctactaaataatacaaaaattagtcgagcatggagcaagtagcctattgtctcagctccttgggaggctgagacaggagaatcacttgaacytgaggcagaggttgcagtgagctgagattgcaccattgcactccagcctggacaacagagcaagattccgtctcaaaaaaaaaaccaaacaaacaaaaaaccaagaatcggagactaggacgtagatggatgactgtctgaagacaggggaagaaggcggtagctgtgaaccaaaaaacaggttctacccagacacagattctgtcatgcccgggtgttggacatccagcctctaaaactgcaataaataaatattcttgatgatacccactttatggtattttcattctagcagcctagacatattaagtaaggcaaagcctgattttkcaatgaccttgcagttcagagctggggagaacactgcctgtgcagcacagattccaaagcctgaatttgccctaattacctggggcactggggactgaaaacaattccaatggaaaggactgtacatccttgtggttgtaaacgataaacagacactataaatgagcaccacagacaaagccacatcagtgccagtttttatctttggaacctatctcctgttcatgtgcaaatctgtaggtcacagagacacctttgctgggacttgtgctgttttgggctacagggcggcctcttctggactgagttaggatccattgacagaatcctcccctactccaggagatactttacctctccagtttgggtgtctgagtgatcattcaacagtgcattattaatgtttgtttatttattttttttttggtgagacatagtcttgttctgtcacccatgctggagtgcagtggtgtgatctcagctcactgcaacctctgcctcctggcttccagcaattctcctgtctcagcctcctgagtaggtgggattacaggtgtacgccaccatgccagccttttttttttttttctttttttgatagagacggagtttcaccatgttggccaggctggtcttgaactcctgaccccaaatgatctgcccgtctctgcatcccaaagtgttgggattacaggagtaagccactgcacccggccagtgtttattgttcatttctactttttctcgcctttctttgtttctgtcagggagaaacgattcatccttatgcacatagatgccttaacctgacactgaagtttgtttcattttttgttttctttcttttttgagacagggtcttgctgtgttgcccaggctggggtgcagtggtacaatcatagctcagtgcagcctccaactcctgtgctcaaatgatcctcctgccttagcctcctgagaagctagaactacaggcgtgtgccaccatgcaggctaattttttttttatttttgttttgtagagctagagtttcatcatgttgcccaggttggttttgatcacgggagtgatcctcctgtggtggcctcctaaagtgctgggatgacagccactatggccagctggtttgtttcaatttgagtgacaaatttaggaatcagggctccagcttttcactgcagacatttattgtgggtcatcttccctaaggcactagcagagggggaatgggccacagcagggctgcagccacggtctccagatattgcccagcctgtccagctgcagaggaactgggctgagtgtccgctggtgttcccgcatcacctgctggactcgttccatcacctgatagaacacgggctctgaggctggtgtgaggatgtgggtctcagaagggtctcttgagaggtcaaagagcaaaggtagatcgtggtggactactttttccccaaagcacaggcagacctttcttccatagcaggcaccggctccctctggctggaacacaggcgtcacaaagtggagttccacattgttcctcctggtggaaagataataattacagagttggcatagagaaatagggtgccttgctggtgaatggcatcttcatagggctaaaaggtaatttttcttttttttgtgcaagagtcttggtctgtcacccaggctagagtgcagtggtgcaatcttggctcattgcaacctccatctcccaggttcaagtgattctcctgcctcagcctcctgagtagctgggattacacgtgcctgccaccatgcttggctaaattttttttttatttttcatagagacggggtttccttatgttggccaagctggtcttaaactcctgacctcattatgtgctcaccttagcctcgcaaagtgctgggattacaggcatgagccattatgcctggcctccattaaaaaaaaaaattaaaattagctcagtgtggtgtgtatgccatagtactagctactcaggaagctgaggttggaattgcttgagtccagggggtcaaagctacagtgagctatgatcatgccactgcactccatgctaggcaatagagtgagaccctgtcattcatagatagatagatacatagaccagatgggcatgcactcacacccatagtcccagctactcaggaggctgaggtaggaggatcacttgagcccaggagattgaggctgcagtgagctgtgattatgccagtgcactgcagcctgaggaacagaggaagaccctgtcattcacagatgatatagatagatagataaccacagataaatatcattcatagataagtagatagacatcattcacagatgatagatgatagatagatagatagacagacagatagatagatagatagatagatagatagatagatagaccggatgggcatgcactcacgcccatagtcccagctactcaggagactgaggtaggaggatcacttgagaccaggaaattgaggctgcagtgagctgtgattatgccagtgcgctgtatgcagcctgaggaacaggggaagaccctgtcattcacagatgatagatagattagatagatagataggtagatagaccacagataaatatcattcatagataagtagatagacatcattcacagatgatagatgatagatagatagatagatagggatggatggatagacagatggacggaaagagatattcacagataaatagaaaactatcattcatagatacatggaaggatagacagatattcatagataaatagataaatataattcatagatggatagggagatgaatgaatggatggattatagatagatagatagatagatagatagatagatagattaattagagtgactgatatgcagtcacgcctataatccagcactcagggagtgtgaggtaggaggactgcctgcatacaagagtttcagataagcctgggcaacacagcaagaccccacatctatttaaagtaaaacaaaacaaaacaaaacaaaacagaaaattgtggccaggtgtaagtgctccaaattaagtacagttggttcacatgatgggtgatggatagttaacagtggaggttcgtgtgagtgcagttcaggggatttggttttcatcccagaagcctgcttgagaaggtaatatttgacttaggacatgcacatcaacagtgagccagccatgtggaggtccagtcctctgagtgcattccatgtggttggaattgttcgtacaaaggccgtgaggcagcgacaagacgagcctgtcctcagatcactgggctcgggacagttggagcttggacattgcagagctctggttatcaggagtaaggtttcagaggtagggcagggctgaagtttcagaggtagggcagggctggcttcagaaataaggtattccaagctccccacaggaatttggacttgccatgaacttcatgcagtggatcattttggggatgcactcagcaggcacaatagccatgggatgagcagtggactggagaaggccaatcagagcagtattgaggacacacaggcagtagaaaggcactctccatctgtcgacctccaaaaaaaaaacattatccaatgaccaagaggagacaggtgagtaatgcacagtcatggtgtcaaggaacccagttatctgagctgttgagcagaaacaatggtaggtcaggctgtgctattgatgaaaatgtttttaaaaacttaaaaggcaacatctataatatgtaatttaaaaaatgaaaaatagtggaggccaaggcaggcagatcacctgaggtcaggagtttgagaccagcctagctgacatgatgaaaccctgtctttactaaaaatataaaaattagccagacacacctataatcccagctactagtgaggatgaggcatgagaatcatttgaacctgggaggcaaagattgaagtgagtgaagatcataccactgcactccagcctgggtgacagagggaaactccatttcaagattaaataagtaaataaatacataaataacaaaaaatgggccagatgtggtggttcatgcctgtaatcccaatactttgggagggcgcagcaggtggatcacttgagcccaggaggcagaggctgcagtgagctgagatcatgctactggactccagcctagatgacacagtgagatgtcatctcaataaataataaaaatttaaaaaattaaaataaacataaaagtaaataaaaaaccaaaaatgtagcaataaaacaattccagattaggctactaattgaaagaaggttgggtggggtggcttatgtgtataatcccagcactttgggaggctgagggaggaggattgattgagcccaggagtttgagaccaacctatgcaacatagtgagataccacctctagaaaaatgaaaagaaattaaaaaaaatagaaggaaaaagtaggttcagggcattcaagtggttcaagttcaacttattataaaaaatatacaaaattagcctggcgaggggatgcacgcctgtaatcctagttactcaggaggctgaggcaggagaatctcttgaacaggggaggcagaggttgcagtgagccaagattgagctgctgcactccagcctgggcaacagaatgagactctgtctcaaaattaaaaaaaaagaaagaaaaggaagagagactaagaaaaaaaaatctattgtaatgccatcaaataaaagagactgtaaatgatatttttttggccaggcatggtggctcatgtctgcaatcccagcactttgggaggccgaggcaggcaggtcacctgagatcaggagtttgagacccacctggccaagatggtgaaaccctgtctctactaaaactacaaaaagtagccaggcacagtggcaggggcctgtaatcccagctattcaggaggctgaggcaggacaataacttgaacctgggcgacagaggttgcagggagccgagatcataccactgcactccagcctgggtgacagagtgagaagctgtctttaaaaaaaaaaaaattgcttgctgtggtggcaggtgcctataatcccagctacttaggtggctgaggcagaataattgcttgaacctgggaggcggaggttgcaatgagctgagatcacgctactgcactctagcctgggtgacggagcaagactctgtctcaaaaaaaaaaaaaaaaaattcactgttgattcagacacctggagatatctagacaattcttttgagaaatctttagccaactgaatcataagaggatacagatcttatcaaaccttggaaaaagaccaaagaaaaccatgtctgtcaagcaagtccagaaaagatgaaaaacatcaagacaagacaaagctacagaaacggaagcataaaggaaaaaaagagaatttgataaagtcaaacaggtagaactctcttgtctgaacacaaagatagaagcggaaatcaatcatttataaaattaaagaatacaattgttaagtaaatccaagagctggatttttttaaaatgacagagaatgacagaaagatcctataaagctctggtaaacatagccatacatatacaagcaattaaaagacaatgaaggccacgaatggtgtctcaagcctgtaatcccagcactttgggaggccaaggtgggcgggaggatcacttcgcctcgtcaggagttcgagaccagccactgcactatagcctgggtgacagagtgagactgtctcaaaaactcaaaaataaataaataaaacacaatgaagtccaggtgcagtggctcatgcctgcagttccagcactttgggaggctgagacaagaggattgcaggagctcaggagttcgatgccagcctaggcaatgtagggagacccccatctctatgaaaagtaaaaagttagctgggcacggtggcatgcacctgtagtcccagctacttgggaggctgaggtgggaggactgcttgagcctggaaggcagaggttgcagtgagccaagatggaaacactgcattccagcctgggggacagaacaagactgtctcaaaaaaaaaaaaaaaagaaagaacaaaaacaaacaaaaaaataatgcaattacttaacaagaggacaagttcttaatgaaataaatacttttttaaatatgaagaattaactaaatagagaaatgtagcatatttcagtgtggacagacctagtgttttaaaggtaatgaaccatcaaatgcagagatgattaatacttctgtggcattttttttcttttttaaacttgcaaatgatttcatagctcttttgagaggacattggagtcaaaagaccaagaaaatttagggaagcaaaaagtattcagtaagcatgtgtttgtttatattacaaagttataattgtttacaaagaagatgaaattgtgttaaggtcaggtgggtaaaacatttggaagcacatctagatgcataaaatggactacaaaaggctgggcatagtggctcacacctataatttcagctttttgggaggtcaagatgggtggatcgcttgagcccaggagtttgagaccagcctgggcagcatactgagaccttgtttcagtttaataagaaaaactggaggccaggcatggtggctcaggcctgtaatcccaactctttgggaggccaaaagcaggtgggtcacttgaggccaggagttcgagaccagcctgcccaacgtggtgaaaccctctctttactaaaaatacaagaagttagccaggtgtggtagtgggcacctgtaatctcagctacacaggaggctgagtcaggagaatcgcttgaacccaggagactgcaggtgcagtgagccaagatcacgccaccgcactccagcctgagagacaaagaaagactagtgtcaaaaaaattattacaaaaaataagaaaaaaagaggattagaaaagtcttgaacacatgtgtgtgcaagcatgtgtgtgtgcatgtgtatgcatgcacatacatgtgtgtgtgatgataaaagttgcacttcatacagtgcagggaaaaaaagaatgaaatacagaccatacaaggtgcttaaactacaggtaacaacccccttcccattgttttaagacgattgacaggtgatctcagaaggcatgtcactggaatgagaaggatacatattgacaaaaactaaattttaaaagctcctggagaaaaacagaagtgtggagacatggagatggaatctggaatgcagctccattcccagcctgttctagggcatggtgctttcctgcagagagggactctttcccaaagagtgttaggaaggggctcccctactcactgtcccattgatgccgcctggctgagtgcagaaacttctcacagtaatgcatcaggaatcgtggtctgaatgctgggctgtcaccagaagcaagggcagaaggtcctggctgtcaatcacaacgcaggaaggaacatggcatggctcagggttggaacagggactttggacatttgtccctccagcatccatcagtcccagccccaggtgctgcactctccttatattgtatcagtggagggaaagtctgggtgtgaatgcagatggatggaaggcatgtgtgtgcgttagcacgcttagaagaagcatgcagcagctactcacgttagtcatcaccaaacatcacctgtttgtttaaaagtaattaattggccgggtacggtggctcacacctgtaatcccagcacttctggaggtcaaggtgggtggatcaccagaggtcaggagtttgagaccaccctggccaacacggtgaaaccccatctcaactaaaaatacaaaaattagccagttgtggtggcacatggttgtaatcccagctactagggaggctgaagcaggaggatcccttgaacccaggagggctgaacccaggagggttgcagtgagcctagattgcaccactgcactccatcctgggtgacagagtgagactcggtctcaataaaaaaaagaaaaaggaaaaaaagctgaaagacccaggcccttatacaaaggctggaatctaacaaaagcccaccaagagtttggcccagtgctctcctaggccttgaagcatgacaagacaaggaaggaattcttaactggacccatttaggatgaagttttattgggggtctaaaggaactccccaaacctccatgcttagcagaagacaagataagggtaatcaccccagcacctggacccatttagattaagtcaatttactgaggctccagaggaaggtcctcaggactcagaccttagttacagatgaaaggaaattgaattacgtatgtatttacatgaaaacacacttacatgtggacatacagcttagaagatatagaagctctggaaaactttgtaatttggagttggtctagtgatcatttccagcccttctcccccgtatctggttacagaaataaaactcctttctttcctctttcatttgcatctcgttattgggccatgagaataagcagcccgaccctcggtttggtcggggaacaatttcagggatgccttactgcaaagccaaggtgacattttcatttgccacaagtgttgctatgtctgtgcaaagctgaattgtttctttgggttgttctgtacctgtcctggggcacctcgccgcccaccagctggaccacggtggggaacacgtccatcagactcgtgggctcgccaatcactcggctggctgggagcaccccgggccagcggaagatcccaggcatgcagatcccaccttcccatcctcccatgcccttcccacctgtgtttgaacagaaacaaaagaaagtggttaaaaaccagaaataaatgctcagcttgggtgatttaacctttctgcttgtttcacttgttttaagtttctctccccccgagtatctcaatttctctctctctctttccccctctctctctttctctctgttttagtgacattaaaacattcaatctcatgtagttcccctttagaggtttgattttatattttttattaaccttgttgttggttagtgtgcattggtttaagttgggtccttcactgcaaatggctcttgtccttataagagtcctcattccatagaggagaaggccatgtggagatggagtcagagacaggaatgatgtggccacaagcgcagggacgtctggaacccccaggcactgggagtggcaggaaggatcctcccctagagcctcaagaagaaagtggatacaactgcaatgtattgaatggtgaccccaaaacatgttcatgtcatgtctcccagagcctataaattagactttatttggaaatagggtttttgcagatgtaatcaagttaaggaccttgagataatcctggattagggtggccctaaacgcaacgacagatatccttctaagagacagaagaagagacacagacacagaggagaaggccacgtggagacagaagcagagactggagtgatgtggccacaagcccagggaagtctgcaacccccatgcgctgggagcggcaggaagaatcctcccctagaggctcaagaagaaagtggatacaactgcaatgtattgaatggtgaccccaaaacatgttcatgtcatatctcccagagcctataaatgagactttatttggaaatagggggtttgcagacataatcaagttaaggactttgagacaatcctggattagggtagccctaaattcaatgacagatgtccttctaagagatagaagaggagacatggacacagaggagaaggccatatggagatggaggcagagactggagtgatgtggccacaagcccagggatgcctggagcccccggtaactgggagaggcaggaaggagcctcccctagagcatccagaaagaagtggattcaattgcagtagattgcagtgtagtcctcctaaaagatatatccacatcctgatttccagattatgtgaatgggaccttattttaaaaaaggggtccttgtagatgcaattaatatctcaagatcatcatggagaaggatggactctaagtctaatgacagcattctaagagacagaagaggagacacagacacagaggagaaggccacatagagacagaggcagagactggagtgatgtggccacaagctcagggacacctggggcccccaggagttggcagaggcagggagaagcctcccctagatcttctggagggaacatttccctgagaaaccttgatctgaaactcttgatctccagggctgggacaggataaattcctgttgcttaaagctcccccagtttataatactgacattcttcatggcacagaaaaccagactgggtaaacaatatattaacatcaatggcaatgaggtaaagaaggtttctgagcagtcaggctttcgatgtgaagttgttttgggaaggcattagtggatgtagttggcatttatatatcccgttttacatatgtactagattggtggatccatctacttcaaagcaaatatacattgtaggtatacttgccaacattagcccaaaaagactctttcaaggactgaaaaataaagctctctaagcagggagaagacaaaatgtgtaagcacaacagtgtgaagtcttgtacatggggcagcacattttagaatctttgtggtacacgaaatattggtgtgtttggaaacaatggaatacaggtttgaatataatgtggccagctaggtgtccacccttcttcctttttttttttttttttttttggagacagagtcttactctgtcacccaggcgagagtgcagtggcacaatctcagctcgctgcaaccttcacctcccaggttcaagcaattctcctgcctcagcctcctcagctgggattacagatgtgggccatcatgcctggctaatttttatatttttagtagagatgaggtttcaccatgtgggccaggctggactcctgacctcaagtgatctgcctgcctcggtctcccaaagtgctgggattacaggtgagagccactgtgcctggccttatccttcttggatgcattgtttgaagataaaattcaaacctgagtccacacaatggaatatattcagccatggaaaggaatgaaacgtttctacaacacagttgaacctcagaaacatcatgctaagtaaaataaaccattcacaaaaaaccccacatattgcatgatttcatttacataaatgtctagagtaggaaaatatatgatgatacaaaataattttgtggccaggtatggtggctcatgcctggaatcccagcactttgggaggcccagctgggagaactgcttgagttcaggagtttcagaccagcctgggcaacataacaagaccctatctttacaaaaaataatttaaaaaattaaataataaacaaaccaaaaataagtttttgggtgatggatgttagcacaggggaaaagggagtgactgctgtgagtacaggatttttttgtgaggtgatgaaatgttctgaaaatacacagtggtaggccacatgtggtggcttaacgcctgtcatcccattaccttgggaggccaaggtaggaggatcacttgaggtgaggagttcgcgaccagcctgggcaacatggcaaaatcccctctctacaaaaatacaaaaatagcgcacctgtagtcttagctatttgtagtcactgaggctggaggatcacttgagcccaggaggcagaggttgcagtgagccgagactgtacaactccattccagcctgggagacagggccagactctgtcttaataaaaataaataataataaaaaattttaagaatgaaaataaacagtgattgtaaaacaaaaatgaaattctgaggtccctcaaccatctgaatggacttcctccttagtcagagctcttttttttttttttttttgagacagagtctcgtattgttgcccaggctagagtgcaatggcacgatctcagctcactgcaacctccgcctcctgggttgacgtgattctcctgcctcagcctttcgagtagctgagattacaggcacataccaacacattcggctaattttttgtatttttagtggagacggggtttcactatgttggccagaggtctcaaactcctgacctcgtgatccgcctgcctcggcctcccaaagtgctgggattacaggtgtgagccactgtgcccggcctagtcagagctcttttaaaatttaacctaagagactgtttcaggccatgatgggaagcaggggttgaacatgcctcatgatacctctctggtattaacatccacacagactttaggtctgataagaaacattgtctacctcttctcctctctgaagcctagtacctgaaggcttcttctgcaaataagaacttgggcctccacaatctttattttattttattttattttgtttttttttgtgagatggagtcttgctttgttgcccaggctggagtacagtggcgacatctcagcttactgcaacctctgcctcctaggttcaagcgattctcctgcctcggccccccgagtaactgggcttacaggcacgcaccaccacatccagctaatttttgtatttttggtagagatggggtttcaccatgttggccaggctggtctcaaactcctgacctcaaggccacccgccttggcctcccaaagtgttgggattataggcatgagccactgtgcctggcctccacaatcctttatattaaactgaatatttctcttctttctttcttttctttttcttttcttttcttttctttttttttttttttgagacagagtctctctgtcgcacaggctggagttcagaggctcaatctcggttcactgcaagctccgcctcacaggttcatgccattctcctgccttagcctccccagtagctgggactagaagcgcccaccaccacagccagctatttttttttgtatttttagtagagatggggtttcaccgtgttagccaggatgggctccatctcctgacctcatgatccaccctccttggcctcccaaagtgctgggatgacaggtgtgagccaccatgccccgccaaaatcagccatttctttctattgatcccaggtctttagagaaacccaacccctctggctttgagttgttccagctttctggaccaaaccaatgtctttcttaaatgtatttgattgatgtctcctgcctccctaaaatgtataaaaccaggctgcaccctgaccaccttgggcacatgtcttcaggacctcctgagggctctgtcatgggccatggacactcatatttcctatttggctcagaataaatctcttcaaatgttctacagagttcacttctttttgttgacaggacataggcatgcgtagaagaaaaagagatgggagcatacagacttgttgggttttggcctgtgagtaaccagggcagtgacctgaccacttttagaagtgcccaatgtacttcttacgttattgatcaatgtctcatatcttcctaaaatgtataaaatcaagttttgccctgaccaccttgggttcatgtcaccaggacttcctgaggctgtggagcatcagcttccacacatgcatggagcatgtgtctgtcatggcagcatcctcaatcttgacaaaataaactttctaaatcaacttagagctgtctcagatttttctgggttcacagctttaataacaaagtgaaaaatgctgatcacaggttgtgataaaagaagacaaagccatatacactatgtgatatggatgatctagtgtatttatgtggacacaaacaggaaaaaaaatcaagtaaataaatggtcaagagatttatttatggtggctaggaaaggagatttggtgtcttttcttcagatgtcaggtgatgttcaaaagaaatgcattcttgtgatgatttaaaacagatattatgctaaaaagcataatgagtgtgtattgatttagtacatatataactttaatgaaagcaaaaaaggagagagagaaaaagtcagaaaaagaaagaggcagagagaaagacaaaggcagacagaaagagggacagagagatggaaagagagtgagaaagagagaagaaaaccttccaaatagtaattatttacagctcaaatagaagaaatacaaatataaatatttctagaaatacaaataagctagatgccaaaaagcattggataaaattcaatacccctttcctgataaaaactctcaaaatcctaggtatagaaagaacatagcccaacacaacaaaagccacatgtgacaaagccacagctagtatcatactgaatagggaaagctcaacacctttcctctaagatctggaataagacagggatgcccattttcaccactttatccaacagagtactagaagtcctagccagagaaatcaggtaagagaaatatatgaaggacatctaaattggaaaggaagaagtcaagttatctttgtagatgatatgatcttccatttaggaaaaatactagggactcctgaaaaaaaaagcttttggaatggatgaacacattcagtaaagttgcaggacaaaaaatcaacgtacaaaaagcagtatttatctttctacgccaacgtcaaacattctaacgtaagaataaattagctaaattgattaaataagacaagaggaggttggacccggcagctcatgcctgtaattccagcactttgggaggctgaggtaggtggatcacttgagcccaggagtttgaggcctgtaggggcaacatatcgagacccggtctcaatttaaaataaagaaaaaataaaaaaattacagacaagagtacataacactgaattgctacatctccaataattttctgtctgttgaagagaaaaagacctcagatgtcacctgtgctttgtttagaaaacaggaggaagggataaggtgtatgccttgctcataggtttttttgtttgtttgtttgtatgttttaccctagagagcacacacaattctaatattataaaagtaatagcaaaagatacaactacttttcaccaacctaatagcatctttaccgggaaagagactgatttaaaattgtacatggagagaaaaccaaaggagcattttaataccctcagctttgctttctgacctacaatgacacactgccaatgttcagaaaacaataaatacaggcaaaatactgtacaaatagatgttaattacatatcttcctaaaatgtataaaatcgtatcttcctaaaatgtataaaatcaagttttgccttgaccaccttgggttcatgtcatcaggacttcctgaggctgtggagcatcagcctccacacatgtatggagcatgtgtctgtcatggcagcatcctcaaccttgacaaaatagactttctaaatcatcttagagctgtctcagattttagaaaacccaaaaccaccagaaaataggggaagatggtttgcagcaatgctgcccagcaatagtttatctctgggtgtagagctttaggaaaatgttctttttctaatttttcttcttcttcttttttttttttttttttctgtttttagatagggtcttgctgtgtcacccaggctggagagcagtgatgcaatcatagctcattgcagcctcaaattcttgggctcaagcaatcctcccacctcagcctcctaagtagctgaaactataggcatatgccactatgcctggctattgtttcttgtttgtttatttattgtttcttgtatgtagaggtgggatttcctctcctactcaggctggtctcaaactcatgggcttaagcgatatacccgccttgacctcccaaagtgctgggattacagacctgagccacggtgcacggcctaatttttctttctcccacaatgatatgtatttataagtaaaaagatgaaatttttttcatgaatcaaaaagttaaataaataaagggatggtgataaaagccttgaatgagtttaattttggaaactgtgacattgagatgacccagagcattaggcctacccaaggcctctcctgcagattagaaaacagattccccttctccaggaaagagctacattcctaggcccgtaagaaagtaggtacttttctgctttataaaaacaatctgggcaattattctgagacagaaaagggaatgggaaactctttgttcaccacactaccttatgcctggggatggagtcccattcaagcacaaatgaacattcacaggactcacctctgctcctcgggcccctcctgaatccccaatcaaaggttctctcccaaaggaagcaaacgtgaaggcagagagcactcgcacaaggctttgagctgggaatgattgacttcgagtttgtttttcccaagtcagaagatcagagagagttaggacagacagagcagactccccccacatcgcagcatgggggaatctcaaagccacgcccacgtctaccaaaccagtggtcagtttccttaggtttttattttgttttattttttgtagagacggggttttgccatttggcctaggctggtctcaaagtcctgagctccagtgatctgccctccttggcctgccgaagtgctgggattacaggcgtgagccaccatattctgccagtgtccttaggtttttaagtgattgcctatgctgttaacacaggctgctggctatagtatgatcatatccagcctggcatggtggctcatgcctataatcccagcgctttgggaggacgaggcaggaagattgcttgaggccaggagtttcagagcagcctgagtagcaaagcgagacatcatctcttcaaaaataaaaaaattaggctgcgcattgtggctcattcctataatcctagcacttcaggaggttgaggcaagaggattgcttgagcccaggacttagagacctgcccgggcatcatagcaagaccctgtctctacaaataataaaacaattagccaggcatggtggcatgttcctttagtcccagctactcagtaggctgaggtgggaggattgtttgagcttgggaggttgaagctgcagtttcactacggcctgagtgacagagcaagaccctgtctcaaaaaaaattgtttttaaaagaagatatctgtttaatggtaaacgaagtaaataagaaataataaagataaaaagaaaaaagaaaaacaatttaagtaaacaaaacagcaacaacaaacaaaaagggtcgagcgcggtggctcacgcctgtaatcctagcactttgggaggccaaggcaggcggatcacgaggtcaggtgatggagaccacggtgaaaccctgtctctactaaaaatacaaaaaattagccgggtgtggtggccggcgcctgtagtcccagctactcgggaggctgaggcaggagaatggcgtgaacccgggaggcggagcttgcagagagcggagatcgtggcactgctctccagcctgggtgaccgaatgagactccgtctcaaaaaaaagaaacaaaaagaaaaaggcgggcgtggtagcttggctcatgcctgtaattctaccactttgggaggacgagttgggtggatcacttgagcctaggagctccggaccagcctggccaacatggtaaaaaaaaaaacacaaaaattagccaagcgtggtgtcgcatgcctgtaatcccagctgctcggtaggctcaggcaggaggattgcttgaacccaggagtgagcagttgaagtgaggcaagacggcaccactgcactccagtctgggcaacaaagcgagactctgtgtcaataataataataataatgataagataaaaaatataaataagcaaaaaagaaaaagataaaaaaaggattattttcaagcaatgcttcatgtaaaaaaatagaaaagatgggctgagtgccatgcctcacacctgtaatcccggcactttgggaggccaaggtgggcggatcacctgaggtcaggagttaaaaaccagcctggccaacatggcaaaaccctgtctctactaaaaatacaaaaattagctaggtgtggtggcacatgcctgtaatcctagctagtggtgaggctgaggtaggagaatcacgtgaacccgggaggcagaggtttcactgagctgagattgtgccactgcactccagcttgggtgacagagtgactgcttcccaaaaaaagaaaagaccaagaccaagagggcaggaagcagtttctgaggcactgcatgatcattgttgggaagttactctatggaaagtaaccctatgcaatggtccctattattcaaccatccatgacctacaaggacagggtttcatagagttccacctgccgtctcttcacaacttcatgtgcagccatatgctgggtctgtgaaaagtcacatagcctaccttatgtgggggtggaaactactctacttctaggatgaggagctgaaacgctggcacactctggactgactcatttttacaagtaaacggttttgatggtgtgtctcaaaattagtattaggagggacatcagaaatgcttcttttccctgccacaggtgtgtgccttaatggtaattgcttttactttgtgatttttggcaacaaatcttaaatcatttcctcacagggggcctaaaggaatgttttcacttatattttaagttatctattcatatttattatatataatatagtataactttttgtttttttgagatggagtctcaccctgtcatccaggctggagtgaagtggtgctatctcagctcactgtgacctccacctccctggtttaagcgattctcctgcctcagcctttggagtagctggggttacaggtgtgtgccaccacacccggctaatttttgtatttttagtaaatgtggggtttcattaagttggccaggctggtctccaactcctgacctcaggtgatccacccaccttggcctgtcaaagtgctgggattacaggcgtgatccactgtgcctagctgcataatttttcattattaaaatatgcatgtttttctttgtaaaaataaataaaatagatataaaaacatgcttttaaacatatatgtacatatacctaaatgtgtacatatatgtacacatacatataaatacatgttataaatgcacatgtaaatataaatgtataacatataagcatatatacatatatgtacatgcttatgttcacacatgtgtaaatgtacatgtatataatgtatgtacatgcatgtagataacatataatacatatatccataacatgcacatgcatgtttacacaacatatacacatacatataaaacatgtgtatatatatacataacattaatatatgtacatttttaaataaaaatgtttatatgtgcatgtatagtacacatatatatataaaacatacatatatacattatgtatatgtacatcatttttcaaggaaaagcatattatgggctgcttctgacttgcctggggaacatgactggttgtatttgttttatctggctggtatattggtgtctaaataaacgaccctcagtcattgttaaaaagtcatatgacgtacggttagatatcaagtctgtggcctaactctgaagtgatgtatttctctatttagtgacacaataaaagcagatttttcttttccaaagaactctgcactttaacctttagaatgttacacattttgctccagattgagtttttgctactgaataaaactttctattttttattctaaagatacaagatatcttcagaaagttacaagaggctgggcatggtggctcacacttgtaatccagcactttgggaggctgagatgggaggatcacttgaggctaggagtttgagaccagcctgagcaacatggcaagatcctgtctgaatttaaaataaaacaaaatgataaaatatagaatgcaataaaatataatacaatacaataaaaagaaagataaaagaagcagatgaggaaacacccatgcgagactgacaaggtagcctttgattctcttccagggagaaggaatcacaaccttccattcctgccctgatctctagccctgggcagtaagcctgtcttcagcgctttgcctgggccctgttcccaaacccaattttgcttttcatctccagtatctcctcaacgttcactgcatgtaccttcagcatctctaagacaagaatctagtgtggatgcaatgcctcccatttggtacatcttcccttgttgatttttcttacacattacgtttagaaatctcccatgtaaaatatgtacttgacattttcattgattattattattattttgaaaggaaattgcttataaaacattgacagaaaagatgcagtttgaaaagacgcagtttggcgcaaacgagtgttctgttgagaataagccgtggagcatctctgcaggagcaaaagcttgcctgtaagaaaaagcccaagaaagtccagttacctgacatgcagttctgtcagggccaggccagctggatttagcagggaggctgctcctcagaagaaacgtcttcttccagccaaaacagacacgcactggctgttttggcagcactgaacgtctgggtcacacatgtgcacagttgattcagtctgaaaagcaaaaacaggaattctggagaaaccaagctaggttatcccaggaacagatcaggcaagtccccaaggaatgtactgctggctctctgaggcatccataaaagaccctctgtaggggtgatcagacccaacatgaggtcgtgggggtgacaaagtccagcagagtcaaaggaatgagaaaaagatagttggagagagaaagtgggacgagggggccattgcaagtgtggaggatgcgaaggccctgagctctgggagcccaccctatttattgctgctcaaacaaataaacaggtggtgaggatgtgggggttgaaaggaaacagtgtacaaatgaatgagaaacatatggctgcttgagataatgggagtgctagaagcaaggagccagcaagtctagcagaaatgcaagccctgcctcagcttctctcccaacactcagcttttctcccaacatgccccccttctctttttcataaaaaccaccacagctgtcattattattagcataaggtggccttttttaaaattaattgagcaaggcaattgcaggctgtgtagccttaattgccggttggtgatccagcttcatttttcttagaccttattcaaaatggagttgctctggtttgaacgtttcctacatatctcccctttcccttttacaagagaacctttaatgttagcggtttcaggaggatgaaggtccatcttctataacttcttcttgctgaataggggtgatgatactcttgcctgcctattagggtctcttgtattcacggtagagaggagttcagttaaaaagcattgatcagttaagcataggtaaaaccctggcactccagtagtttctcagcatggcttggtgaacctggtccgtggttgggatccatgggtccttccagtcccctgttccatggttgtacacatcttgagggcacctacatggtttgtgtctcctgcaaaaacacaagcatactttcacccccatgttagtaaatctactgaaacagaagcaaaaacttttgtggctgtagccaggaggcatgccattgttgaagcatttgtaactcagcctctgcctctttggttaattaccatgggataaaacttaccattgataatgagaagcaggccccttctggcaaaaagcacagagaacacaaattgaggcttaaaagcaatccttaaacctcttcaatttgcactgtacaggtggatccactagatgctgtgattcatggtagatcttcagacgtttggtgggcacccacacaggtacctgattgtcacctggagagacaaaagcaaatcctcttccccataaaattatctttccttttccccagctctttgtatgttcatccctccaccatatatcttgtccagcctttttcttatccttttgtcccatcaggtgttgttcagctgcagtcatgggttgatctttttgtaaattaaaaaaacttaatgttaataaagctaaatgcaattgcatatgtggtgtcttatattcctggtcccctcccttttgcttttgtatttgagttgttaaagtacgattagctctttccagtattgcttgtgcttgtgagttatatggaatacccatagtattgagaggtgaagccagctgggcttctgggttgggtggggtcttgaaggacttttgtgtctagctaaaggattgtaaatgcaccaatcagcactctgtgtctagctaaaggattgtaaatgtaccaatcagcactgagtaaaatggaccaatcagcaggatgtgggtggcgccaaataagggaataaaacctggccacccaagccagcagtggcaacccgcttgagtccccttccatgctgtggaagctttgttcttttgctcttcacaataaatcttgctgctgcttactctgtgggtgtacattacctttatgagctgtaacactcactgcaggggtctgcggcttcatccctgaagtcagcgagatcacaaacccaccaggaggaacaaacaactctggatgtgccacctttaagagctctaacactcaccgcgaaggtctgtagcttcactcctgaagtcagtgagaccacgaacccactggaaggaagaaactccaaacacatcagacgagatcgggcacgtttagggtggtacggcagtagactccaaacacatctgaacatctgaaagagcaaaatctggacataccactttaagaactgtaacacacaccatgagggtctgcagcttcattcttgaagtcagcgagaccaagaacccactggaaggaataaattctggacactgtatgggtaatgttctattgttgaaaaaatatagccatggctttacaacagtatcctgggctgttatcggttttgattttttctgggattcccataactgaaaagttagataaaaggtgtcttttaacatgagctgtagcttcccctgtttaacatgtggcccgataaaatgtcaataggtatctactgaaacatgaacaaaggacagttttccaaaagcagaaatatttgttacatccatctgccaatggaatttggagattaacctcttgggttaactcctgttccttgatgtggctgatgcaggacttggcaggcagaacagtgttgcacaatttctttagaacagtaaaagcaaatttttcataatcttgggcagctagaggaatggtaaaaaaagcaatactttagatctattactgagaggccactatttaggcatcattgttggggagggcagcctggttgtgagaggtgaaactggctgggcttctaggttgggtggggacctggagaacttttctgtctagctaaaggattgtaaatgcaccaatcagcactctgtgtctagctaaaggtttgtaaacacaccaatcagcactctgtaaaaatgcaccagtcagtgctccgtgtctagctaaaggtttgtaaaagcaccaatcagcactctgtaaaatgaactaatcagcactctgtaaaatggaccaatcagcaggatgtgggcagggccaaataagggaataaaagctggcctcccaagccagcagtggcaacccgctcgggtccccctccacattgtggaagctttgttcttttgctcttcacaataaatcttgctgcttctcattctttgggtccacactagctttatgagctataacactcactgcagaggattacagcctcactcctgaagtcagcgagaccacaacccaccaggaagaatgaacaactccatatgcgccacctttaagaactgtaacactcaccatgaaggtctgcaacttcactcctaaagtcagcaagaccacgaacccactgggaggaatgaacaactctggatgtgccacctttaagaacccttaacactcactgcgaaggtctgcagcttcactcctgaagtcagcaagaccatgaacccaccagaaggaagaaactctggacacatctgaacatctgaaggaacaaactctggacacaccatctttaagaactgtaacactcaccgcaagggtctgcagcttcattcttgaagttagcaaagccaagaacccattggaaggaaccaattctggagacagttgtagcacaaccatgggttgaatcacaggattaacagcccttaaatctgttaacattttccatttccctgatttttttcttaatgacaaatacaggagaattccaaggggagaaaacaggctctgtatgtcccttttgcaattgttcctgcacctgttcttttaaagcctccagttttttctgtctcagcggccattgctccacccaaaccttggcagttagccaaacaggaatgggagttggaggcttaacgaaaaatgataccacaatctggtccaatctgttggcccttttaattctaaagattctgattggccaattatcattttatagtccttttcccaggtgatatcccatatttttcatcatttgtctactattattactctactgatccataggaatagaaatttcagcatcccattgttgcaataagtctctacctcataaattaacagaaatagatgtaatgatagcctgaattgtctcttcctgaccatccagcccttgacatggtaaaatcaaggaaaactgaaaaatttctgaggcagcttctactctaacaatactgatggttgccttttgcttaggccagtgccagggccattgatttatagcaatactagagacatcagctctagtatgtactagtccttcaaaatattttccctgaatagttactgtgcaaataggtcttttgtcagacacttgattaatccaatacacagcttttcctgcgggttaagtattaccaaagcctcctgtttttttcattgtgctgcttcctagtttcatgtaaggtaacagcaacaactaagcaattctttcccctggagaggcagaccacagatttgaggaactaataattaattgaatttctctggtatagtgagagtcaattaatcccttatgcacagtaacaccttttaaatttagactagaacttccaagaaataaactgactgttcctgagggtaagggtccgctaacttctgtggggaccttctctggtggctccctaggaagtgtgaactaaaaggtgagttacatacatgtttacaaaacacaattggacattttccattattttgagataaaccaaaataaactttaaagtttcatttggagatttaaaagctgaaaatactttcagcaaattcttagatcttaagaaagtatatatagtccattgtctataaaatcatttgcctttttgatctaaaaattttaatacttgaatttaataggtttttcttctggaaaagttctttggcattcaagtaaaatcgatattttcagagtagtcacttgcatcacactggaatgactgctttaatttctaaatcataagttagtgtaacccagggatactgatggccttgatacataatttagtcttgttactatactgtgtggtaataagggctttggggggcatcatctgaccccatttctttttaccacaatggttcctgctacaatgtcataggctattcaattatgcggaaaaaacagcagtgtgatgcaatcagggaaaaaagaagctatacaaaaatttttgatcaaagctcatatagcagacattgtaatgctaacagttgaggaaggaatcactaaaacctgacttggtgcaataagcactactaatatatcacatgtcacaactcgaagccccagcaggaacttccctggggtagatccacctgctccccaaatgcaaattatctcataaaacaaacaaataatctgtatataagagccacaaccattattttctgcaagtcttccattgatctgtcttcatctatttcttccattatataatgcatagcaaacttagagatatcatttatcccactgaggtgcataatgcttaagacaattgttgttttcacaaaggaaagaataaagaaatccatcttctctgtcataaatctgtggcccaaggatggaataatgtattctctgcctgcctgtcaccgagggtcacttgggcttctcaaaggggctgtagatcctcccttcatcactggagtggcctggactgatggctacacatgaggagcccagggtcccaggcctgcaactggagcaggggtgctgatgccagcagctgtccccaggtcaggcccggtacagtagactggaagtagaagggtttataatagcccatgtgcagggatggtggcactgcccgaagggaagctctgtgggaatggttggggcctgcagcaggcagggaaggtggctgggccactgcaccaggtgacatagctgcagcagaactccgacagccagtcatgcacttgccaggagcactcttgggtgctcagctgcccccctctctcccacggtgccagtgccttgggcacttcacagcctgcctgcccctgcagccctgcaccagagctggaggctgcctccccacacttcctgatcttgctgggcagctctgatttgttggtggtggcaactgtgaggctgggggctgtgggccagcccagggcctggggttcagcctggggttgacacgggggcatgggacagtggcagcagaagggcctctcagggaagggatgggcttgtggtcctctctgcccttgtcatgactgggagagcagcctcaggcttccttgggcacctctgccattgtcacctcagaagcaccctccatggtatctgtcactgctccatcttgatacgcctttttaaaatctcttccaattctctcccattcatccaactccatagtcccctgttcaggaaccatgggcaaaacttctttactgcactaaagagtgataataaattctgagtatttgcagcaggataattaaggaatcagagagacctaggggttgaggaggaattatttaattatttaggtgcaccgacccagtcagattaacaccgaaagaactgagctgtgaacagagtcaagctaccttttaagcattttgtggggttggaggagatctgtgcagggtgaggcatattacagaagagagaaacaaagacagttattcaattgagatatgcattacatcagttcttacttttcaagaaacaacatgttttacgacttgagattatctgcctagtgaccttgcagctgcacagctagagaaacagggtcttcacaatacctgggaaagggagagataaggctcactagccacagaaaaacaggcagttaattttaaaggactccagctctttctcttcctcagggggaactgggttttcttatatacgactgagtttttgcttacacgttctttaatttctttcaattcctcttccatttcccccatttggtgctttttaaaacaaagatgttaatagaaagcaccactatttgccatctcttcccggagctgagctgtttcttttattggcagtggctgatatttggttaatgccgtcaatagcatggtagtgtttcgggttactactgcctctatagttgacaaatactcctaatatacaggggtaaaaggcaagggaggatgaggcagatgccaagaataaacaaaaacccaccaatgagggttttgaatcccccaaacattgagaaccatcctccaaacaaggaatccagggaccatccagaccaagtctgaactggaacatgggccaacttggacattctagctgtggtttccattagagcttggccattatcatccatttctaggcaacaactggttaaattaaattttccacatactcctccttctgaggctaagaggtaatctaaagccaatctattctgatatgtagcatttctcatttgtgttgcttgtgttatcaataaatctagtttccttgacatttcattggttattatttcaaggactgcctgcaaccttatgatgcggttgagcatatagattggggtgcggtattcccatgacccaacttgcgctcagatagcgggcccatactatttaatgattctttcaggaggccattcattatccttccagtctcctatgtctgcatcctttttgacatttgtgtctatttttgtcattatgctttttctagttcttttattttcatcataaactggataccctaagagttccccttgctttagaggaattaaaaagagggatggcttgattgtttctaacacacatgcccctgtccatttagccagcagttgccgatatgcccatgctccacagacccaatataggccagagggtgctttccaagcatttggagtctttagctgatgccaagagtggcttagggtagagaatcaagagaaagcatttggatctggtaactaggagtcgttctgggagtttctccgtagagttttgtttttactctcatcataatactgttgccctaggcttattgtttttcccattgcctctgtgaaagcctttccccaacaggcgatacagtactttccaattatggaggtttttaacaaccaaacactagctgaggctgttggttcactggcaggattaggcaaagtgaatttatgttgtggcattaattcctttgcctcccattgccgctggtcccccatatgagttccttcacttacatagcatgaggaaattcctaagctgccagctatgttttcagctagttgagcaaataagtttttggttgataggggaagctcaggcactgactgatcaaaatgcttacagatctaacatgtaagtctttaatccatctcaaattaatttttgtataaggtgtaaggaagggatccagtttcagctttctacatatggctagccagttttcccagcaccatttattaaatagggaatgcttgtttttgtcaggtttgtcaaagatcagatagttgtagatatgcggcattatttttgagggctctgctctgttccattggtctatatctctgtgttggtaccagtaccatgctgtttttgttactgtagccttgtagtatagtttgaagtcaggtagcgtgatgcctccagctttgttcttttggcttaggattgacttggcaatgtgggctcttttttgctcccatatgaactttaaagtagttttttccaattctgtgaagaaattctagaagaaaacctaggcaataccattcaggacataggcatgggcaaggacttcatgtcaaaaacaccaaaagcaatggcaacaaaagccaaaattgacaaatgagatctaattaaactaaagagcttctgcacagcaaaagaagccaccatcagagtgaacaggcaacttacagaatgggagaaaatttttgcaacctacttatctgacaaagggctaatatccagaatctacaatgaactcaaacaaatttacaagaaaaaacaaacaactccaacaaaaagtgggtgaaggatatgaacaaacacttctcaaaagaagacatttatgcagccaaaacacacatgaaaaaatgctcaccatcactggccatcagagaaatgcaaatcaaaaccacaatgagataccatctcacaccagttagaatcgcgaacaataaaatgtcggaaacaacaggtgctggagaggatgtggagaaataggaacacttttacactgttggtgggactgtaaactagttcaaccattgtggaagtcagtgtggcgagtcctcagggatctagaactggaaataccatttgacccagccatcccattactgggtatataccgaaaggattataaatcatgctgctataaagagatgtgcacacgaatgtttattgcagcactattcacaatagcaaagacttggaaccaacccaaatgtccaacaatgatagactggattaagaaaatgtggcaaatatacaccatggaatactatgcagccataaaaaaggatgagttcatgtcctttgtagggatatggatgaagctggaaaccatcattctcagcagtctattgcaaggacaaaaaaccaaacactgcatgctctcactcataggtgggaattgaacaaagagaacagatggacacaggaaggggaacatcacacaccagggactgttgtggggtgggggaaggggggaggggggagggatagcattaggagatatacctaatgctaaacgacgagttaatgggtgcagcacagcaacatggcacatgtatacatatgtaacaaacctgcacgttgtgcacatgtactctaaaacttaaagtgtaataataaaaaaaaaaaaaggaaaaaaaatgcttacagaatgacttatggacccggaattgcagggttggacacacttgagtccttctattctttttgacaattagtactggagctccaagtcctgctccttgtccatcaactcgtaatagtgctgtctgtcctgcagaccaaaaaggtagctctggctttaagtagtaaaatttaaaggattgcatgtccttgtcttacaatttggtttggttcacatactacttagcagagcagtccttcctgaatataaatgttggagctgtggtagcatagaccaaggaatgttacagtctgggcatccaatttgtggttctcagtacagatgtttagggctgctcctgctaagcctctcttgtgttaaaccattgcagactgcttttggttttttaggattatgaacatatgtggcatgtcaggcatcaaagtacaaggaaaaatgccctttataagaggtaggggcttctttggttcaagttgtaagctctttttctttttctctctctgatttaatatatacctcaaaccagaattcatacagtaagcacttcaggtcataacatgcatatagctgattatttcctgggtcacagactgaagaggtgttctggttgtatgcgcaggttcctaacttggttcctgtactgtaggtatggtacagtagagttttaactgtggtattccttacccaggtagtatgtacacagtgtgggcatctttctagagattcctccccttttagtagaggcagaaatggtaacatcagtgtatgtaatagaaacatgcttacactacacatgggcatggcaaactccctctgggcatagacattagcagcatttgcagtggtaacataacaatagaacaatcagtattaacagaattataactagggttatgaattatatccacatttattcatcctgagattgtcctcttagcttcagctgtgcattgactagtcagcttctggtatgtgactagagcagagcttgcaggatcctcaagcttcagccatgtgtagactgaccaagctctggtgtgggcagagtagggcagtcatccttcttaccagtggttggatttcattgtaggaccattcaggtggggtgatctgggtcttgttggctaatccactggttgtcatcggagtcactgctgccgctgctttcagccagctatggtgaatccaaggtgtgacacctgcaactttaagagcagtgggagtagacatgattacaacatggggcccatcccttaagggccccaaggttgttggattccaccttttaacacagagtcccccggcttatgtggatgcacttggtctgttagacttataggtatcctttctcttccccagctttgcacatcctgcattgccactcctaaagcctgcatctgtctcttaagggttaactctcctaactcctttaaatcccctctaatttgattaatgattgggggtgcccttccaaacaatatttcatgggacaaatactacaaaactaggtagtttgttttgtaggtgtccacctgacctggaggaggaccatgggcaagacctgatcccattgtaagtgagtttcctggcaaaacttttttagtagctgtttgagtgtccagttcatctgttctatcttccctgaactctgtggtcaataggctgtgtccagtttccatttggtctttaaaagctgagtcagctgttgtactacttctgccacaaatgcaggaccattgtctgatcctaaggttaagggcaacccaaatcttaatatgatgtctttcagtagcacctttgtcacctctcatgccttttcagtcctggtgggtaaggcctcaacccaccccgagaaggtgcaaacaaacactagcatataccagtaacctcctgcttgaggtaattcagtaaagtctacaggcaggttctcacaaggcacagctcccatttcctgtattcctggggttgagtatgtccttattttggattattccgtacacaggatagacattgttcacaaacagcacgggtgatggcagacagccatggcacatagaaatgctgacctatcaaagtctgtagggctgtccttccaatgtgtgttccttgatggatctgcttcacaaaccgtggggctactgtttctgggatggctagcctcctgtcagagaacagccaccaactatctttaatatatatttcctgtttcctgatgaaaacaagcttgttcacttaaagagtaattgggtacctcaagtaaagggggctctataaggagaggcattgctggagttctttcttcaggtaaaaccttgctcattgctgcctgctgagcccctcggtctgcctttctgttgccctgtgcctcatagcttttcccggtttggtgttctttgcaatgaatgacagccacattctctggagccaatatgtcttctaataattgccaaatttcttcyttattttttatatcttttccttcagtagtcaatagtcctctgtctttttatattgccccatgggcatgcagggttgcaaaagcatatcttgagtcagtatatatatttactttcttcctcttcgccaataacagtgctctggttaatgctattaattcagccttcggagcagaagtcccagaaggtaaggcttgagcctcaactactgagtgttgtgttactactgcataccctgcatatcacaccccatctgttatgaaactgctaccatcagtgaagtattcaacatctgggctttccaagggggtatctctgagatcttcccagctcaagaacacttcatccaccatatttatacaacagtggggaaggtcctgccagcattgaggcaacccaccatgcttccaatcaggttcctccacaggcagcagggtagctgggttcaaggtatttagtctgtagtgttacccacagattctcacacagaagcccttgatactttagcattctagagtgggagagccaatggcgtcctctttgctccattaaggtgactacagtgtgtggcacccagaatattatcttctgacctagggctagcttgttggcatcttctataaggatcgcggtagctgccagtgccctgaggcaatggggccaacctaaggccaccaagtccagtctcttggataaaagtatgctactggctgatgccaagagcctaacaactgagttaagactccaaataccattctctttcattcatccacctacaaaaagaagggttttttaacatctggcaaccctagtgctggggcctggatgagagcttcctttatatccttgaaggccttttcctcttctttttcccataggaggggctctctttcctttcctttgctagcctcaaataagggccttgctataagggagaagtttggaatccagattcggcacaatcccactgcacccagaaattccctgacctgctgccttgtaactgaggtgggcaatgcacataaagcctccttgcatgcacttccaagcctgtgcaggctttgggataccatgaatcctagatatccaacctccagaaaacagaattttgccttgtccttggacactttgtaaccagcttcacccagcaggtgaagaagcctctctattcctcggagatattcctccctcctgggggcagcgaatagcaaatcatgaatgtattgtaataccacagaattgtcactaaatggtgcaaaagcttcaaggttggtagccaaagcgtcctcaaagataatgggagaattcttaaatccttgtggcagtcttgtccaggtatattacaattgcccccactggaaggcaaatataggctgactttggggagcaagtctcaagcaaagaaaacatcctttaagtctagacacatgaaccacatggcctcagcaggaatctgtcctaacatggtgtatgggttgggtactatggcatagatagtgacagtagccttctttgcccaccagaagtcctgcactggcctgtattcaccatttggcttgtgcacaggctgcagaggagtattccaagaggacttgcattttactgtaatcccttgttcatagagccgatttagatgttgtgttatgccttcaattacctctttgggtagtgggtattgacagactcataccagggcagcatgagtgttaagctctattaccactgggtgtctgtttacagcaagtccaggaggattgtcctcagcccatacacctggaaccttgaaaagcattccctacatactgtgtaggtccagctccggtatctttctggcacacagttcagagagctgccattcctcagcctctgggacagttagaatcaataccattgccttagactttccaaattccggtgtcgtattcccttcaggtgtaaaggaaatttgtgcctgcagtttctggagtaagtctctccctaacaagggcactggacaacttggcatatatagaaactcatgctgcacttcttttcccccagtaatgtatctcctggaattgcraaaaggtctcttttctttggcctctstrgcccctaygatagtagcacagttctttgaggggggcgctaattgggtgagttaccacagagaaatcagcaccagtattgaccaaaaaatccattcattaatcggccccctacttccatagagaccataggctccacaaggcctaaaaggatggagcctggtctgtctgagtcctctaaattctcagcccctgccaagccgatcagatcgggatctgccttggaagtaccactgctagcaacctaacaccgcacttgggtgttagaccactgaccatcatcatccttttccttttcagggcactcatctttccagtggcccatttgcctgcacctttcacattgattcctgtccaactgggactggctttcatctctgggtcttgtctgccctgttccttggcctctgcctcggcctcaccctctaacaagtccagggttactttctgctagtgcagcagaaattgagctgtctctttgtttctatttctcgtttttctttcttcctttttctctgcctcttcttcccagttttttaatactttgtttgctatttccaggagtttactaatatttttccctgaaaagccttccaacttctgaagctttcatattatgtctccctgagcttgcctgacaaaggtcatatttatcatattttggttttcaggagcctctggaataattggagtgtacagcctctatgcctcacaaagcctttcatagaatgcactgcggctttcatcaggcttttggcccacttctgatatgttatggatattcaatgccttccttcctcctgcttttatcctgttcaggagtgcccttctatataatgcagctgttccatgtccccagcctcatttgggtcccagttagggtcctcatttgggtatcgctccacggagaactggcatgggttacgggtggcctctggggcttccccttctaaccagctgagagctgcctgattaactctcctatgctcctctgtattaaagttagcaaaagtagttgacaatctggccaggttgggttttgtgttataataatagaattcaccaaatcaatgacagcctgaggcttttctgcatacaagggggcatgctgtttccaatttaagagatcagtagtggagaaaggctgataaacataaagcctagagcctccttgtatctgcccttggtcatcataaacttgtgtcctnnnnnnnnnnnnnnnnnnnntcattatgctttttctagttcttttattttcatcataaactggataccctaagagttccccttgctttagaggaattaaaaagagggatggcttgattgtttctaacacacatgcccctgtccatttagccagcagttgccgatatgcccatgctccacagacccaatataggccagagggtgctttccaagcatttggartctttagctgatgccaagagtggcttagggtagagaatcaagagaaagcatttggatctggtaactaggagtcgttctgggagtttctccgtagagttttgtttttactctcatcataatactgttgccctaggcttattgtttttcccattgcctctgtgaaagcctttccccaacaggcgatacagtactttccaattatggaggtttttaacaaccaaacactagctgaggctgttggttcactggcaggattaggcaaagtgaatttatgttgtggcattaattcctttgcctcccattgccgctggtcccccatatgagttccttcacttacatagcatgaggaaattcctaagctgccagctatgttttcagctagttgagcaaataagtttttggttgataggggaagctcaggcactgactgatcaaaatgcttacagaatgacttatggacccagaattgcagggttggacacatttgagtccttctagtctttttgacaattagtagtggaactccaaggcctgctccttgtctatcaactcataatgctgctgtctgtcctgtagaccagaaaggtagctctggctatatgatagtaaaatttaaaggactgcatgtccttgtcttacaatttggtttggctgacatactacttagcagagcagtccttcctgaatataagtgttggagctgtgttagcatagaccacagaatgttacagtctgggcatccaatttgtggttctcagtacagatgtttagggctgctgttgctaatcctgtcttgtgttaaaccattgcagactgcttttggttttacaggattataaacatatgtggcatgacaggcatcaaagtacaaagaagtagatcttttgtaggatggagggccttctttgattcaagctattagctctccttctttttctccttctgttaatgtgtacctcaaaccagaattcatagggtaagcgcttagggtcatgacatgcatgcagctgattatttcctgggtcacagactgaagaggtgatctggttgtatgcgcaggttcctaacttggttcctgtactgtaggtatggtacagtagagttttaactaaggtattccttacccaggtagtatgtacacagtgtgggcatctttctagagattcctccccttttaatataggcagaaatgataacaacatcagtgtatgtaatagaaacatgcttacactgcacatggacatggcaaacctccctctgggcatagacattggcagcatttgcagtggtaatgtaacaacagaacaatcagtattaacagaattataactagggttatgaattgtatccaaatttacttatacagagatgacctttagcttcggctgtgcattcactagttagctccctggacgtgactagagcagagcttgcaggatcttcaagcttcagccatgcgtagactgaccagcctctggtgtggttggagcaggacagttgtccttcttaccaatggttgggttttgccgtaggactattcaggtggggcgatctgagtcttgttggctaatccactggtttcatcggagtcactgctgctgctggtttcagccagctatggtgaatccaaggtgtgacacctgcaactttaagagcagtgggagtagacatgattacaatatggggcccatcccttaagggtccccaggttgttggattccaccttttaacccagacagagtcccctggcttatgtggatgcactaggtctgttagacttataggtatcctttctcttacctagctttgcacctccttcattgccactcctaaagcctgcatctgtctcttaagtgttaactctcctacctcctttaaatcacctctaatttgataatgattggggatggccttctgagcaatatgtcataggacaaatacctagtttgttttgtaggtgtacacctgacctggaggaggaccatgggcaagacctgatcccattgtaagtgagtttcctggcaaaacttttttagtagctgtttgagtgtctgtttcatctgtttcaccttccctaatctctgtggtgaggaggctgtatgctgtttccatttgatctttaaaagttaagtcaactgttgtactaactctgccacaaatgcaggacattgtctgatcctaggattaaagtcaacctaaatcttggtatgatgtcttttaatattacctttgtcacctctcgtgccttttcattcctggttgggaaggcctcaacacatcccaagaaggtgcaaacaaacactagcatataccagtaacctcctgcttgaggtaacttggtaaagtctataagcaggttctcacaaggcacagctcccacttcctgtattccaggggatcaagtaggttcttgtcttggattattctaggcacaggatagacattgttcacaaacagcatgggtgattgcagacagccatggtacatagaaatgctgacctatcaaaatctctagggccgtccttccaatgtgtgttccttgatggatctgcttcacaaaccttggggctattgtttcagggatggctagcctcccgtcagagaacagccaccaactatctttaatatatgtttcctgtttcgtgatgaaaccaagctttttcacttaaagagtaattgggtacctcaagtaaagggggctctataaggagaggcattgctggagttctttcttcaggtaaaaccttgctcattgctgcctgctgagcctcttggtctgcctatctgttgccctgtgcctcatagcctttcctgatttagtgccctttgcaatgaatgacagccaccttctctggagcccatatgtcttctattaattgcaaaatttcttctttattttttatatcatttccttcagtagtcaatagtcctctctctttttatattgccccatggtcgtgtagggttgcaaaaacatatcttgagtcagtatatatacttnnnnnnnnnnnnnnnnnnnnagctgcctgattaactctccctatgctcctctgtattaaagttagcaaaaagtagttgacaaatcctggccaggttgggttttgtgttataataatagaattcaccaaatcaatgacagcctgaggcttttctgcatacaagggggcatgctgtttccaatttaagagatcagtagtggagaaaggctgataaacataaagcctagagcctccttgtatctgcccttggtcatcataaacttgtgtcctgttctctcgaagtggcatctgcaaagcctgtggtcagcctgagcggaggcacccagctgccttgctctgtccatcttcctggtttttttctaagggaggcttttgttcctctggggttgggggagactgggcctcactttcctctcagcctgactctgtggatgctcctgactctgcctcctgccttatactggccaaagacaggtagactggcggcatatatgggggcggaaattccctttcctcaggtggaaactgaagaagtagtttcagctgaggcttcagggactccttttcttgagagactctaggggctttaggttcctctgcttcctttggttgggctgcctgagccattaataccttgcactatccttctaggcagggctgtagccacttggggcaagtttgtgccacactgagccaagagtctatttagggactctggtctggatatcctgattgtcctccaactccagtggccaccttaaacacactgccaattaattccctttctattgtaccttcagagggccaccccacattaaaagcaggccaatttatctcacagtatgtccttaacttttgagcatccagtttcatcccataatcacctgtaaatcctgttttaaaactctttatcatgcactcaaaaggagtcagtttcgacgcttttcctcccatttcctcctttgtaatgcactttcactctcaggttcaccagactgggtgctattacaggagttttggacgctgcttagccaggaatgtgccttccactctcacagcctaccgcagccatggagctggtcctgtcagccacataaaatgtcctaggtctggtttcccctgcacttgcctcggagcacatagcccatgccaagggatctgtgcctccccacgttactccccacattggcctctatggagaccatctctttcacacacctttcctgccccaggactcctcatcgggcaaaacaggcctctcccgtgtcccaggtgagcctggttaggctcccacattcatacacatacagacatcatgcctaccccaggactcctcattggacgaaaagagcatctctcatgtcctgggtaggtccacatacacccatgcactcccacttggggtggcaaatcactcttgccaccctgccagcaaggtcttcctgcaaggaaggaagctacctgcaaggaaggaagcttcctgcaaggaaggaagctccaagttcttactcgccgctctatcggcccattttctccaccagtgaaatactttacttgttagggggacatgaggttcatccaaattggcaggccactcctgctacccccagccactcttggttggatttgtgatcggtccccaggaggtgatcaagctcctctttgtccctatgggataggatgggctttcccgccttgagctcttactccttaccgcggttcctgaagtgctggtattgtcctgcagctccatcccyggtcctgttgcactgctgggcagggcgctagaatgccaggaaaggtggtttccatctgggtgaagctcccccgtggcacaccttagatgctgggtcttccaggccctggggctctagtcccacaggaaaaggagacagtaaatctttcatctccaacccccatctgggccaycagaaatgcagtgggataattaaggaatcggagagactgaggggttgaggaggagttatttaattatttaggtgcaccgacccagtgagattaacatccaaaggactgagcctcaaacaaagattcaagctccttttaagcattttctgggggcagggggagatctgtgcagggggaagcatattacagaagtgagaaacaaagacagttactcaattaagacatgcattacataatttcttacttttcaagaaacaacatgttttatgacttgagattatccatccagtgactttgcagctgctcagctagagaagcagcatcttcacaatgcctggaaagggagagagaaggctcactagccacagacagaaaaacagccagttaattttaaaggactccagctctttctcttcctcaggggaaattgggttttcctacaaacaactgagtttttgcttacacactctttaatttcttttaattcctgttccaatatcatcatggagatgttcctgtgatttggtttcttcatgtgtaaaatgaggaaaaccagtgtctactttacagagaagctatgaggattacatgcattaattaatgtgaaattgccttgtgtagaataagcagtcaataaatattattacaaatgttgttgtaagcatcatcaattgcagtttaattgtcattccttaaacataaaataagaaaaaatggtgaagagtcaacatttaagaaaaaaataaagaaacatggctaaaactgttatttaattgaagaaaggcatttggcaatacgcataggaagtaattctaagcagaataaacaaatataaatccaaaatttgaagcatgtgtgactgcagactacaaaagacaaagagaagatctacagatggaaacagggcaagtgagtcccaaattggggcttagcctgggagaggtcttggcttccctcaggaaagaactcaagagtgagccagtggtggaagagacagctttatggaggtggtagtgtgactacccctgcagagagcaggggtcagggcactactgcagtaatatttataccgacttttaattgcgtgtagattaatgcgcagtttatgcagaaatttctacgaaaagggtggtaacttctgagtgctcaggtcattgccatagaagaggccagttactcccagatgttgccatggcaatggtaaactgacaaggcatgctattgagcatgtcttatggaatgctgcttccatgttttagctagtctcaatttggtcctttgtctgcttctgcttcttgttctcaccattcctgggctcaagaaattctcctgcctcggcctcccaaactgctgggattacaggtgtgagccaccacgtgtggccaacaatgaatgttctttattttattatactttatattttgagatagagtcttactccgtcaaccaggctggagtgcagtggtgtcatctcagctcacgacaacctctgcctcctgtgttcaagtgattctcctgtctcagcctcctgagtagctgggattacaggcacacagcactacacccagctaatttttgtatttttagtacaggcaggagttcaccatgttggcaagactggtctcgaactcctgacatcaaatgatccacccacatcagcctcccaaagtgctgggattacaggcaggagccaccgtgccagcaacgatgaatgttcttagtatcactaatatgtgcacttaaacatgatttaaaatggcaaatttggttatgtgttattttaccatacttaattttttcttttgagatggaatcttgctctgtcacccaggctggagtgcagtgggagaccctgtcttaaaaacaaaacaaaactctaaaaaacaacctaacaagcaaatgcaataacaacatcttttgcaatttttgaagtttgaagtttacttatttcactcagagctcccctggattacttgtgtttaatgctgttctcaaattgtgtgtgtgtgtggagagagagagagagagaaagagacagagagacagcatgcagctaacaaatccctacatcatcccaaatccatcattttttctttattcgattctgcagtggtgcattctcggctcactgcaacctctgtctcccggattcaagcgattctgctgcctcagccaccacagtagctgggataacaggcacacacactaccatgcctggctaatttttgtatttttagtagagacagggtttcaccatgttggccaggctggtctagaacttctgatgtcacatgatccgccgactcgacctcccaaagtgctgggattacaggagtagagccgcagtgcccagcccgattttgctatttcttttctccccccaaccccctgctttttttttgagatggagtttccttcttgttgcccaggcttgagtgcaatggcatgatcttgactcactgcaacctctgccttctgggatcaagcgattctcctgcctcagcctcccgagtaggtgggattactggcgcttgccactacacccagctacttttttgtatttttagtagagacagggttttgctctgttggccagggtagtctcgaactcctgacctcatgcaatgcacccgcctctgcctccccaactgctgggagtgcagtcatgagctaccgcgccaaccccgattctgctatttcttatccctctttacattgtagggacactgcagactttgacctgaatgaaccaataaattatgcccccacttcactaatgtgccactaggaggcgctagacaaacatttctcaactactcgtttcatcattcaagcgtggcgcaggtgttcttgctagagacttgtcattgatgttttcttcagccattaggaggaaatggccataaggaaaagactcggtttgttttatgttaatccaggggatatgagggtacatatgtaccaacaaaacatgtccattttagagagtcaaagtacccaatctgtcctccacaattcagcatttttagagaaataaaaactgatggtgaaacatgcagactctaaaactgaatgtctgcttttcaagttcgttctatttgttggctagggaaaaataagtgtcacttaacttctttgtatgcagtgtctcaactttaaaatgactacaatagcaaatgcttcatagagttgctgcaaagattaaatagataaatatgctaaaacactcagaagaggctggaacgagcactttaagatgacagtaattttattttattacaagaaagactgaggttgaattttcttaacccagaacttagattaggaagaagtggtcattaaaatataccatgcattattacttattatggtcatcattccatgcaatagatcactaaacttattgctcctgggaggggatagatttattaacttgcctaatgtaatcatttcacattgcgaacatatatcaaagcattccatgttacaccatatatatatatatatatatatatatatatataaaatttgtcaattaaaaataaaaataaaatgctgacaaaataagaggtgtcaatgaatgtataagaaacatgaggtagctgaagtaggagtcttactcaaaccatctgccctgatctgtctatcatcccatgctgggacatgaaaagccacatattcagaggactgtgggaattgagagagagtgaaggacagacagagtcttcatcagcgacgttcccacatgggaagcctcctaccattaaccttaaagacgtgagttctggaagatgtctgagaagagattttctgggatttgtggttttgccagagagctggcaatgcgttgatgggggcaaacacttccttcattattatattttccaaaactcacggcaatattttggagaattgttaaggtggtaggagggagatgtaagaaatagccccagagcgcccttgtgtttgctgccctgcatgtttgccagaaggaacatattcctcaggtattagtctcatgcggctgataaagacatgcccaagactcggtaacttataaaggaaagaggtttaatggactcacagttccacatcactggggaggcctcacaatcatggcagaagggaaaagacatgtctcacatggtggcaggcaagagagaaaaaagagccaagtgaaaggggaaacctcttataaaaccatcagatctcataaggcttactcattaccatgagaacagtattgggaaaccacccccatgattcaattatctttcactaggttcctcccacaacacgtggcaattatgggaggtaccactgaagatgagctttaggtggggacacagccaaaccatatcaccttaggtatggagaggctgaagaaatgaatgtgccatttttggtctttacagggtgtttcaaatttgcaaatgctcaaaaatgttatccctcaaagacctttgaggaaaaagttagttgattgactccagcaaaatggaatgtaatctaagaaaggcaagagtagccaagcacagtggctcatgcctgtaaccatagcattttgggaggctgaggttggaggatcgcttgggtccaggagttcaagaccagcctggacaacatagtgagctcttatctctactaaaaatttgtttaaaattgctgagtgtagtggcacatgcctgtagtcccaactagtcatgaggctgaggtgggaggatcacttgagcccaggagattgatgctgcactccagcctgggtgacagagcaagaccctgtctcaaaatactactactactactaccactactaacaataaaaagaagagagtacacaggaagcagtgctgaataaataaatgtataaaacagagttatgtctgaatgtgttagtgcacagttgtgaaaataatctggaattaacatttcacacgtgaggtaattgaaagagcagagaagaaagagagaatgagcatatgttcatgtttttgtttcatctgggaagaagacatagataatgactatctttatatttgatagaaaatataagcttaaatatgtgtgctgacagttgaaagggcattacctccagaaaactagaaaagatgtctacaagtttcagagccttaatgggaaatgcgtggattgaagaaaacttgtttcatgaaatcagaggtgggtgggaaagaattacaccaaagaagcagaaaatccgatatatgtaaaaaagggaaaacaatgtgaaacaaagctgcaggactcaatccaaatataacagtgatcataataaacatgaatggattaaaattcctttttaaaaaagtagactttctgaatgggaaaataaacataaaatccagacatacagtagtgtaggaggcaggttagttaaaaaccaaaaaaaaaatgttgaaaataaatggatgcatgtgatattattctgttccactatccaatctaggtaatggtcaattattttatagattacgcctcagttttttttttttgttttttttttttaagacagactctctttctatcccccaggctagagtgcagtggtgtgatcttggctcattgcaacctctgcctcccaggttcaagctgtcctcatgccttagtctccagagtagctgggattagaggtacctgccactgcacctgcctaatttttgtatttttagtagagatggggtttcactttgttggccaggctcatctcgaactcctgacctctggtgatccacctgtctcaccctcccaaagtgctgggagtacaggcttgagccactgtgcccagccttcagtttggttttgtccagtgttttctcatgattagactgaggttatgcatttttggcaaaaaaatcatcagaattgatgtaagttttcagtgtgtcatgttatggagtgcatgatgtctttatgtcctgtcctggtgatgttaaatttgatcacctggattaagtggtgtctgttggtgttctccactgtaatattattattttttctgatccaggaaaggttaagcaagagtttagcaccattttaagtctaagaagaaacatttactatccagtttctctgaagcctgctaactgcaggctacatgtgcataataaaaatcttggtctccacaaccccttatcctcacccagatatttcctttctattgattacaggtctttaatcagaaaatcttggaatccacctacaacctggattccattccactttgaatgccacctttctgaactaagccaatgtacatgtgacatgtattaattgatgtctcctgtccccttaaattgtgtaaaaacaagctgtaacgcaaccaccttgggcacttgttctcaggaccttcttcgggcggtgttgtgaaccattggttaaatgaaaaactctcttcaaaaaaaatatttttttgagacaaagtctggctctgtcacctaggctggagggcagtggcatgatctccgcttgctgcaaactccacctcctgggttcacatgtaaaagggtagaatgactcagtagtgacacacagtgtgtttttagtagagacaggattcaccatgttgaccaggctggttttaactcctgacctcaagtgatccgcctgcctcagcctcacaaagtgctgggattactggcatgaaacactgcttcttgcccttttgttacttttctactgctgttaagataaaagtcactgttgggatccagcctttttgtttgtataaactggtaagtttgtgttgacatctcttgctagagttctgaagtaaaagctgtaggatctttctatgagtgtgcatgcgtgtttagatgtgtttatgtgcatgcaaatatatgtgtacatatatatacataaatatatatatatatatttttgagatggagtcttgctctcacacaggctggagtgcagtggcacaatctcagctcactgcaagctccacctcccaggttcacaccattctcctgcctcagcctcccaagtaggtggtactataggtgcccaccaccacacctttgatttttgggtggccacctggtcacacatggtaataaagcagcctcattgtctggggtaaataaccgagattcattgtctcatggccacagaaaatgaggacgtggacacacagagtgaggttgagagcagaagtttaataggcaaaagaaagagaagagctatctgcagcagagcagagtctggagaagtgggttgctgcttctgtgctggcatgcagcaagttttatagatgagcttgaggaggtggtgtatgatttacataggatgcaaaagattggttggatcaggtgtaccgtttgcatggggcacataaaactggttaggactaggtgtgtcatctgtatagggcaagaaaagctggcctattttttttgagatggaattttactcttgttgcacaggctggagtgcaatggcgtgatcttggctcactgcaacctctgcctcctgggttcaagtgattctactgcctgggctcccaagtagctgggattacaggtgcccactaccacgactggctaatttcgtatttttagtagagctggggtttctccatgttggtcaggctggtctcaaactcctgacgtcaggtgatctgcccacctcagaacctattcttttcttatgcagacggactctctacctggctagtgccatgttgccttttttctttctttctttttttttttttttgagatggagtttcgctcttgttgcccaggctggggtgcagtggtgtaatctcagctcactgcaacctctgcctccttagttcaagtgattctcctgcctcagcctccagagtagctgggattacaggtgtgtaccaccacgccagactaatttttgtatattttaagtggagacggggtttcaccatgttggccaggctggtctcaaactcctaacctcagatgatccacctgccttggcctcccaaagtgctggaattgcaggcataagccaccacacctggcctctggttttttactgtacacattgtgacaaagaaaagggaaggtggagcctccatgttgaacgtgcctggcccccaggtagcacttttccattggcatagctgcctgcatttacctgtgcaagcttccagcttgcttatctatgcctgcagcttgattttccaccctgctctttgttaaagaagaaatgatgtgggggctgctttttgttaaaagggaaattctgccaaggactcttttaccctcactatctgcttgaatcgtttctttctagttcttctatcagtaaggagatgcagctgacttgccttcagtcactaaaggtcagagccaccagaggaatttagagatggatcttactcatactcccagggaatttagttcactggatgtaaaggaaatgcaaattaataaggaaaaagtgaactattcaatcccttgcttactgcctctgtagtggctaaaatgaaagtaaaagagcgctggcttgggcgtgaaggcggcaccaagctcagatgtgggtttgtctcagatcaggccaagtacctcaaagcttcctacgaaaggaaaaattcagccaggccaaccaatagttacccctgagacctgtgattaccaagaagatagacatgtggaggaagggcaaaaccaagtagctattaaacccagagggtatttacagggctgttcaatcttttggcttccctgggccacattggaagaaaaattgtctcgggccatgcataaaatacataaacactgatgatagctgatgagaaaaaaaaggcaaaaaatatctcataacattttcagaaagtttacaaatttgtgtagggccacattcaaagctgtcctgagccacgtgcggcccgtgggctgtggattggacaagcttgaaaaggaattggttcatcttctagattggtatcgtcagcttcctgagttcccttttttaaaatgggttgtaagaatgactactttaagtacagtatgtttatttatttatttatttttttgataaagggtctcattctgtcacccaggctggggtgcagcagcatgatctcagctcattgcaacctccacctcctgggttcaggtaattctcccacctcagcctcctgagaagctgggattacaggcacacgccaccatgcccggctaatttttctattttttggtagagattgaatttcaccatgttggccagactgctcttgaactcctgacctcaggtgatctgcccaccttggcctcccaaagtgctgggattacaggcatgatccactctgcccaccgatatgtttaatttttaaatgccacagaaagcaagagcatgtttgggctggtgcagggcctgcagctcactcactattaaacacttgctgatgagtgtatggggcccagatgcacaggaagtttttcctgaggaaatggccagcctggtggactaggtaaacaccactacaaggtctgtttatcctgaaaaggggactgcccagccctccctataaaatgcaaagtggagcaccctagataaagcagctgatgtgcttcatatgcaagccatgtgggattggcttcatgatgaccgggatattcgccagctgaatatgcccattacccaatgtattagtccattttcatgccgctggtaaagacatacctgagattgggcaatttacaaaagaaagaggggtaattagacttacagttccacgtgactggggaagcctcacgatcatgatggagggtagagaggaacaagtcatatctttcatggatggtggcaggcaaagacagagtgagagccaagcgtaacaggcaagactgcctcccatttgattcttaaacaagacagctacaaagataagaagctacatacccccctcacaatttgtgcttaaggaaattccttgtggacaaaggacagatggaactcaaagtcatccttccaaggctcccgagacaaatacttaactgacaatttcctctgccccattgcttatgtaaaagtgcagattcacggagccagcctaaattgtgcattcagtggaaagctgatcaaggactcaaaagaatatgtaaccttttgtctcatgtctacttctaatctgaaagccctcacttcaagttgtcctgaattactgaactgaacccatgtatgtcttacacatattgattggtgtctcatgtctccctaaaatatataaaagcaagctgtgccccgaacaccttgggcacatatcgtcaggacttcctgaggctgtgtcacaggtgcacattctcaaccttggcaaaagaaactgtctaaattgactgagacctgtctcagatattttgggttcacaatagattctcagtgtattaatgatgctagctgaagaactgtgaagttcataaatttggaaaggaaagctttatttctataaatgttgtggttcaagggtccccttctacaaaagcaccccaggtgacatgactcttgcagaatcaaacagtggtttgagaaaccttatcaaatttgcagttgtagctttccctcatgggtcttacagatgctaccaaaagactagggtgtcaacgagaagagacaaactgtaaatttttttaagagatttattctcagccaaatatgagtgactatggccgcccatgacacagacttcagaagatcctgagaacatgtgcccagtgtggtctgcatacagcttggttttctacattttagggagacatgagacatcaatcaatacatgtatcatgtacattggttccgtccaaaaaggtagaatgactcaaagtgggggattccaggtcatggatggacaagacacaaaagtttacattcttttcagtctttgataagattacataatttacatgtgatgggggttgggggttgggggtggtgggtagaggaatagtggctgatgcctgttcagtgaatctgcatgtttgcgtaaacaatagtgcaggggaatctatcagatacacatttgtctcaggtgagcagagagggctgactttcacttctgtctctcctttgacccacatctgtgaagataagccaaggtgaaattgaacagaactgttttagggtaaagatcttgaggtccacaaaaaatttctttgtgggcaaattatgaaagaggtatgtagctttttgtttgtttgtttgtttgtttgtttttgtcttcatagctgtcttatttaggagaaaatgggaggcaggtttttctgatgcagttcccagcttgcgttttccccttggcttggggattttggtttcctttcactaattaacaaacaaaattaataaattaacaaacaaaaacagggaagggaaaagtgagtcaaagggctcatgccagaaggatggaaatctttagataattattttgttattattattaatttttttatttttcgagatggagtttcactcttattgcccaggctgacatgcaacggtgccgtctcgactcactgcaaccccacctcccaggttcaagcgattctcctgcctcaacatcccgagtagctgggtttacaggcatctgccaccaagcccagcaaatttttttttgtatttttactagagacgaagtttcacaatgttggccaggctggaatccttagataattattaagaaatgaaacaaagaaaaggaaaattgatggagttaaaacaaaagactttacaacatgatcaaaggttgggtgggccacagggaaccccaattggttccccaacattaaggggccccatgccaattttcttcatttgcctcagattggagaagtttaagaaaaattgaggctgggcacggtggctcacacctgtaattccagcactttgggaggccaaggcggtaggatcatctgaggtcaggagttagagacgagcctagctaacatggtgaaaccctatgtctactaaaaatacaaaaaaatttgccaggcatggtggcacgtgcctgtaatcccagctactggggaagctgaggcaggagaatcgcttgaacccaggaggcagaggttgcagtgagccgagatcatgttattgtaccccagcctggtcaataatagtgaaactccgtctcaaaaaaaaaaaaaaaaaagttttagagcaggaatgaaaagaaggaaagtacacttggaagacggccaagtagctgacctaagagatcaagtgtacggttgaccttcagacttggggttttataggttggcatgcttctggagtcttgtgtcccttctccgctgagtcttctcttggggttgggctgtccacatgcacagtggcctgccagcacttgggaggggagcatgcgcagtgtgtttactggagttggacgcatgctcacttgaggcgttcttccttcaccagctgaatgttcctagaaggttatagaccagttaaactccaccgttttgcttctcagtgtgcatgcttgagcccactcactcacttcctgagatcgtattgggaagctgctaaccaccagctttaggtgttttctatttactgggagacagcctttccctggtgctgactgtgaccaattattattttagagagacagtttaataaccgcctgatgctcgcctgacattcctggtggggctggggagagcctttcctgccctgcttatgcctgactagctacctactgtaacaataactgaactctttctaccaatttccaatgagaaaatctatgcacctatctatgacctgcaagcccccactttgaggtgtgtcacctttcctggctgaaccaatgtccatcttacatgtattgaggggtgtcttatgtctccctaaaatgcataaagccaatctgtaactcaacaaccctgggcacacgttctcaggatctcctgaggcctgtgctaggggccactagtcactcatatttggctcagaagaaatatctgagattagtttacagagtttgaccctttttgacagcagaggcaattacacgcttgctatgggatgttaactgaagctaatggaaataatggtgtccaaaagagttccgtgatgacatataaatggttcatataggacctgctacctggggaatgcaaagataacatacaaagagggagcctctttttcctcttcagactgactgtgtacctatgtgaggagctgttggattttacagtgcccaataaatacgtctttgcatgtgaattgcagttccaaggtaaacaaacaacatcttgtttggaaggctgttgctctggttaaagaaacattaacatcttttttttcttttgagatatttacagtttagagtgattggattgcatgttcctgtgagcaaaatttacatttctctctacctgacttctccacaatttggaaactatttctgactattcttatgttatgaccatatatagtggttttcatgagtttagtaggactgttttcttttgaaataggacacaattgtgaacactggttatttgaccaaggctttgactaaaataatgtagttttaggtaaagttccagcaaatccagcctgagaagagcccatatgaccaatcagttcttgctgcgctttatgcaaatactcaagtataataagcctaaaacttattttgcagacgtattgctcttcctatactttttcttcagtagaaaaggagggctagagagacagaaaagttgtttcaactataaccatctgttactagattccagccctgacctttgttttttattatttacttatttattcatttgagacagggtatctccctctttcccaggctggagtgcagtgccgcgatctcatctcactgcaacttctacctcctgggttaaagcgatcttcctatttcagcctcccaagtggctaggactataggtgtgtgccactatgccctgttaatttttgtatttttagtagagatggggttttcctatgttgcccaggctggtctcaaatgcctggtctcaagcgatttgcctgccttggcctctcaaagtgctggaattacaggcacgagccacagtgctcggctgtgacctttgtttttaaatgcagatggaatcatgaattatttcttggctacaagaattctctgaagatgaaacaggttataattttattcatgatgcttttagttggcaacctaatgaaaaaagttatttttttctgttgtgacacacaaattctcttcatggtcaaaattacgaatgttatctcttgttgttttgcttcggagaaaaccagaatcatggtattctgatgatcagagataatctgagaaagcctgtaaatctcccttatttggcatcccattgggcccaaactatttttcattgccagtgccctgctgctaaaactatacaagcaccctcactctagacccagggactatcatggaagagatgggagcctgagactgtagcagccgattttgagagatagagttagttcagaccctccaaatcaaggatggatacacagatgactaaatagcaggtgaaacaagctgtttttgcctcctgggttattacccaaccctttacatccatccaaaccataacaaatttcctgcttcccatagaattaaaagaaaattactgagaggataaaggtaccttatgacaaagcctccctggtataatactccaaggtatgagatttatgtgtgtgtgtgtatatatatatatatacacacacacacacatattttatatatatatatatatatatatatatatatacatatatatatacagatatatatataattttcagccaacttaggacaaattgctaaaaagtatgtaaaaagcattacagcacaacaaaattctctaaattcctaggctaaaaggttttaaaaatgtctaaattccttagcgtaaaaggttttaaccatgcttatattttgtgtagctaacagctacaagtctataaataaaaccaagaatacagtaggttgatgcatagaaggtgaagataagttaattttgtaacctcatgtttggcttttgggcttttgtattgcttaaagaattttaaaggtcgatgaatgtctgtctgccttcattcccatctgtcctaggacatttaaattggctgtaagtctttgggctctaagcccctttgttatactctcgccaatgcactgcaatgtagcagtctctcattgtaaggtatcacctgtagttctttctctcacgaccgagagaattaaggagcatgggcaaaatggtgaggttggagtgaaacttcaacaagaaaagaagaaagctgaccatcacagagtgggggcctgtaagagggttactatttcacagtgaatgcaaaggcctttataagaaacctatgagggcagggtgtcttatttgcatatggtgcaaattgctggtagctccacaacatcctcctagtgcatacacaggcccttagcttgagttaccctatactgttttatcctgctcactgcgcatgtgttagagcacagcattttccattgctggcatgtctgggcaagtcacctgtgcaccccttcatatctgtgcagctgtgggcatgtcttaggcaagtcccctgtgcaagttcccttatctgcaattccttcaggttgttcttttgtttgaaaggattcaagtgaagactcaccctaactgcctgcctgactggtttctttcttcctactttctcatcttggccatagggagtcccatcaagggacaggatgaaccaggaacgggcagtcatgccaccctggcaatgctatggaacaaattaaacttgagtggtcattgatgttgaactgtgcacatccgagtacaggaggctaataagcaatgagacatgcccatgtttgcatgtaagtgagaggtaggaactctgatagcaccaggagcacaaactgacccctagttgctagtagacaaaatgaggcaaacatttataaaaggatttctggacaaactttgttcatcctactttttagggtttcattttgaaaaactgaaaaagcaaagatatggaaaaatagtgccaggtgcaatggctcatgtctgtggtcccaggactttgggaagccaaggcaggtggattgctttagatcaggaattcaaggccagcctgtgcaacatggcgaaacccaatctctacaaaaaatataaaaaattagttgagtgtggtggcatgtgcctgtagtccctactttagtacaagaggtcaaggatgcagtaagctatgattacaccattgcactccagcctgggtaacagactaatactttgtctccaaaaaataaaataaaataaataataatatagaaaaaatagtaagaagaaaataaccagactctatattcctatcacccagaaataacactgttaaattcctgctatatatttttattattttttattaaaataatcattactgttattattttttacaaatatgtgtctgctcattgtattagttatttatgattgcctaacaaaaatatttatccagggctgcctatcagaaatttgtagacatatgcctacaagtgccagattctgagatctggccacaaatctttatacccttgtcacatgcaaaattttgttacctccgtccaaagcccccataccatcaggttagtgagcagaatttcattagctgaattagttttatttatggaggaagtctcttgagtaatgttccttagataaacctcttcaaatatagtattatatatggagtgtgtatataatatatatatacacacaaaatatgtgtatgtatatatatagtgtgtattatatatggagtatatatggtatatcaatggtgcatatatatctggtgtaaaaacatggtgtgtagattgatgtgtgtatatatgtgtgtgtacacatatgtcttgtacatatatgttggatttatgtgtacatggtgggtatgtatctatagagagagggatatatatttatgtggtatatatattttgtatagatgtatatggtggactagtattttatatgcagtgtatattacatatacacagaaacacaaacacatgcacaccccatatatactatatgaatatatatggatggttatggtgtgtgtgtgtgtatataaatatagggtgtgtatatatgtgtatgtgtatatatggtgtgagtgcatatatatatggtatgtaaatatggtatagatttatgtatatggcatatgtaacacatatatagtgtgcagaggtgtatagacatatatggtgcacatgtattttgtctatatatagtatacacatggtaggtgtacacatatgtatatatatatatatttttttctttttctttttttttgagacagggtctcgctgtgtggcctgggctggagtgcagtggcacaatctcagctcactgcaacttccctttggtttcctgacttcacagccttcaactctaaaactgagaaaaacgtgtagaatttacaggttttgattgtgaggaagatgcagttcccaaggagactgagggagaaactgatctttaaagtgtagcatctactgtgctccacgttctatttcttttcatgcaggcacatacaccacttagatggggagaaccttccttgtgtcttgcatatgtggcaacagagactaagagactggaaggagcttcttcaaagatagagttacatttttagcagaggcagaaatagatgatctaacttcaaggccaatggaacaggtgtggtcttttgaagctatttccacatgtcacccttcctagtgacttttagtgagcagggagttgggacagcctaggggatggtcatgaatgtttccctctaagcactgatcacaaagaagagaaaatttttgccttccaaagttattagtgtgttcatttttatctcttaggaaaaaaggagcaaagtcggagatggtgtccactttcctttattgattgattgagattacaaaattggccagtcatggtggctcacttctgtaatcccagcactttgagaggccaaggccaaagatagcttgagccaaggagttcaagaccaggatggccggcatagcgagaccttgtctctacaaaaattttaaaaattagctgggtgtggtggtgcacacctgtaatcacagctacttgggaggctgaggtgggaggattgcttgagctcagaagctggaggttgcagtgagccaagattataccactgcactccagcctgggcaaccaaggaagatgctgtctcaaaaaacaaacaaacaaacaaacaaaacttgtattctattgtcacccattacattatttttaactaattttattttaatcacttattgttgagtcatctctgagattctctattctagtggtgtcattataaaatgaagctgccttgtcaactgcacttgttatgacaccaaacttgttatgacaccaaacttctgttatgacaccaaaatgcataactctatataatcatatcctatgacagggtctatgcctcgctgtatttcagcattcattttagtcttcagcaatagaatactttcacctacattttgtcaaattgaaacacttggaatacttcatttattttttctgcatgtcctacatattttggctttgctagtccactttaaccaaaaagctttgattccttaagtgtagcttaaatatcctatcttaagcatgggtgtaattttcttctattaccaacagaggttctttaatagtttttcaaatcactgattaaaaagaaacagctcaaattatattctactataaaaatgatacattcggcctgggcacagccaatcacatccataatcacatgtttggaggctgaggcaggaggatcacttgagtccaggaattgaggctgcagtgagctatgatcacaccactgcactccagcgtgggtgacagtgagatcctgtctcaaaaaaaaaaagatacattcaaagaagtaaaaacaaaacagtatcaaacctatctccctgattgcaactgccttttttatgcatacacctgcaattctttttcacctatcacacactaaaaatattttagaattataattattgtacactgaaggcatctctaggaatgttttaaagaacctgtctctctgaagttcatcctgcttgtctatcaaggaaattattttcttgattattgttgctgagaaagactgggtgtgtgtgtgtatataaatatagggtgtgtatatatgtgtatgtgtatatatgatgtgagtatatatatatggtatgtatatatagtatagatttaccatatatattatagaattagcagatgtgaatcaggaagaggtgaacaggctgcaaatcagcaagttctggcatggggtgagacagttgcagaaagttcatttcctggaaactatgcccaggaactagcctgacatcatgagaaagctcccaacattcataatgagttgcatattaaattccaggggagggcactgtaggtgagatggtccacatttggaaatacacttttacagacattttatttagggagaagttctgacatgtcctctgataatttgaacttccttgatttgcatttgtacattgagaaatcatttattggtcaaaataaatgttcagcaggtgtgaatgctgtatccacaactgtttttttttttttttttttttttgagacagtctcgctctgttgcccagggtgaagtgcagtgtgtgatttcagctcactgcaacctctgcctcccaaattcaagcaattcttgtgcctcagcctcctgagtagctggtattacaggcacatgccaccatgcctggctaattacaacttaatttttaaatttgggcagatttacaaaactatcaagctattatcctgcagcatctttagccctaagcatgtcactatttgtactgtatttttattttatttcatttattttttgagtcagggtctcactctgtcatccaggctggagtgcagtgatatgatcatggctcactgtagcctggacttcctcagactcaggtgattctcctgagtaggtggtgtcacaggcatgcaccatcatacccagataattttttcatcttttttttgctatttcatcattcttttgcatcaacttatcacactgtttataatgtagtaaatacatgcaattctatggaccattaaataacgcaagaatgaagatcatcgcaaatatatgcccccatttttagtgccaaatttagaaaaaggtggaacattttgattcatacaatactttaatacttaatgcccaataaagagcattttggggcactttaaatccatcatcttaaaacaacgaaggaagaggtaagaaggaagtaatgggagatgcacaaacttgtgccgactaggggacaagacttatatatataaatattttttcttttcttttcttctttttttttgtcaggggacagggtctctctctgtctcccaggcttgagtgcagtggcgtgatcacagctcactgcagtcttgatctcctgggctcaagcgatcctctcacctcagcctctggagtagccgggagtaaaagcacacatcaccatgctcagctaatttttgtatttttaaaattttttgtagagatggagtctcactatgttgcccaggtcagtcttgaactcctgggctcaaatttttctcttgtcttggcctcccaaagggttggtgttacaggtgagccaccatacctaaccaaagacttacatatttattgtattctcacttctccagacactcctgagtattagagatgtacccctcatcttggagttgtggaatcttagacagaatggggttaaacaatgttttcgtgtgaccccatcacattccctatatggtcaatgtaattgaacatccgacgtaatttaacatccatcatatgagcacgttctttgttaatttaaatcaacagagaatgtgcctacacaatagctttatacagggctccataacatctctgttgagcatgaactgcatgataatttcatgttttgcatctatttgtccaggtagaacttagaattgatgtcgaccttcatgatttaatagtagttgttcttccccagattcaaagagatggagtctcgctctgtcgcccaggctggagtgcagtggcgcgatcttggcccacagcaatctcctcctcccaggttctaagtgattctcctgcctcagcctctggagtagctgggattacaggcctgagccaccacgcctggataattttgcatttttaatagagaggaagtttcaccacgttggtcaggctggtctcaaactcctgacctcaggtgatccacctgcctcagcctcccaaagtgttgggattacaggcatgaaccactgcacccagaccctgggttttttaaaacttgaaaaaacctcatgttataagaagacttaggccaccatgaagatttaaagaaataggtctcagttaaaggaaaaaaagaatcacaaaacaaaacactgaagaatatttagaaacagcataagaaatgggcaatatattataaaaattatataagttttaaacttttgaacatagatttttttcaaagttcataaaaaattggacaaatgtgcagtaaaagatcatagattccaaaaatttgagtggatgggcaatgaaagatcatagattccgaaagttatttgcattccctcacttccaacattttccattttggcttggagcattaccagatacaacggtcattttctgtgtggtttttcttgggctttgtacaaatctgtgtttttatttgtttattttgtcactgagctctttatggtgaagtggtttttccatgaagtttctgtgggtggtaaatgttgtcttgtggaatcattatttatggccatcataactgtgggtaataagtcatgttcaagcataagcatttgctgcactcctgagctgtgggtttcctgggtgcttcgtgtggctgtactcccaagtctggtgttggggactctgttagaacaaccaccagctgtctagcccctgcctcctcatggagcctgcagagggaagagcaagcaggaatgcgtgtgtgtgtttgttgctgtttgaaattctgtgagcgtcaaattgtcttgcttataaaagtcatgccttggcatcaaagaaaaagcatctgctctcccttgtgtttcttgaacttatatttaaggagtgcatcccaggtggcagcctttgttcctggctctagggatacagaaggaaactcagaggcaagaaaagtcccgtgcacttgggaagcttacacagagaggaggagaagaaaaacagtgagaaaaatccctgacatcttccatctcactccaacttaacatgtgagagtatctgcctcagccttctctcattccctctgtgtgcgtagttctctctttgtctcactctcctctcctctctctcctctttctcactctcctctttctgtctttctctgtatctttctcctctgtttcactttccttctctctttcctctctctctctcctcctgtctcactttctttcttactctctcctctgtctcacactttttctttctctcctctgtctctctcctctgtcttactttcattctcactctgtctcctctgtctctttctctcctctctgtctcactctttttctctctctcatcttactctctcctctgtgtcactgtctttttctctgctctgtctcactgtctttctgtcctctctgtctcactgtttctctttcctctgtctcactctgttcctctcctctctgtctcacatcttttctgttgtctgtctttctgtcctctctgtctcactctgtttctctctctcctctcttactgtctttctctcctctctgtgtcaccctctttctctcctttatatctcactctctttctccctctctctttatttgtgtttctgtctcctctctctctgtttctctctgtgattctcattctgtattactccttctctctccagtgtcttctgcatctctctaatggtccctgtcacggtttcagtttctgtctcattatccgtgtgtttggcccccctctttctctcagtctctgcctctgtgtatttctgtctgttccatctgattccctctctcttgctctctctttttctgcatggttcttttttctctttccctgtacctttctctttctctgtctctctctgactctgattgcctctcgcatttttctctttttctcttgtttttctcattcccgctctcattctctatgtgtttctctcctctctcttctctgtgtttctctctctcccctcttctgccttcctttttctttctctttatgtgtgcctatctcagtttgtttagcagcactgaaataactaaatagacacattgcttttctcacttaaattatagaggaaggtcttttcccctgctagtgcctagtcctcaccactttctcttgtggcttctcagtgtggtcactgcctgtgctttggtttcctcatctgtgaaaaggaagtaatgggagttgttccctcatggtgttgtggtgagggctgagttactatatccaaagtgtgtattgggaggctaggtggggagcggatcacttgaagtcagcagttcaagaccagcctggtcaacatggtgaaaccccatctctactaaaaattcaaaaattagctgggtgtggtggtgggcacctgtaatcccaactgctaaggaggcagagacaggagaatctcttgaacccaggaggtggaggttgcggttaggtgagatcacaccactgcactccagcctgggcaactccagcctgagactccatctcagaaaaaaaaaaaaaaaaaaaagaagaagaaagtgcctgggacagggtaggcattctatatgtttacctataaatatcaatatattatcattaatatatagcatttaatagactttagtttttagagcagttttcggttcatagctgaattaaaagcaaggtgcagagatttttccatatgccccctgttagggtcaccctgaccagaccattcccttcccctcccacagaccttacaatacagtctcttgcactctctccacagatcccccagggcaaaagagaaacccctccttcactgacccttccagtaactgtgcagacagttacaggatgcggttcacatgtgtgttaacctcgcataacaaagccggcaagaaacatctccagggtgaggtcaagacagctgcacccctgactcagatccccaaccccgacccagttctcctgcacccccgactcagctccggcaccccaacctggttctggccctataaaaccctacagtctgtaagtcgggctgcctcctctggttttctcaagaggtagtcccgcaggactgacaataaatcagcttgcctgaacttggctttattggcctcattcccttctcaactgtccttccaatgatcctttacatcctggtgctgaaacccgggaagatggtagagttcggcctccctttctccccttctactttcccagctcctcctagccaaacttctccttccagaatctgctagagacccgaggatttcatacagcttttccattgctagcaataacatccaacaccggggccgtgtcaggcctgagtaaaggagacttttgtcttcagtctggaacccttgtccgctctttccttcccgaaagacccagcgctgggccaagggttcccccctcccagcctctaggccctcggtatctctctttcagggacgcctgaacggggggatatccacttatccgacttgaaccatgggacaagggatgccttctcccaccgttctggtctctggccaagtctcccgtctctacctctgcctttctcattccactataggagcctcccaatccactccgtcgaaacatcccgtcctcgagtgtctcccccgtaaccttaacgcccttagcctccgttccgaaattcggccaaaaaggctcatcttttttgtaacactgcctggccgcaatataaactaaacaatggctcccaatggcctgaaaatggcacttccaattttaacatcctcagggacttagacaacttttcctatcgcaatgtcaagtggtctgaaatcccttatattcaggccttttttgccctccgtagccacccctccctttgtcagtcctgttccgctttccaaatcctcttcacctgctccaagccagacacatcctcagctcccccttccttctgacaattcctcctcctttgaccctgccgacttctcccggcccagtcaacatgataatcttctgcccaatcatcacgaccctccaccctacgctcctgccctcgctcttttccccactctttccaaccacccagcttctgattctgattccttctcatctccacctcacacccgctctcagactcagcacgcccaagtcggcccccttacttcccctccaagaggtgtccagggctaaaggaatcgttcatatccacattcccttctccctctccaacctttcccaaattaagaaacgtctcaggtcgttttcctccaatcctgacacttccatcaaaaagctcaaatactttacccaatcgtacaaactcacttggcatgatctccaaattatcctctcttctgcagtcctcccagggaaaaaaaaaaaaaaaagtgtggcttgcagctcaggcacatgccaacaatcttcatcagcaagaccctactaagcccatgggggccactgcagtaccccgggaaaactctcctgggactatcaacccacagatcctggctgggcatctcctaacggcacgatcacttgccttgccgcagtcctcaacaaagctgcccataaagccataaactttaaaaaacttaaagaaatctcccaaagggccaacaaaaatcccactgaatttctttcctgccttacagaggccctccaaaaacacacccatgttgaccccacctcccgggaaggaaagattgttcttaatacccattttatctctcagtctgctcctgacatatggtgcaagctcggaaaggtagaagacggccctcaaacccctcaacaagacctccttaacctggcctgtaaggtcttcagcaacagagatgagcaaaataaattagataaagcccaacgagattgtgctaaataccagctcttagcagcagctattcatcagcctacccaggctgcctaggggcacaaaagacccaatagcagtgaccctcctggtccctgtttaagtgcagcaaagaaggccagtaggcctgagcgtgccctaacctgcaagtgccaaaaacgccttggccagcctcccaacaaactggttactggaaatctgattgccctcttaacaagcaagctaacaggccggttcctcaaggccctggaaaagcaaagagtaaaaaggcactcatactgctgcagccccatggcctggccactgaagactgatggagcccagtgcccccggccccatctgccatcactacatgggagcccagggtaactctgctaatagcaggtaagccaatctctttcttaattgatagtggggccacctacctattcggctttacctgaatttttaggacccacttacccttcccaggtctctgttgtgggggttgagggactcatcttgtgtctgtgtgctactgaatctcttagttgttccctatttaataatattttttcacactccttccttatcatgcctcattgccccacccccatcctagaccaagatattttagccaaattcaaagcttctatcaccttttcctgtcccctcaaccagagtctctcctgctcctctctgctagtccggcccctgagccccctccccagcacccgctacccacctccctcattaacccagtactgtgttacaccaccaccccttccacagctgctcaccaggaccccatcaaaattcagttaaaagacccctctaggccagacgcagtgtctcatgcctgtaatcccagcactttgggaggccgaggtgggtggatcacgagatcaagagatccagaccatcctggctaacagggtgaagtgctgtctttactaaaaatacaaaaaattagccgggcatggtggcaggtgcctgtagttgcagctgctcaggaggctgaggcaggagaatggcgtgaacctgggaggcggagcttgcagtagccgagatcgcaccagtgcactccagactggatgacacagtgagactccgtcttgaaaaaaagagacccctctaaatttcccaactttccccaataccctgtttccctaacacacaaaagagcttgccacccatcataaacaagctctgctcacgcaatgttcttaaaccaacacactgtccatataacacccctatcctccctattaaaaaatctgacggctcataccaactcatttaggacctctgagctatcagtcagcctgtcctccctattcatcctgtagtctctaacccctatacacgtctctctgttgtcccctccaacatcacctactacaccgcagttgacctgaaagatgccttcttcaccatttccctacaccctgattcccaaaaccattttgctttcactcagactgtccctgacaacctacagacacaactcatgtggactgtcctccctcagggcttcagggatagccctcatttcttcaggcaagccctagctcaaaaccccacctccttggatctttttccccagctgccttcttcaatatgtagatgacctcctcttctgtagcccctccctaaaaaactcccaaactcacactgctacccttctcaatttccttactaataaaggctatagggtctcccccttcaaagcacagctttccatccctaccgtgtgacctacttagaagttcaactctcccttgggtcccaagcaatgaccctggcatgggcagccttaatagacagcctatctccaccttcctcaaaaagcgaaatcctttccttcctagggctatcaggcttttaaaaatatggattcccaactttgccctcctagctcaccccctttataaagcagccaaaggccccttcaatatacccctaaactcctcacataacatactccccaacttctgtgaactccaaactgatcttatcactgcactggctctgtccttacctactatctcccaaactttcactctctatactgcccaaaaccagtgaatagccctttgtttcttaagacaacaaaaaagaagatcccccttcctttgctcctatagcctacctctttgaacaactcaacagcacattcaaagggtggccaatctgtcttagagcactaacagcagcaaccattttagctgtagaaagcaggacactaacattcagccaaaataccactgtctacagtcctcataatctataagatctctcctcccaagcattaagctctcctcctccttcctggattcaattactccatgacttctttagcaaaaatcccaaattctgccttgccaaaagtgctcctctcaacccagcatccttactcctcgtatccttttcccttcctagtcattcttgcattggcatcttagaccacctgcaactatacttcgcaaacatttcctccaagcctttcaccaaccccaataaccagctattcatagatggctcctctttcaggcccagtggctcccccaaaattgctggatatgcacttgcttcttttgactaagtaattaaagcctgacgcctatctccagaacctcctcccaaaaatcagaacttataactctcacctgagccttaaccctttccaaaggcaaacaagtcaacatttatacaaactccaaatatgcatatcacatccttcattcccacactgccatctggcaaaagacagtattcctgactaccaaaggaacccccattactaatggcccccttatttaccaactccttcaggctgcacaccttccaaccaaagcaagggttatacactgtcaaggacatcaaacaggatcagataaaatctcaggaagaaacatgaaagccaataaggaagccaaaaaagtctccctttcttctgcccctgtctctctcctcctcataacccctacaatccaaacccaatattcccccactaaaaagaaagcatcactactacaacaaggaacctccttccaaaggaactagataatcaaaaatgaaaaactcatcctccaccaaacaaacaaagaaacaaacaaacaaacaaaaaattctatcatcccttcaccaatctttccatgttggtgtgcaccccctgtaccttctccttcacccatatttctcttcccccacctttttatcttactaaaaaacataacctcaaactatcatttatgctcagtcagttcctcccaaggggccctctgctctccatctattcctacacaccagttaagaggaacctcattatcatatttcccggcactctctacagacttaccagctttcctgaaagaaaaaaaaaattgcagactctattacccacctctaaaaccaactagactccctagcagcagttaccctacaaaaccgcaaaggccttaatttacttactgcagaaaaaggaggtctccacatcttcgtagatgaggaatgttgcttctgtttcaatttgtcaggcctggttcaggatgcagtcaaaaactaaaagaccaagctcccccaccctgtccaaaaacaaaaaacgaaaaacaaaccaaaaaaaaccaaccagctcctctgcctggccctcttggcccccttggtctctcagctcttaggcctcctggttactcccactcgtaggacccatcataaccgttctccttttcctactttttgcgccctgcctcttatgtctctttactcagtttttacagaaccgcgtcccaacttttacccacgaaaccatacaagatgtgatgctactacaagaatagcaccaatttcaaaacagtaccaggaccaacctctaccttccagccttttccctaactactgccccctctcagctcaaagtagccagatgaaaaatggtgcctcttttcctattatctattaaaaggctaaaatgtcaaggtcaccccaaccagactgttcccttcccctcccacaggccttacaatacagtctcttgcgctctccacacaactcccccagggcaaaagacaaacccctccttcagtgacccctccagtaactgtttgtccagacggttacaggttgtggttaacatgtttgttaacctcgcataacacagctggcaaaaaacttctgcagggtgcagtcaagacacctgtacccttgacccagctccccgaccccgacccagttgttctgcacccccgactcagctcccccaccccgacctggttctggccctataaaatcctgctatagtctgtaagccaggctgcctcctctaatgactcaataaagcttgcttgcctgagtttgggtctcctcatcctttctctcagctgaccttacacccacagcccccatacctgcacagcctcccccagtatccacatcccccctacagtggtgtatttgttgaaattgataaacccacgttgacatgttgccatcacccagagtccatagtttacattgggttcactcttggtgtttttcattttatggatttgggcaaatgtatggtgacatgaatccaccattgtagtattacacagagcagtttcactgccctaaaaattctctgtgcttcacctgttcatgctttcctttctccaacccctgatcttttttttgaaacagggtctcactctgtcacccaggccagactgcagtggtgggatctcagctcactgcaacctctgcctcccaggctcaagagattcttgtgcctcaccatccccgagtagctgggattacagtatgcaccaccacacctagctaatttttgtatttttagacgagacagggtttcaccatcttggccaggctggtcttggctcctggcctcaagtgatccacccacctcagcctcccaaagtgctgggattataggcatgagcgactgtgccagactaacccctgatcttttttactgtctccatacttttgccattttcagaatttcctcgagttggaagcccacagtatgtagacttttgggactggcttctttcacgagccatatgcatttcagtttcccccatacatgtgtcatgaggctttgcttatcccattttctaataacccaatggtgagccaaatcatgtgcctaagcttggggcaagaggaccctgtagaagagccctgtggccaagatgtggatggaaaaaggggtaaattatcgggcgatcattgctgcaatctgccactgtcattgtgtgattggtgctgcacaccaaccataggggacagtgtagggaatttgggggtgacagtcctttacctcacattgcttgaagaggaattcagatagatttagaatatgagagggagtcaatgcaccataaaaaagcatgaaaatgtggatagcttctaggaccctgaggcagcactccttttgtgggctcactggctgcgagggatctgttcctgcagacccctgattcagcggcagatgaataaacgtgcactgacacacagatattctattctgccagtccggctgagggtcctagccacttacagactccctgctgagtctggtaaacagttgcagttccagcattgaacaggtagtcagactaacatttattcagtaagattaattaacaaaagcttgagtcaataccattagagggtaattgacattgtggacttccaaagtaaaaagcacttaagcacccagggtacatcaaaggttaattttaagatcatgagtaaacaagctagctagatagcttccccacatccctggtgtttactactttaatctatttaagtaaagtaatgggaccaggccactttcaccgaagtcatgtgaaaactctcaggccatccaaaagggttttgtggctatgataactaatgtttttcccaccagtctgatcgaatctcagcacagctaagagaaactgtagctcacagccagtaaggaaacagagacatcagtcctacaaccataagcaactgaatcctctctaccatttaaatatgcttgtacgtagacacatcctcagagctttcagtaaggagcacaccttgctaacactctggctccagccccctgaaaccgaaacagaaaacatggctgtccccagactcttggcccacagaaactatgagataatgctgtgttgtgttaatttcctaagtttggggtcattgtttcctgtagcaatagaaaatgagttcacagtctaaagacaaaatatattttcattaaatttgcagtcaacctgtattttcaagtatctgtagtcattgggtctattctcttttttcttttttgacacagtctcacagtcacactgcccaggctggagtgcagtggtgcgatctcagctcactgcatccttgacctcctgggctcaagtgactgtcctgcttcagcccctctagtacttgggattaccggtttgagccaccgtgcccagctaatttttataattttagtagagaagcagtttcaccatgttagccaggttcgtcttgaactcctggcctcaggtgatctgcctgccttggctttccaaagtgctaggattacaggcatgtgccatgaaacctggcctttttttggctattattcatagtccgatcttgttttcttccacccgataaggtcagctactacattaaccaattctatattatctaatttcaagtgaattacaaggactggtcttactgatcttacccatatttcatccttgtgtatggttgccagacatgttaaaggactcctaattggatttgaatttcagataaacaatgaacttttgttttttcagtataagtacctcaggcaatgtctagaatgtacttgtactaaaaaattgttccttgcttaatgggaatttgaatttccctgggcaccctgaaattttatttgctaagtctcatggccccattttagtggaattctagattgtatgttataggattatctctttggtaatgttggagtgccaaaatcaactctgagggggttgtattctttaatcatgacttcttaaggtctcctactttctagaaacctagaaagtgcacaggaggccaggtgtagtgactctgcttgtaatcccagctttaagaagtccaaggtgggatgatcactggaggccaggagttcaagaccagccttgccaacatagaaagacttcatatctacaaaacattaaaatattcatcaggcatggtggtgcgtcccagttccttgggaggctgaggtgggaggattgctgcagtccaggaattcaaggttgaagtgagttttgatagcaccactgcactccacactgggcaaccaagcaagaccctgtctgaaaataaatacatacatacataaatacataaataaataaatttaaagaaagtgggcaggaaacagaggagacagaaggtggtttctaccctatctgggtctagaagccaggatcagagttgcagccagaaacaagggagagagttggttggagaattttgcttttgtggtagactgccttgccccagctttttggtgtgaaagccataacttggttacagaagggtccctactcatggcctgacttggttgctcctttgagatttagcctttccatggggtatctcgtacttttggaaggcatcaaatacccctgtaggaaagtattagagactcaatgatgtcctgcagagccccttccagtcctccctgtttggcagggagtctttctcagcattgccaaccttgttgaatttttttttttttttggagatgaagtctcattctgtcacccaggcagtggcaccttctctgctcactgcagcctccaactcccgtgttcaattgattctccttcctctgccttccaagtagctgggaccaaaggtgcatgccaccatgtccaggttatttttgtagagatggggtttcaccatgttggctaggctcatctcgaactcctggacttaagtgatccacccacttcagtctcccaaagtgctgggattataagcatgagctgctgcacccagcctatgtactggacattttttcagagacacactgtagtttctcaaggaagaatgcctgttcctggtcccagctgcacactcactttatagtgtatgctgtacttggtcaagtatattgatattgaaacacaagccagagtggatggaccttggttataaatcatggggcagctctccttcactgtcagataaaatccaaattctctattactacctccaaggtcccagcattgatgatctgttcttttcttcctgaagggacatcacccctggttcttagggggtctcctcacaagcttcttacaaatgcctttcctcaggaaggtggctccacaatgaccattttctttattaaaaaatttgcagcctacaatcagccccctctattattattattaattgttattattattatcattacttgaaatgggggagggtctcactatgtggtccagactggtttcaaactccttgtctcaaaccatcctcttgccttgacctcccacagtactaggatgagaggtgtgagcccccgcgcctgactaagtgtcctcttaaaacccatgaagtcttttagcgctgtctgcttttctctatggaattcaaatcgctaagcattcatgaaagtttagataagctggcaataaatccaacctttaggatcaatgcatgaaactgctctttttttttaagacagagttttgctgttgttgcctaggttggagtgcaatggcacaatgttgggtcactgcaatctctgcctcttgggttcaagagattctcctgcctcagcctcctgagtagctgggattacaggcatgcaccactaagcccagctaatttttttgtatttagtagagatgggctttcaccaagttggtcgggctggtcttgaactctttacctcaagtgatctacccactttggcctcctaaaatgctgggattacaggcgtgagccattgcacccagccaaaactgcacttaaaatccaatgtttggctgggcatggtggctcatgcctgtaatctcagcactttgggaggccgaggcaggcagatcacctgaggtcgagagtttgagaccagcatgaccaacatggagaaaaaaaccgcatctctactaaaaatacaaaatcagccaggcatggtggtgcatgcctgtaatcccagctacttgggaggctgaggcaggagaatgatttgaacccaggaggcgcaggttgcagtgacccaagatcacaccattgtcctccagcctgggcaacaagagcaaaactctgtctcaaaaaaagaaaaaaaaaatccaatctttgccccagttcctacttttgggagtgaactatgcctatttcaaactattgctgagcaagattgcctggtttctgcttcccctcatccctcttcttcaagttaaccagtcaggaagtgtaaagaatgatcaaggaaacctccaagttaacacagaaatatgtatatatggtgaatgctgtctacatgcagcttatggccccatagtcctagccatcatagcacatggcaaaattgtcctattgactctgctgtcagcctctgcatggaagaccaaataaaggtgctgggacagaaggatgaaaaggaatcctaggataaatatctcatcttcatcgtccctgggttggataattctgagggtctctcgctgaatctcagtgtttctgcacaagactcagcttcaatagcccagtggcaagctgcttcataagtacaatctctactggcttcctgcctttccctgtctctcttcctctttccctgatcaatgctgcctcaattacctccctaataaactacttggatttaaggtttgaaaaaaaatgcagcatcattctttttgactaaatttttaattaaacaaattttttttgagatggggtcttgctctattgaccaggctgtagaacagtagcggaattacagctcattgcagcctcaaacccctgagctaaagtgatcctcccacctcagcctcctgagtaactgggaccacaggtgtgtgccaccatgcctggctaatttttgtataatattttttgtagagacagggtctttctatgttgcccaggctggtctcaaactcccaggctcaatcaatctgcctgcctcaacctcccaagatattgggattacaggtgtgagccactgtgctgggtcgcaccatcattcctttttttttgttttgtgtggtttttttttttttgttttggaaatgaagtttccctctgttgcccaggctggagcacagtggtgcgatcttggctcactgcaaactccatctcctgagttcaagtgattctcctgtctcagcctcctgaataattggcattacagtcatgtgccaccgcacccagctaatttttgtatttttagtagagacagggttttgccttgttggccaggctggtctcaaactcctgggctcaagccatctgcttgcctcaactcccaaagtggtgggattccaggcatgaaccaccactctcggaggaagcatcattcttaatttcaatgtctagtctagacatttaaaataattgaacatattggatcgtatcaaaacaacatcttgttgaagagaatgaccctctccacccaacctgaaacagatggaggcagtgctgactttatctcaatcttaaacaaaatctgcttcactcaattttcttgtagacaggccgactgctttattagaaaacgggagaacattgatctttttctatgattctcttccgatcaccctaggtagaattcctttcactttctaacctgtgtctgtttcaacccaggatacattaagcttgttgtctgtgacactttattgaactttttaatagccacgactgacactgatcctctctgctgagagaggagctattctgattccattcattgtgactccaaagtctaccctggaagtcagatgctcagctgggattttataaatattccatgaacaaacgaactttggctttggggtaaaagagtcagttgcccatcatttgatagatccctggatattttttcataaaaacacctcagcaagttgcttattgcaaaatgacatgtgtcatatcctctatggagctgaatattgttaagcaaaatttatattaatgagaagcaaaaaaaatttgtctgttttgcttcacttcagcaagaattatctcctgcatcacaaatgcagggagcacttttgttctttattagcgttttttttttccccagaaactctgacattactaggacacttggtcatctgtgatctgcttaaaatctcccttcagctcctggaagagtgagtggttctgattctatttgagtgagatggtttatggagccctcttcatcccataattctgaagagtaacagtcagaacgtcttattaggaggcagctgaaatcgtctagggaatgtggctagggagtatcatcatctttacatcaaaggctatgcacagataacacgccaatcttgatttcacccatgagaaaagtgaactccaagaatttcaggaatgtaggcgtgtggatgataaacattgcatttattacaatttcactttatttcctagaagagggaacattatatttcctggccagatgctaacctttgaaataaatgcaaactttgataaaatagacctgctatcattttccttaggggagctttatcctcactgggtcactataaccagcacgacaatgaagtctttcatgtatttcttgtcctactggaaaaaaaaaacaacatagaaaagctatgtacaaggactgtattaagattcatctatgtctttcagagatggcaggcaagtgccatttctgaacaatttgggtgaattcagacacaagcaccctaccccgacaacaactcaatggacgccagaacattgcaaatcatgacctttaatagggctgcctttacactgctcaagaaacaacacctggtttggtcaaaggtttgttccttttcaatgtgtgttctactgttttcttttcctgcccttatgacagttgtgtgcattggcattattgcattaaatagacatgactgattagatagcaggaaccaaagtttagaatttagctaagtgtggctatgctactgtttcttttttctttwcttttttttcttttttttttttttttaggagatagggtcttgctgtgttgcccagggtggggtacagtggctattcagacatgtgattccaccactgatcagcacgggagttttgacctgctgcctttgtgacttagggtggttcacctggccttaggcagcctggtagtcttctcctcctgggagtcgctgaacttagtgcagacatccgatcaacatggtgcaccatagcccagaacttctgggcccaagcgatcccctgcctcagtctcctcagtagctgggaccacaggcatgctacttcttgcttttgtcaacataaaatggactcagaaaagtcagaacatatcaatatcagtaaatctagactgggcatgatggctcacacttataatcacagcactttgtgaagccaaggcaggaggattctttgaggcaaggagttcaaaaccagcctgggcatcatagacctcatctctacaaaaaaatagaaaataaaaaaattactcacgtgcagtggtgcatgcctgtagttccagctactccagaggctgagacggaggatctttcaagcttaggaggctaaagctgcagcaagctattactacaccactgcactccagcttaggtgacagaatgagaccttgtatctaaaagaaaaagaaaaaaagagattagtaaattctttagaaaccaaggttttaccatgagcagttgcacgaaggtggaaaacctttttgtgattataagtagggattctgaaagaagtcctcagagtgaatactcattccatggagaaacagaatgaatcaagagagtcctggaagctgggaggagaggaatctgtggaaagcagagtcacttaactaattcaccaatgagactgcaaaccaatggtcatggagctgccatggaaatctgaattacagacacttttattctttgtattttattgcttgggttgaaaatgtggccacgcgtggtggctcatgcttgtaaacatagcactttgggaggccagggcaggtggatcagctgaaatcaggagtttgagaccagcctgaccgacatggtgaaaccccgtctctactaaaaatacaaaaattagccaggcatggtggtgggtgcctgtaatcccaggtacttgggaggctgaggcaggagaatcatttaagaccaggaggcagagatcttagtgagctgagatagggccactgcactccagcctgggaaacacagtgaaactctatctcaaaaaaatgcatgtgccctttgtatgtaaattttcattctagggaataagttcacatctccttaacatatattcttttggtgtttttagacaattccagttcagaattcctctccaagtacttttacctgaagaaatctgcatctctggtctgatgcaagatctggtttccaggctgggcacagtggctcatgcctgtaatcccagcactttgggaggccaagttgggaggattgcttgagcccaggagtttgggaccagcttgggcaacatagtaaaagattatgtaaaaatacaaaaattatgtaaaatacaaagattttgtattttacaaaaattatccatggactggcgggtgcctgtagtcccagctattcaggaggctgaggcaggagtattgttgagcctgggaagttgaggctgcagtgagctatgrtcaccatcattgcactccagcctgggtaacagagagagagagagactcggtctcaaaaaaaaaaaaaaaaagaaaaaaaaaaagaaatctggtttctagagtttacggaatcatataatagcatgtttaatggagtgttccatctcacaaaatggtgttttgttgggagacagttatgtatgccctctgatattttcaaatctttatttaaaatgctgggagagttactatctggctttccatctgtgctgtttaatataatagccatccatttggggcagggtgttgatgaacagtatacctaccatcttccaaattattgcccacactttgtcttgttgaatattattaagatataacgacagggaagaccttccatttctgtccaccccacccacacctttaattggaagcacagatgtccctgaggcactgctatagaccatgaggtcaccgcaacgcaagggacatcaaacgggattgctctggctcaaaacagccagtcttgatcctggtgtgatgaatggctttggtggttgtcacagataagaacattcagcatcagcaagaaaagctgtaggtgtttcgctgaatgtaatgttttgttgttggtgtgctgttttttttttttttttcttttcctggatgcatagtaggaattgcaaatgcggggcgcagattgcctcatttgcacattatcaagatgaacaatctgggtaagcctagcatggaccagccctcccatagaagagggaggtgagatggagtggctaatgctttcgtaatgattcaaggcagctgccagaagaggcaaagccttttcagaacagcctgtctgttctgttcatagacattagagagaaaatacaactgataggtgagttggggaaggcttgtttggacacattttcttagtctttttttttttttttaacctctagttgaaatgggcagagttgaaagatcctttgacctattgtattctgaaactcaatggatcagcttaggcattgagaaattgattctaaatcaattttagtgtaggtaagttttctctctgttactctcataccctttcttctttcttctctccctccctttcttcctttttctttcttaaccaagaacgtatgtgttaaatggtgctaggaaaactggctagccatatgtagaaagctgaaactggatcccttccttacaacttatacaaaaattaattcaggatggattaaagacttaaacgttagacctaaaaccataaaaaccctagaagaaaacctaggcattaccactcaggacataagcatgggcaaggactttatgtctaaaacaccaaaagcaatggcaacaaaagccaaaattgacaaatgggatctaattaaactaaagagcttctgcacagcaaaagaaactaccatcagagtgaacaggcaacctacaaaatgagataaaattttcacaacctactcatctgacaaagggctaatatctagaatctacaatgaactcaaacaaatttacaagaaaaaaacaaacaaccccatcaaaaagtgggcaaaggatatgaacagacacctctcaaaagaagacatttattcagccaaaagacacatgaaaaaatgctcatcatcactggccatcagagaaatgcaaatcaaaaccacaatgagataccgtctcacaccagttagaatggagatcattaaaaagtcaggaaacaacaggtgctggagaggatgtggagaaataggaacacttttacactgtcggtgggactgtaaattagttcaaccattgtggaagtcagtgtggtcattcctcaagtatctagaactagaaataccatttgacccagccatcccattactgggtatatacccaaaggactataaatcatgctgctataaagacacatgaacatgtatgtttattgtggcactattcacaatagcaaagacttggaaccaacccaaatgtccaacaatgatagactggattaagaaaatgtggcacatatacaccatggaatactatgcagccataaaaaatgatgagttcatgtcctttgtagggacatggatgaaattggaaatcatcattctcagtaaactatcacaaggacgaaaaaccaaacaccgcacgttcttatagatgggaattgaacaatgagaacacatggacgcaggaaggggaacatcacactctggggactgttgtggggtggggggaggggggagagatagcattaggagatatacctaatgctaaatgacgagttaatgggtgcagcacaccagcatggcacatgtatacatatgtaactaacctgcacattgtgcacatgtaccctaaaacttaacagtataataataataaaaaaatgcgaaaaaaaaagaacgcacgtgtgtgtgtgtgtgtgtgtgtgtagtgtgtgtagtatgtgaccagagtatccatgctttggagcaaaatgagtttaaggaggaatgagtttatattttgtccttagtgttattttaaggtacaaatatgggtagtaacttgcagactacagatgggcttttctttcattgtaatgcatttggctgtatatcccttagtcctaacccctctgccactgccaattaaatacaaccattagtcattcagtggtttctgcattttgcagtcaaaaaagaggcagctcattttgattaattggctctttctttattcaggacacagaagctttctgagtttaagcttttaggcttggcaggacattgagacaattctcttgtgccagcatgttgcagggcaggttttgccactgagaaaattcatccaagagccccagggcttggggcagcaggagttcttttaaaaattggccaaaagaccggcagaacacttgaggtcaggagtttgagaccagcctggccaacatgatgaaaccctgtctctacttaaaatacaaaaattagcctagcttggtggtgcatgcctgtagtcccagctactcaggaggctgaggcaggagaatcacttgaacccaggaggcagactccatctcaaaaaaagggtcaaaataatgaactcattaagagttcaggattcgtgcagtagtggcctcagaaaatcaattttaaaatgttggaattaggtggaattagggatatggctcccaagtctagtgagaatttcatgctggaaactaatttaattgacacattttttttttctttttaatcctgtctatgtcttctgccaaagacaacaagaaggtactccgagctgcacaatcacgcccagatagataaagccatatatggaattttgagcacattgaatttaatgtataattctctgtatttgtgaatccagcctcacaggtagagacatttaatatcatctgccttttgttctttttcatgtaaactactatgtgtcaacatgctgtctttatatggctggccataagatgtctaagttcattctctttgcttaataagtgtgtgaatttttttaaaaaggtaggagagaggtaattgatataaatataaactgtaaatttccaacagatacatatgagtttatgtttatttttatttattttagagacagggtttcacagggttttgctctgtcacccagggtagacgacagtgttgaagtcatagctcactgcaacctccaactcccgggctaaagcgatcctccagactcagtttccagagtagctgggaccccaggtgcttatcaccagcctagctaattttgtatttttattttttgtagagataggttctcattatgttgcccaggctggtcttgaactcctgggctcaaggaatcctcctgcctctgcctcccaaagtgctgggattacaggtgtgagccaccattgtgcccagccatatatatgattttaaaatatggtaaaaatggggtgacaaaaaaattcaactaactttgcatagatgaaaagcatttctataactttggggatttggcccacagtcctgagcatgtagcttttgcctgcaaaacattcttaatcttcaaggagatgtttgaaaaattgtaggccgggtgcggtggctcatgcctataatctctgcactttgggaggctgaggcgggtggatcatgaggtcaggagatcgagaccatcctggctaacatggtgaaaccctgtctctactaaaaatacaaaaaaaattagccgggcatggtggtgggtacctgtagtcccagctacttgggaggccgaggcaagagaatggcatgaacctgggaggcagagctggcagtgaaccaagatcgcatgactgtgctccagtctggctgacagagcgagactccatctcaaaaaaaagaaaaattgtaatcatctgtggctatcattgtctcagagtatttacaaaggactctgagagacaatagggatgaactcctgtttgtgtttttcctctcagaggagatatttgaagtgagttttgaaataagtatagagacgagatagggattgaatcaataatcccatgtccaatattcattacctgataactgagtagggatatgctgagaaaagtgtcatgtgtttccttaagaaaatatgacctcagccaggactgagcaaaactatgaactggacgcagtggtcctcaaattccatgtttctttcttttcctcaattcagttctttcctcagcttccacttttcctttacttggtaattccttattatattaccttttgcttgtctttcctttctccaaccaaagctgctatccctacagtttttttttcttttgagggtcttgttctgtagcccaggctggagtgcagtggcacaatctcagttcactgcagccttgagctcccaagctcaagcgatcctcccacctcagcctccagagtagctgggactacaggcatgcatcaccatacccagctcatttttatattttttgtagggatgaggtctcactgtgttgcccaggctggtgatgaactgattatcctacctcagcctcccaaagagctggtactatagatgtgagtcactgctatcttgacaggtgaagccagctagacttcctgggttgagtagggacttagagaagttttctgtctagctagaggattgtaactacatcagtcagcactctaaaaatgcaccagtcaacactctgtaaaaatgcaccaatcagcgctgtatgtctagctaaaggattgtaaatgcaccaatcagtgctctgtaaaatgggccaatcagcactctgtaaaatggaccaataagctctctgtaaaatggaccaatcagcaggatgtgggcggggccaaataagggaataaaagctgaccatctcagccagcagtggcaacaggcttgggtccccttccacgctatggaagctttgttctttcactcttcacaataaatcttgctgctgcttactctttgggtccacactacctttatgagctgtaacgccatgagggactgtggcttcattcctgaagtcagcgagaccacgaacctatgggaggaactaacaattctggatgcgccaagtttgagaattgtaacacttactgagaaggtctgtggcttgactcctgaagtcagagagaccacaaacccaccggaaggaagaaactatggacacatctgaacatctgaaggaataaactccagacacaccatctttaagaactttaacactcaccacgagcatctgcagcttcattcttgaagtcagtgagaccaggaacctaccagaaggaaccaattctggacacattttggcaaccatgaagggacaatcaccaagtggtgagtaccattgggtcattttaacttgttattctgtcctattttttcttagaattcgggggctaaataccaggcacttgtcggccagttgaaagtgactaatgtggccaccagactaaagacacgggcgtcaggctttctgggaaagggctctttaacaacccctggacccttggagttgggaacgttggtttgcctggaaccagcttccactttccctatacttctgggcagagccaagggtcaacagagaggaaaaccattcagctctgaggtcctgacaacaaattggttgaccctgcagccatgagcggaactcttgaagtcacgtcgcccaagtgagacttgcacatctatcctgacccttgcatcctgagtcctaatgcctgtcagacaaacttcctcttgcctctcttctacaagtctagtcctgcttctaaaaaccattccctgtctctggtacttttctagtttctcctataagaatgatttctagataaacttcaggactctgttaacttcattaggcacccaggcttaccaatcagaaagacatacctttagcccaaaatcacactggggcagaggactttctggaattttccctcctcagactagcaggcctaacaaaagctattcctgaaggtagggtatggggagcttcagaaatggtatctttcctattcatataagtgaggacaaaaggcatcactcttccaactctggagatcctttccctccctcagggtatggctctccacttcatttttggggcataacatcattataggacaggggtaaagtcccaatactaacagtagaatgcttaatgcttaggaccctaacaggttttcgagaatgtattggtaatggctactaaatccaacttttcttggtcctctttgtggtctaagaggacagacaagggtgcaggtttttgagaatgcatcattaagagccactaaatctgaccttccttggtccatcttgtggtctaggaggaaaagtagtgtttctgctgctgtattggtgagcacaactattccaatcagcagggtccagggaccattatgggtttttgggcaagaggtgtttctgctgttgtgtcagtgagcacaactattctgatcagcagggtccagggaccattgtgggtttttggacaagaggtgtttctgctgctgtgtcagtgagtgcaactattctgatcagcagggtcgagggatcattccaggttcttgggtagggggagaaacaaacaaaccaaaaccacagatggttttgtctttcagatggaaaacactcaggcaccaacaggctcacccttgaaatgcatcctaagccattgggaccaatttgaccagcaaaccctgaaaaagaggcagctcaattttttctgcagtacagcctggccccaatattctctccttgatggggaaaaatggccccctgagggaagtataaattacaatactatcctgcagcttgaccttttctttaagagggaaggcaaatggagtgaaatatcttatgtctcagctttcttttcattgaaagagaatccacaactatgcaaagcttgcaatttacttcccacaggaggacctctcagcttatcctcatctactagcctccctatagcaccccttcctattgatgataagcctcctctaatctcccctgcccagaagaaaacaagcaaacaaatctccaaaggaccacaaaaccacaaaaaaccccaggctattggatatgtccacttcaagctgaagggaggggaatttggcctaacctagatacatgtccccttctccctctctgatttaaagcagatcaaggcagacctggggaagctttcagatgatcctgattggtatatagatgtcctacaaaacttcattctcacttggagagatgtcatggtattgttagatcaaaccgtggccattaatacgaagaatgtggctttagctgcagcctgagagtttggagatacctagtatcttagtcaagtaaatgatagaatgacaactgaggaaaagtgacaaattccctactggtcagcaaactgtcaccagtatggatacccactgggacctcaactcagatcataaggactggaatcacaaacatctgttgacctgtgttctacaagcactaaggagaattaggaaaaagcccatgaattattcaatgatgtccaccataactcagggaaatgaagaaaatccttctgccttccttgagcagctatggaaggccttaagaaaatatacacctctgtcacccaactcactcgagagtcaactgattctaaaagataagtttattacccaatcagctgcagatatgaggagaaagctccaatagtgagcctttgtccctgaacaaaatctagaggcattattaaacctggaaacttcagtgttctataatagggaccaagaggaacaggccaaaaaggaaaaatgagatcagagaaaggctgcaggcttggtcatggccctcagacaaacaaaccttggtggttcagagaggacagaaaatggagccaatcacccagtagggcttgttacctgtgtggtttgaaaggacaccttaaaaaagattgtccaacaagaaacaagctgcccctttgcccatgtccactatgctgaggcaatcactagaaggtgcactgccccatggacaaaggttctctgggccagaagcccccaaacagatgatccaacaacaggactgaggcctggggcaagtgccagctcatgtcatcaccctcactgagccccaggtacatataaacctggagggccaggaaattgacttcctcctggacactggcttggctttcttaatgttagcttcttgtcccagaaagctgtcctcaaagtacgttaccatccaaggaatcctgggacagcctgtaaccaggtatttctcccacctcctcagctgtaactgggagactttgctacagatagtaagtatgcttatctaatcctacatgcccatgctgcaatatggaaaagaaaagttgttcctaacctctgggggaagacccattaagtatcacaaggcaatcatggagttattgcatgcagtgcaaaaacccaaagaggtggcagtttcatactgccaaagccatcaaaaggggaaggagtggggagaacagcagcataagcagttggcagaggcaggcaaagaccagcagaaaggagagagaaagagacagaaagtcagagagagagagaggaagaaacagagagacaaagagaaggagacagacagaggaagaaacagagagacagaaaatcaaaaagagaaaggaagagacagagtcagaaagacaaagagtcagaaagagacaaagagtcagaaagagagacaaaaaagaagtcaaaagagaaagaaacagaaatggaagtagtaaagaaaaaacagtatactctattcctctaaaagccagggtaaattaaaaacctgtaattgacaattgaaggtcttttccataaccctataacactccaatgccaccttgttttcagtgtaaacaaggatgtagcccaaaagcactgaggccactgacaacccatagccttcctatcaaaaatccttaacccagaaagtttcctaatggaatctaaatcttaactaattaccatacaaaggtccgaccagacctaggaggaactcccttgaagacaggacaatagaatgatagatggttcctcccaggtgattaagggaaaaagacacaatggtattcagtaagtgataaggaaattcttgcagagtaagagttaggaaaattgcttaataattggtctgctcaagggtgtgagctgtttgcactcagccaaaccttaaagtacttacagaatcaggaaggagccatctataccaattctaagttaatatggactgaacaaggtcttattaatagcaaagaataattgaaatcccaaacttacaagattttcaacaaaagtaagtttgctaaaagttaacagtataacatgtattatcctaacttctaatcttatggaaatcagaacttatcactgtccctcaaagctcaagtctgtcaacacagagccatacaactaatatccctacttacagggttaggaatggctactgctacaggaactagaatagctagtttatctacttcattatcctactaccatgcactctcaaaggatttatcagacagtttgcaagaaataaataaatctatccttactttacaatccaaaatagactctttagcagcagagactctgcaaaaccaccaagacctagacttcctcactgctgagaaagggggactttgcaccttcttagggaaagagtgttgtttttacactaatcagtcagggatagactagatgctgcccagcgtttacaggaaaaggcttttgaaatcagacacctttcaaactcttataccaacctctggagttgggcgacatggcttctcccctttctaggtcctgtgacagccatcttgctattactcaccttcaggccttgtatttttaacctccttgtcaaatttgtttcctctagaatcgaggccatcaaggtacagttgtttttacaaatggaaccccaaatgagctcaactaacaacttctactgagaacccctggaccaacccactggcccttttgctgacctaacgagttcctctctggaggacactataaatacagggccccatctttgccctattcagcaggaagtagctagaatggtcatcacccaattcctaagttggggtgtcctgtttagaggggagattgagaggtgaagccagctggactttgtgggttgagtggggatgtggaaaacttttctgtatagctagaggattgtcattgcaccaatcagcactctgtaaaaatgcaccaatcagcactctgtgtcttcctaaaggattgtaaattcatcaatcagaactctctaaaatggaccaatcagcactctgtaaaatgaaccaatcagcaggatgtgtgtggggcaaataagggaataaaagctggccacccgagccagcagtggcaacccgcttgggtccctgtccacactgtggaagctttgttgtttcgctcttcacagtaaatcttgctgctgctcactctttgggtctgcactatctttgtgagctgaaacactgtgagggtctgcagcttcattcctgaagtcagtgggaccatgaacccactgggaggaacaaacaactctggacatgccacctttaagagctataacactcactgcaaaggactgtggcttcacttctgaagtcagcaggaccaggaaggagcccaccagaaggaagaaactacagacacttctgaacatctgaaggaacaaactccagacacaccatctttaagaactgtaacactcaccatgagggtctgcagcttcattcttgaagtcagtgagacaaagaacccacgggaaggaaccaattccatacacaatctgatgttttaaaaatttcgggtaatgataaattgcatgtatttattctttttatattattaatattttatttttatttattttttcttattttaaaattcagttttctttttaatttttttcctttttaaatttctttttcttttttattgtcctttgggtaaaaaaaccctgacatataaacattgcatagatttttggtgtacaacttgatgttttgaaatacgcctgccttttggaatggctcaattatgctaatgcacattacctcatccacctacctatttgtgatgagaacactttgagtagattttatcagtaattttcaactctaaaacacattcttattaactacagtcagcacaagtacaatagattctttgaacttacttcttctgtcaaattgaaattttgtatccttcgaccagcatctctccaagccccccactgctctctgagctcctaacaggcatcattctaccctttccttctatgagatcaactttttgagattccacatagaagtgagatcatgtggtattggtgtttctgtgccaggcttattttccttagcataataacctccaggtttatccattgtgtcgtaaatgacagaattccattcttttttaaggctgggtagtattccatgatgtatatgtaccatattttctttatccattcatccagtgatggacactgaggttgatttcacagtttggccactgtgaatagtgctgtaaggaacatatgcactgacacacctttaaattagaataaaaattctgattttagtaagttaaggttaaatcccttaaacttagagattcagttaagttccttaaataagggtaagtccttggaagaaggaattaacttcaggagtcttatagtctccatcctctgcaaccatttgcctctgagtacatgttttcagatttccctcctggaagagcatctactttaggttttaaaaaatattgcaggctgggtgcaagtggctcacgcttgcaatcccagcactttgtgaggctgaggtgggtggatcatgagatcagaagatcaagaccatcctggctaacatggtgaaaccctgtctctactaaaaaataaataaataaataaattatccaggcatggttgtgggcacatgtggtcccagctacttgggatgctgaggtggcagaatggcatgaacctgggagatggagcttgcagtcagctgagatcatgcactgcactccagtctgggtgacagagcgacattccttctcaaaaaaaaaattcaataattttagggaacaggagatgtttaattacatggataaattctttagtggtgattcctgagattttgatgaacctttcccctgagcagtgtatactgtacccaatatatggtcttttatccctcactcccctcccacccttttttctgagtcctcaaagttcattgtgtcattcttatgcctttgcatcctcatagctgagctcccacttgtgagtgagaacatatgatgtttggttttccattcctgagttacttcacttagaataattgtctccagctccatccaggttgctgcaaatgacatcattttgttcctttttatggctgattagtattccatggtgtgcgtgtctgtatgtatatgaaaatgtgatatagatagatagatatagatctatatagataaagaaaatatgatatatattgatatctatagatccatagatatcaagagtgtctcacttcaagcaccaagcactgctgctgaatgggagcagaaatgcccaatggaatgctctcttggcttctcactttgcatagaatctctatctatctatctatgtatgtatctatctatgtatgtatctatctatgtatgtatctatctatctatctatctatctatctatctatctatcacattttctttatccattcattgattgatggatatttgggctggttccacatttttccaactgtgaattttgctgctataaacaatgtatgtgcaagtgtcttcattttttgtgtttttgttgtttgagatggagccttggtccatcactcaagctgaaatacagtggcacaatcttggctcactgtaacctctgcctcctgggtttaagtgattctcctgcctcagcctccctagtagctgggattacaggtgtgtgccaccacacctggctaatttttgtatttctagtagagataggatttcaccatgttggccaggctggtctcaaactcctgacctcaggtggtccacctacctcatcttcctgaagttctgggattagaggtatgagccaccacagctggccgccagtgtcttttatatataatgccttcttttcctctaagtagatacccaggagtgggattgctggatcaaattgtaggtctatttttagttctttaaggaatctccatactgttttccacagcggtggtacattcccactaacagtataaaaggattccgttttcactgcatccacattaacatctgttgttttagcctttattttatgcaacgtgagaagccaagagcacattacattgggaacttctgctaccattcagcagcagagctcggtgcttggagagagacactcttgagcttgaggagatgtctgggagatccacgtgatcttcaaagacccctgttgtgttgtactgggaggtggatcctgaatccacccagagaagcctggccaataaaatccgtttgctttccaggagccccttggtcttcatgtctttggtgtgtgcactcttgaacacttgccaggcacacagggtgcatgacaacaagcctaatattatcctgatcatggttgataacctgggtattggagatctgggctgctatggcaatgacaccatcaggtaaggcggtttcatggcgagtcatatgttcatcagttgttcaggtttgacaggctgacaaacttgtacaactgcatctatgtgcaaaaccaaatggattcattgggattttttaagttactttaagctttttgatagctttaaattatttagatttaaattgtaaaaatagttttacaattacatttttaataattttaatttgaatctcattcagtttttaagaaataataatcgtccatcttcacgggatacacagtgaggtttggatacgcacaatgtatagtgatcagatcagggtaatcagtgcatccagtgtctctaccattaacgaggatggtcaaagtaaaagcgtggctgtccggacccaagtcctagctctgtatttactacctctgaagtcttggagaagtcgccgaagctgtctgtgccttagttttcttatttgtcgaatgcagagaaggctttatatccctgagtttatatgtgtaaagaacttagaatagtacctaacacacaactatcctctattatgcagtctattatgaagcatgatgattgtatatacatgtgcatatacagatataaacatataaatattatataaatatgtgatatatttcatttatgaatatattctataatatataaaatatatatcatacatttattgtattatatatcatatattatgaatatatgaacatatattcaatatataaacatatatgagtatatattacaaatatataaatgttattcatatatacatgaatatatacatatttatatgtctatgaatatatattcatttttatataaatgtataaataaaatttatatacatttatatataaatatatttaaataaatatataaacatctatatactttagaaaagtataaataaatatatgtaaacatatttatttattttatataaatatttatataaaatgaatatatattcataacataaaattatatattataaacatatttatatattcatatttataatatataaatatgttcatataaatatattcataaatatgtataaattaataagtatatatttatatattcaagcatatatattcataaatatataaatgtgaatatgtacattcagcagaattcattctgtttcctaatttggcgagtcaacagattctttaaggtgatgagcttgtatttttaacaatgggcattctgaaagaagaaaaacagatatgcagcagaaactcagagctttgtagtggattatagaagccacctgtattagctatgcttatactgagcttaggagtacatcattataagacatacatcatacacttttaagatcactgcatgtgtgactaatagatgctgaaggtagtcatcacagttttcaacaacagagctaggagtcatgaaaaagtagtcgccaaaaattaaccattgcttatgagaaaagaagggaggactcacccaaacgcacagaaacatggtgtccataaatggcagatatttatggagattatgtcagtgtgaggtatcagtgttttgctgaaaatactagcaatttgagaagtgagattataatgtgaaatctaaaatcaggcacacgtgcccctggaatgcagtttataatcttttttctttgcaaaataaataatgttttaaaagttggtaggtgacttccatatctcaaaaaaaaaatcagatacatgccttggtaaagctggaaattcttcttgcaccagttacctgtcataatttctctcatgaacaaatgtagaaatcattatattttattttcatccaagaggtgactgattctttttccagaagtctctccagcctccagaattctcttgttaaattattttttaattgacaaattatagttctgtgtatttatggtgtacattatgatgttttgattcatggatccattgtggaatagctaaatcaagctaattaacatgcacaaccacacatacttattatttatatgtggtgagaatggttaaaattatggcaatttcaagaatagaatacattgttattagctatagtcaccacaatctgcaacagatctcttaaatttattcctctatgtgaggaataaatcaaatagaggatttattcatgtttggctccatgagatgttatatcctttaacatacctattctcaacccttgccccagcccctgatacccactattctacttctgagtttgctgttttagattccacacataagtgagatcatgcggtatttgtctctctgtgcttggcttatttcatttaataccctttcagttcatctgtgttgttgaaaatgatgggatttccttcttttgaatatttaatcatatgacagttttgcaacctatgcagactgcagggaaatgtatctatcaaattggtgggtgggtggtctgtaagtagttaggcataagtaaggtctgtaagcaattagcctcgataaatcagaccccaattccttaagcattttattttgtaaggctgaagtacagtgaatggacaccatatagcggcacccatgtatacgagccccgcagaacaacagctgcctggaatttcagtcatacttcaccttgacacgggcaagaaagaaaaatgaactccatgtgcagttacctgctctgggcacctggaaatcataataaacagggatgttgtttatcttcagatctctctctctctctctctgtctctctctctctgtctctctctttctcttctttctgtctctccatctccttctatgcctgtctctgtcacccctctctgtctgcttgtctatctgtctctgattgtctctctctatctatctctttctatttctttctatctctttctgtctctctctctccctctctctgtccatctgtttccatctctttctgtctctccatttgtttctatgtctgtctctgtctccccctttgtctgcttgtctctctttctatatctctctgtgactgtcggtctctgtctttgtctctctttttgtctatctcattctatccatttctttctatctctttctgtctttccttctctcaccctctgtctgtctctttccatctctctgtttatctctctctttctacttctctctctccatctctctttctgtatctctctctgtctctttctctcttttcatctctctatgtttttctctctttcttctccctctgtctgtctgtctctctttacccacctcattttctgtttctctttctctgactccctccttctgtttaagtctttcttttcatttctttctgtctctctcttaaactccgtatgtctctttccatctctctctctctctctcatcttctctgtatgtttgtccctctctgtcattctctgtctccctctttctgtctctctttctctctccttttttctgtttgtctctctctttccatctctctctctctttgtgtgtcctaccctttgtctctttctctttttatctctttctttctgtttgtctctttctatccttttctgttgctctcattctcatctctctctctctctttcatcttttctttctgtctgtctctctctctctgcctcgctttctgggtctctccctctctccctgtctgtctctcctctctctttccacctgtgcctttctgtttgtccttctctgcctttctctcactcttcctctctgcttcccccgcctcccaccttttccttctcttcaatacaccttccctctcccccttcaggacgcctcacatccactgccttgccagggaaggcgtgcgactgactcagcacatctctgccacctccatctgcagcccaagctggtccgtgttcttgacgggaagatacccgatctgatcaggtatgcaaactggcgggctctgctggactctgccctcaagttaggatgtgaggaaataaaaacatggcttgactatgttaacaagtgataaagggctgggcacgatggctcacgcctgtaatcccggaacttcaggaggccaaggtgggaggattgcttgatcccaggagtttcaaaccagccttggcaacagtaagaccgcatcttcacaaaaatgtttttaagtaagttgagcatggtggcatgtgcctgtagtcccagttacttgggaggctgaagtgggaggatcacttaagtccaggagtttgaggctgtagtgagcatgatcacagcattgcacactagcctgtgatagagcatgtcttagaaagaaaaaaaaagataccaaggaaagaaaagaaaaagtacacctgtgcataggtgcactggcatacacaacaaccaccggccacatcaaaattactgcacttctcagagatacaagatcaccctgtgtggttcagttttattttgatgcaataacagctttttatctgaattccaagtcacaaggtgtatgtttgggtttcccaggtcaacagagataagctctcttggaatgaagtaattaacacaagtgtttacacatgcagtctgccaccagaaaatagcttttttttctttcaaaccacaaagtcatagctgggcccagtggcttacatctgtaatcccagcacactgggaggccaaggtgggcggatgacttgaggtcaggagtttgagaccagcctggccaacatggtgaaaccctgtctctactaaaaatacaaaaattagctgggtgtggtggcatgcgcctgtagtcccagctactcaggagggtgaggcagcagagtcgcttgaacccgggaggcagaggttgcagtgagccgatattgtgccattgcattccattccagcctgggtgacagagcgagactccatctccagacaaacaaacagcaacaaccaaaaacccacaaagtcataagccaagaaatagctatcagatttttggacaaatttcatcagcattttacccatgaagacagtagtattatccacttgctcaatttatatcaactttattttatttattattattattattattgaaatggagtctcactatgttacccaggctggagtgcaatggcacaatgcacagtgcaatgtgcgggatgcggtacgggggtggaagtgggtggggggatggaagtggcggggaggtggtgggccgaggcaggtgaaaagcttttgaagtaagcttgcatctgcaacttgttaacaatgctgggagggtctgcttaaaattttagcctatgtgtgacttctaaatagcttatactaaatgttaactattacctatgttatgcttattattttaaattttattacttaatttaattttccttccccactgatgcctgacaaggagactctccaactctccattattttgtgattaaaaaggtggctgataccctgaaggaacactgggaaaccatggtgcctgtgccctaccaattctcagaactgaatcagggcaggatgtggctgaagccttgctgtggggtgttcccattttgtctgtgtgacaaggaaggggaactctctcagccctggggtcctaacgagtagaggtaattactatcaggctgccaaaggccactaactttggtgctttcaagtttccaaggaatgcatttaagatccaataaatttatctaccattccagattattaaaggcccactggttactccactagctgctaactttttttttggtggggggggggggaattcctgtggataaatgttgattgaaatttgttttatttccttaaagtttataatttattaattctcttgtaaaaaatccacacaatggctgctgctgatgtcattgcagaattgctactttgtcttgtagcaggacgagctgtgcacaaaatcccccagacaccaagatagtgaaggaagtggctttaatcagctggaagcattggcagactaatgtcttaaaatccatctttaatcagctggaagcatcgacagactaacatcttaaaatccgagcttgtcaggtgcccaacttctgtcccttttaagggctcataactctaagggggtctgtgagagggtcgtgatcaattgagcaagccagggggtacatgacaggggctgcaagtactggtggtcagagtgaaacagaacagactgggaagttttatagtgtctttctataatgtatagataacatcagttgctaggttggggtgggattttaactaccaggcttaggtcaggcaggcccaggcctggttttcgttctgcttcctcggtttcgggtctggttcctaggcactgggctacctgcctttagtttcgctttcctttccttttctgagtataaaacaatatgagagggtctgtctctcttctctcattttccccctttgagactctcactttttattagtgggagttcttactctcatttttgctacttttgtcttcctgtgtaatagattgatagtgattcacatagtacatttgtactgaagcattttggtgaacaaaggtagcaatgaagctttttatcctttgaagaagtacaggtagtaaaaaagggagcagtaagcaggttcctattactattataactcctactgtagagttttaaatcctcctagtgctgggaaccaatttctaaacatggccccaagatcatatccatgccacacttgcaggggcacatgtgccagtttcgttttatttttaactatgtcttcaactacttgcccctgatcatctatgtgtagacagcaattagtaaggttaaattttccacaaacccctccttcagctgctagcaagtagtcgagagctcatctattttgatagatagcattcctcatctgagtttcttgccaggctagaacagtcacggcttaaccagttttattactgatgatttctaaaacagcttgcaactgtataattcagttgaacatgtaaatgggggtctggtatccccatgagccattttgtgcccaaggggcaggcccatagtattgtataattctctcaggaagccattcatcgtctttccaattacctatggctatgctttgcttttcgtgagaagcacagacagggaagcgtaggagttcacctgtttttatgggtattaggaagaaagatgttttaatagtgccaattacacaactacctgtccactggtcaggtagcttagcataggctctatgtccacatatccagtataacccagtgggggcagtccagtcctggtgggattctgggtgggcccaaatggtctgcaactctggaaatttactgaatggatttttctctgtgtggtttgaactcccccatgtaactgttttgtggtactgttatacagtttctgtcctagacaactaagccgtcctacaggatgagtaaattcttttccttttctagctatgcaatagtgtacaataattgagacttttagaacccagaaattgtcagggtggttcttttgggctgggaattcatcaggaactgggtctgtaggaactgattcttgggcttcccgtggccatcgatctccttttaaagttcctccacaaacaacacagaatgacttttagagactgggctacatgctcggttaattgcaaaaacaaatttttagtttttcctggaatctcaggtactggcacatttagttcatcatagaaagtctgaaatactggttctggacagcgtttctgaacctccccttttattaaggtatttactctagggtctagtccttttccatcaatgcctagagatatgtgttctcctttttcctactttgggtataagggatttgtaattaccaattctaaagggttgcagcttccacttgtgcaggacgagctgctttttcctttttggaaaacgagatctttttcatcttttttccaagaaacccagatgacacaagaccagtgctgacacacttttgtacatgaatatgattcatcgcagatatacttattttctgctgtgtaacttttttcccaatctaaagaaccgcatcctattccatactgattactattaatagtggcaaaagcatcaaattttagggttacatgcttggggacccctctttcttgtgtcttagctattattttacttgtgtcacctagaaaaggaccagttcttagtcttatttcaaaaaactgtgatcatgggaggttcagaggagtcacagcacacatcaggctgatcacttcctggattacagactttgtgctgagtgttattatataaacatgttccttctggagttcctaggcactcataataactatagaacaaaaagattgttttaaccttttgtcctacctcagtgacctgaagtatgcactgaaagcattcctctgtgtgggaagaagcagcttttaccacacaaatccatgttataaggaaaataagtcccacgacgattttcctcatgctttggccgtatgtagaccagtcagcttccggatgtgactgcagcggggcttgtcatccccctcagggtcactttacagggattgtccaggcttggtttggcctaggtatcagcagctgcaggctttaggcagctgtggtgaatccaggtcagaattccttctacttttacagctgtgagggtggtcaagataatggtctgaggtcctttccaccatggccacaaaggggctatgttccagttgttgatccacacatggtgacctggagaaaaagcgtgaactggggagaataagctgaccaggcacttctcatttacccaagttgagattgtctgggtaattttccccaagacctgtagctgttgctgcaattcaatttcacccaactcttgcggagtacctgaaagtcctcacagtataggagaaggcctgtgatataatatttcataaggggagtatcctattttcatagaggagatgcaactaattttaaacaatactataggaagggactgcatccattttaatcctgtctcttgacatactttccctaacctatttttaatagtctgattaattcactccacctttccggaactctgaggtcagtaggcagcatgtaacttccaagtgattcccaatatctttgccgtctctgtactacatcagcctcaaatgccggcctactatctgagccgatccatagagggagtccaaacctagggatgaggtctcaaagaagcacacaggttactacacaagctttttcagttcttgttggataagcctctacccacccagagtaagtacacattagaaccagtaaatacttgttacctccacatttgggcatctttgtgaagtccacttgaagatcttcaaaaggagctgctctataggcttttatgccaggaggaacagaggggccttgctttgcattatgctgtcatcaggtaacccatcactgtgctactgtcttagcaagagctggcaagtgtgagatatagaaataccagcttaacagcttttcaagtgagtcttggcctgaatgggtagtttcatgtacagccagcgtgactgtggctcctagcagctgtggtacagctattctcccatctagtaactttatccatcctttttgtattgcttgtcctccctctgcctgaagaaagtctttttcctctttagaataagtagacacaagatcaggtgtttgagggagcaggaaggctgtgactgatgcccggtaaggagtagacgctgcttttcgtgcctctgtgactgctcgggagtttcactggcttactgaggtggaagctcgctgatgtcacctgcagtgcataactgctgccttttgggctttccacactgcctctaataattgcagaatttctcgttgatattttaagtctctgcctccagaatttaacagggctttttctttatataatgctccatgtacttgaatggttagaaaggcatgttgagagtcaggataaatgtttacagtcttaccttcactgagttctagagtccgagtttaagcaatgagttctgctttctaggctgaagtgccctgagcgatggcttggcttcaataacattattcaaggttaccaccacatatccggaacatctttctcctcgtggattgatgaagctgctcccgtccatgtataactcccagtccactgatgcccatggctggtatcaaagattggatctgctagaatggactcagtccaacacctccacacagctatgttcaatcagggctatccaatactgggagaaaggtggcaggatttagggtgttacagacttcaatggttatgtaggggttttcacatagcaagctctggtatttggttaatctagcatttgttagccaattgtgtcctttgatattctttaaacttaccactgcatggagggcctttatacttaagttttgtccaaggattagcttttctacttcttgtgctaacagggctttagctgccagggctctcagacatggaggccagccttttgaaactccatttagctgttttgagaggtaggccactggtcttggccagggccgcacagtttgggttaaaactccaactgccattttttctctttctgatacatagagtgtaaagggctctgtcaaatcttgtagtcctggagctggggtgacataagtttttcttttaacttacaaaaggcttgctgttgtagaggctcccattcaaagggctctcagtcacccccctttgtaatcccatacaatggttggctagcactgcaaagtttggaatccataatctgcaaaaccccacagctcctagaaattcccttacttgccttctggtttcaggttctggtaagctgcagatgacctgctttctttctgaccccaggctgcactcccctttctgaatagtgaatcccaggtagtgtacctgctgtctgcaggtctgagctttcttcttggacaccttatgcccacagtcctccaggtgcagggcatccatcccttttgcacaaccgactgaatgaatcttcaggcactgtatcagatagaactttaggtgttggcttccctctgcgggtggagcaagaaccttctttaactaactgtccctttgctactagtaatgctgctgcctgtcctcttaaccactgtggggggtctaaaactagctgtaaccaggaatctatatatgagaactgatctgggtgtcctgccttacaagttactttttgccatacctttgagacaagacacctgtccaagcttccttctgatggccaacccacctgtaattctggccaatctatttcacacaaagttctaagttttcctggagtcataatgactccatagtctcctttgaatcctttcttgaaattctttaacatagttcccaatgggattggcttactttgaggctggcccatgttttctcaagacaaaataccatgcccacaccacacactcaccacaaaacaaagaatgggtaaagagggcacacacacacctttaagatttataccaaactaaaatcagagtatcaggccaagtcaaaatcaaaatcaaagtatcaagcaattcaagtaaagtcaaaaccggaacaaaagtgccaatacaggcacaccgtgggtgatcaggccatgcttccactcaaatggagtgggcaaatttcaaagactagtcttaccaagtttcagatgtctggactccaagtgccagttccttcctggtgttcagccactgtgttaatcctccgtgggggcccgttatgtgctgctttggtgaggcgttccaccggggcaattgcctacccatgagtgttctttgcatcgcgtaactcaggctggctggagtcccccacagggatgctccacagggtaagcctaagccacctaaggggctgcctcagccgtccatcagtcacctcacttccaggtcagggaaccaagaaatgtagcaggacaagctgtgaacaaaaccccacagacaccaagatagtgaaggaagtggctttaatcagctggaagcattggcagactaacatcttaaaatctgagctttcaggtgcccaccttctttcccttttaagggctcacaactccaagggggtctgtgtgagagggctgtgattgattgagcaaggcaggggtaacgtgacagggactgcaagcaccagtggtcagagtgaaacagaatagaatgggaggtttcacaatgtccttccatacaatgtctggaatctatagataacatcagttgctaggtcaggggtggaattttaaccaccaggcttaggtcaggcaggcccaggcctggtttcaggtctggttctttggtttcaggtctggttcctaggcgccgggctacctgccttttgtttcacttttctttccttttctgagtataaaacaatataaagcaatatgagagggtctgtctctcttctcttagtctgtttttcacccagtctccacctcttctattgccagaaccaacagtggcctttgcagtcttcctgactttctttgttctgttctttcattccacttgctgtttccctgggatctttttcttctcacatgtggtgattcttgaaagtctatgttggggttcatttttctttgcataatgcaaagatttgtaaattgtgccaaaaccagttgtcttaaccaccaccaaaatgagttctgaatatgaatacaaacaggacatcctggctaggcatgggggctcactcttgtaatcccagcactttgggagtccaaggtgggtggatcacttgaggtcaggagttcaaaaccagcctggccaacatcatgaaaccctgtctgtactaaaaatacaaaaattagccagaggtggtgacacatacctgtagtcccagatacttgggaggctgaggcaggaaaacccttgaacctgggaggtgggtgttgtagtgagccaggtttgcaccactgcactccagcctgggcaacagagcaagactccatttcaaaaaaaaagaaaaaagaaaaaaaaaaaaccaggacattctttggctagcatttttctggatttctgtcttaagtactgttgccttcctggcgtgaagaacattaatgaccatttgttgcctctgaagaagtcggtacctcatgactttcctatgtagatagttgctgtgtcattcatgttggcagctgagtaccctggtgcaatcagagctactgcagccttgaactcttggaccccacagcaatcctcccagttcagcctccatagtaggtggcactgtagacacgtaccacgacacccagctcatattattttgtagggaatgagtcttcctatgttgcccaggtcaatctcaaactccattcccctagtgatcctcctgcctcagcctcccaaagtgctggaattacaggcataagccactgcaccaaccctaatttccattttctaagcatatcttcctgtgccagaaaacaagcacctacagacacttgtgccatctgctcagttgctttgctctaaatataaggccctgtgtcatcaggatgcaacataccagacatttaaacagtgtattaagagcaacaagtctgaacatggccagtagccaaccaaaagggtttatgtttgtcaacaatagatagaaactgaatcaggactgttgcaataattcagcaaaatttgtctgaacccagaaaatctgagaggtctcagttaacttagaaagattattttgtcaaggttgaggacacgcccatgcatgacacagcctcatgggaccctgatgacatgtgcctaaggtggtcctggcacagcttgattttatacattttagggagacatgagacatcaatcaacatatgtaagacatacattggttcgctttggaaaggcgggaccaattgaagcaaggctggaagtcttgaggtgggagggggctttgaggtcacagatggtgagacacaaacagttgcattcttttgactttctgcttagcctttccaaaagaggcgatcaattatccatctatctcagtgagcagaggggtgactttgaatacaattggaagcaggtttgcccttagcagtttccagcttgagttttcctgagtcattctgggggcccaggatattttcctttcacacatactggcactgagtgacatagcaattggtctcctggcagtctggaaatttcagcaacagctgataagccattgcctctcctgagcagccaagttctacaaagcaaagagaagtagtcatcaacaacctcggagcagcactgctttgatccccccagaatgtgccagagctttgatgaagtctcttatttccttcttaattcagcctcatgatttaggtataaacacttgtgtgagattgcccagagctgccataaaaatcaccataaacttggtggtttaagaaaacagacattcattcttctacaattctggaggctagaagttcaaaaatcaaggtgcttcctccgaggccctgggtagaatccgtccttgccaatccttgaaattccttggcttgtggacatatcactccaatctctgcctttgtcattacatgaatgtctacgctctgtgtctttaaatctctctctccttatagagagagattatagtcatatagaatttagaacccaccttcatctagtatgacctcattttctcttgatggcatctttaaagaccccagttccaaataaagtctcatttatttggtaccagggtttagaactttaatgtaacatttgaggaggtcacaatttaacccactgcaccccaaaataccaagaagaggacctgggacttgaaatgctctgtaacttgctcagaagaacacagcttaggtgttactgggctgggactagcgccctagccatgccaaccccaaaactccatgtacatcaaccctatggtgttgaagtaggaggcgggacttgactccagaggtggggttggacgccagaccagattgaggactagctaaaacagggcagactgaagcagctttcagtcagacatgcccaccagtgtgccatgtctatttaccaatgccatggcaacacctgggagttaccacccatttccgtggcaatgacccaataactcaatgattacgaccctttccctagatatttctgcataacctaccccttaatctgcatgcaattaaaaatgggtatacactttgggaggccaaggtgggcagatcgtttgaggtcaggagattgagaccagcctgaccaacatggtgaaactctgtctttactaaaaatacaaaaatttggccgggtgtggtggtgcatgcttgtaatcttagctactctggagacttaggcaggagaatcgctccaacatgggaggcggagtttgcagtgagatcatgccacttgcactccctgggtgacagggtgagacactgtctcaaacaaggaaaaaaaaaaaaaaaatgggtataaataggactgcaaaactgccctgagctgctactctcttcctagggggtaacccttttctgcaggaacagtcacaaagcataacactgttgcttcaataaagcagttttcttctacctctggtttgcccttgaattctttcctgggctaagccaggaacccctgtgggctaagccccactttgaaactcacctgccctccatcagtgtctttcaaaggtgtaaaccaggagtaacataatcaggtgtgttcatcaatttgcaattgcaaaaatgtggaaccagcctaaatgcccaccaatcaatgggtggataaagaaactgtggtatatatttgtacaaagaaatactaatcagccatgaaaaggaatgaattaatggcattcacagcaacgtggatcagtttggagactaagtgaagtcactcagaaatggaaaaccaaacattgtatgttctcactcataaatgggagctaagctataaggatgcaaaggccaggactctggggactctgggggaaagggtaggaagggggtgagggataaaacactacaaattgagtgcattgtatactgctcagtgatggatgcaccaaaatctcacaaatcaccactgaagaacttacttatgtaacccaacaccacctgttcccccaaaacctatggaaataaaaaaattagaaaattatgtgtgtttgatttatttcaatggactgtattattgtgctgtcttcactaaggagtaatatgaaagtgtcaagtgaaatagaaataactgtcttaatattaactattaaacaaggatatctttttcctaagtgatttggggccaccatatcagaccttatttgtctacaaaagaattccttacaaaggctgagcaatttctctgccagtctgttctaagatctctaaagcattcattttctcatcactgttaggaggatgttcattttgaatttagaaaaccctagaacagaatcttaggattttagcctgagaaataacttctgaaatcattttctcaaatgctcttatatttgcagatgaagaacacagagtgtggagacatgaagaggctttggtgagtccacactgtaaagggagcaggaccatgacgtctggccccaaggttgtcaaccccaaatgcaagatccttctccctccctggctccggtccttccattttctttaaccacatggcaaggagaaggtagtagataaaagcaagctatgtataaccaagggaacacgttcttttccacacagtggtgttcagaggtggaaagaatgttctctagggtttgacacaatggggtgaatggtaattgttcttcttgccagctaaatatctttggacatattccctaatstatctgtacttcaattgttccctctgtgaaatgcaactgaaaagtatattaccagacttacaaagattcatggagataatatctgtaaaagactttgcacatagcccataggcccataggtagctcttaataagtattatatttccttttctagtggttattttgaaaataccttaagattaaaattgaaagaatgtcatctatcaaaatgatacaaacctttgccattggtctaaacactccaaactcaatgcttaagtaacctatcatgacccattgcatcgagaaaataccttcacctgccttgtctatccgaggtggtcaatattttccatatgccccttaagcccttaattaacctttttccctaaatagaaagataaattatacaattcagtctgcaaatatagttacttaagggatgtctattatttcctcattctgaattatccttcaaataatttatattctttccttagcatcaaggaatgcaagcctgattgagcacggcgtgtttttaatcattacatgaatttaaacactaggtggcatgctaatatagctgcctgcacagctagctccaaattcctaatatgataaatgtgtacatttatttcatttttgtaaagatagcatacattttaactttattctcagaagaggtatttgaaaaggaaagatatatttttcaacctatattgtttgattgtatccagaattcacctccacctactttatccatctgaggttgtcagtattttacataagctcctcaaatccttaatagctttgaaggaatggaatgcattgattaaagttttagacaggaataacataaagcaaaaattagagaaagaaagacagacagaagggtagcaggggagagagagagacagaaatatcaaagtgaatcatttattatctggatttttctaagcacaaatattttaattacaactagtatgtgtgatctgtgccactcattcatccatcagaggctgagcataaatggagaacctagaataatccaggcactggtctaaagttggagaaatgatacatagtttcttttgtctcaagaccttgttcagaggatgagaaaagcaatgtgaattagaattgagatgggccaacaataaataatctcaaaaggcttggctgaaagcagcaaccatacctcagatcttggctataatttagttaaggaagcagtgtatttagcagcctacttggaatgattttttcaaatccaaatattttatgatatttgatttgggtggtacagggatttaaaagcaaatcccaaattggatggacgcacaaatggtaaagactcctaggatcagggttgtatgattttccttactcagatctgcaaatggcctcagaagccctcctctgactacagcagatttccttggtactcttgtaaaaaacaggcgggagatacaggaagtacacattgcatggaagtggaagcacagtttgtgcgttggataccttggggtcatgttatgggatgatggtttgttgcccggccacctcttggtgatgataattgagcaatgaacattttccagcaacggatttcaggatgacacacagattctgcagaatagaaaacttggattctgaatcagaaaaatcctgcctctttaagtatgccttgtttgattttgcattgcatttagatgacatgcaagtgaaactcccacttggaaaatgccaagtatctacccacatctgcagcctgtattcattctttaaacagtaaagactcccttcctcccttcctccctccatccctccctccttcccttccttcctttcttccttctttccttccttcttttttttttttttctgagacgggatcttgctctgtcacccaggctgcagtgtagtgctgcaatcatgattcactgcagcctcgacctcccaggctcaagtgccctcctgcctcagcctcccaagtaattgggaccacaggtataagccacgactcccacctaatttttgtatactttatagagatgaggtctcactatgttgcccaggttggtctcaaattcctggactcaagccatctacccaccttggccttccaaagtgctggaatcacagacataagccaccatgcccagcctatttttgtttcttctaagcagagttttgattagcaacccagattccctaattttaatcccaagacccaaatttagatccctgccaaagaaatgctgtcaatagtatagactcaggaaatacgcacttttaagagcaaactccttcagaaatctactcttgctatcaatataagtaataatgacttaagcaacctcagttcttggcatcttttctttgtggatagaaccaggtatagtttgcaaggccgagtgcaaaatgaaaatgctcagctcttggggaaacaggtaaaaataaaaataaaatgcttacttctgttaaaacaaactaaatatggcccaagaaggattccgtacttctatatgtgagtccttgtggatgaagggtatcctagtttaataggcagccaaaattgaaaacctaactaataatatgcatctgtaacaatagctgagtgttggccaatcccaggggacatacttcaaccactcacagactgctgagtgttcatactgtgttcaaatcaggcaaacaccgagctgtaatccatttcactgtttctataccgcacttctgattcctgtacctcactttacttcttttgtctataaatttattctgaccacaaggcacccctgcagtgtctctgaatctgctgtgatcctcaaggctgcctgattcaataagatcttttctttgctcagttaaactccaccaaattttacttgtctgaagttttcttttaacagctctctgttccaaaatgtttaaggattttgacagggcgctggtagagcagaaggaaaaacaacaacaacaataacaactttttcctctgtcttcctcagttctctagctactgccctggaaatggaactgaccaaagaaccaaagaaaagcagagtttattaagatttgcagtgtacatccattgtggtgaaagtcagtgatgagtaactcaaaagtgtggttaggacatggggcacatagaacaaatcacccaagaacaatacatttgtcatgaagaaaaaaggcaaaggaaaaaggccttttaagctcctaggagctgcaaactttgggaagataaatacaggagggaagctaatggaagataaaggcaaattgagtaaggtttgttatgtagattcctctaggcctgtgtctctggtaattaacagtctaagtctactttcaggcgaataggagagtgcagagagttttttttttttttccactcccttagctgacttgcttttattgtttgagttaaaaaagaacgagatcatgtcctttgcaggaacacagatggagctggaggccattatccttagcaaactagcacaggaccagaaaaccaaataccgcatgttctcacttatacataggagctgaatgatgagaacacatggacacaaagaggggaacaacacacattggggcctttcagaaggtggagcgtgggaggagggagaggatcaggaaaaataactaatgggtatgtgaacccagaaagtctgagacaggtctcagttaacttagacagtttcttttgccaaggttgaggatgtgccgtgacacagcctcaggaagtcctgacgacatgtgcccaaggtggttggggcacagctccgttttatacattcagggagacatgagacatcaatcaatatatgtaagaagcacattgattcgatctagaaaggtggaacaacttgaagcaaaggcaggaagcctggaagcagggagggggattccagggcacagataggtgagacacaaacagttgcattgttttgagtttctgatgagcctttccaaaggaggcgatcagatacgcgtctctcagggagcagaggggtgactttgactagaatgggaggcagaggccctaagcagttcccagctggacttttctctttagcttagtgacttggaggccccaagatatattgtcctttcacaggttctgaacttaatgcctgggtgatgaattaatctgtataacagctgttttcttttagcagctcttgcttctcaattttctttggctcaaaataatgcttatcccaaagtgatatcttttggggtgacctatcctgctctcccacaagagccttaagcaaagtttagagctgtcatgaaaagaccaccaggatgcgcaaatagtgtaatagaaaggagagttttattggtgatatcgctttgcaaactggggagtgagtgtccctggcataaagaaaagatgctctctctctgaagagggaaaagagattgggtctcatgcctcatagggatcatattacacaatagagtcatgcatattcagcaggtttggtggagaagctatgcatatttatgaggggagctgagtgcatgcccaacgggtaaacatatacgtaacatatgactcatgttcattttggggctatgttttagtattaaaatgaggtgaggcatggtggctctttcctgtaatcctagcactttgggaggccaaggcaggtggatcacttgtgctcaggagtttgagacagcctgggaaacagggtgaaacctggtctctacaaaaaataaaaataaaagaattagctgggcatggtggcacatgcatgtgatcccaactatttgggaggctgaggtggaagaattggttgggcccagaagactgaggctgcagtcagccaagactgcacaactgcactccagcctgggtgacaaaggggaatggtgtatcaaaaaaaaaaaaaaaaagaaaaaaaagaggtgggatttggttctttatgtgaagaggtgaactatatgacacaaacagtgtgaagcctcttgagctgctgaaactggagtaagttctgcagttgcttattagaaagaatatgggtaaagctgcttctctgtctgaatagtgatctgggttgtcaagacttagaaggggccgggcacagtggatcatggatcatgcctgtaatcccagcactttgggaagctgatgcaggtaaattgcttaaactcaggaggttgagaacagcctggacaacatggtgaaactccatctctgcaaaaaatacacatgctcaaattagttgagcacagtggcatgaacctgtggtcccggctacttaggaggctgaagtggcaggatcacttgagcccaggaggttgaggcttcagtgaggcatgatcataacactgcactccagcttgggctatagagtgagaccctgtttaaaaaaaaaagtgttagaagggtctgataatttgcctgggtagcttgtcttcttacggaatttagcaagagtgtggtttttcttgtagccgtaggaatttaggaagttgccaccctagcctctctgtgaactcagcctgtagcaaacttttctttccttaaccttagggtctgttttagttgctaaaggggcatttattttggtctctctgatgacagggacttgtgcaacagtggaggtccttcatcttgaagttcaccctgaacatgggtaatatcacccagacaacacctggagccttcacggtaacttagggcaagtgtcactggttttccaaaacccagccgaaatttcaggtctcactagacaggcacggccctcttcttagactgttcatgtttaatgcaagagctatatttaagctgagcgccaaaagatgtgttgaattaagtttagcctaaagctgctccctgacatattttaaggtttgcttaaaggtttctccgtacgcagtgcactgaaacctaactggatgtgtaaacaggctggaacctacttttgtgccaatcacaaagttttgtccgaaggaagtcaactatccaaaccatgctcaaataaggccaatggtcagctggaaagaatttggctatttctgtacctcacttctgttttctgcacacaactttcctttttttgtccataaatcttctctcaccatgagacagcgccagagtctctctgaacctactctggctcagtgggttatccaatttgtgaatcgttctctgctcaattaaactctgttacatttatttgacttatttatttttatttttatatttttttagagacaaattctcactctgtcacccaaactggagtgtggtggtaccatcatagctcactgcaaccttaacctcctgggctcaagcaatcctcccacctcagcttcccaaatagctaagactacagatgccacccacctgcctcaactacccaagtagctgggaccatagatgtcagcatttgttttttctggctttcactaccagaggaatccttttgcaactggcagatctgatggaagaacctatgcattgcaatccctgggttggagatgccactgagatacctcagtggaaatgccaaggaaggagtggaaagctggatgacaggagactgttggtctgtaagtgaggcagtagcactagggaatcctatcttcagccacactgggtggttttctttaaatttatgtctcatagtagttcaagtcatatctggccttctggggacacagtcccaacatgtttcttttgttgttgttgttttttgttttactcctctgatgttacaaaagctccaatgtatacttcttttaaggtgccctggctcatgcctgtaggcccagctactcgagaggctgagacaggaagatggcttgaacacgggaggtcaaggctgcagtgagctatgaatgcactactgaactccagcctgggtgacagaatgagaccctatctaaaaagaaaagaaaagaataaataagacagtgcatttcaatgaaggagcattctcttaaaatggaagagaaaacacttttaatggatgggcatggtggcacatgtttgtaatcctagcactttgggaggccaaggtaggaggatcgcttaagtccaagagttagagatcagcctgggcaacatggcaaaaccctgtcttgaattcctggcctcaagtgttctgcccacctcagcctcccaaactgctgggatactgtgcctggccagaaaccttgtctttacaaaaaacacacaaaaatctatggtggtagtccatgccatcccagttaatccagaggctgaggtgggagaacagcttgagcctgagaggttgaggctgcagagagtcgagatcatgccatagcactccagcctgggtaacagactgagaccctgactcaaaaaaccaaccaaccaacaaacaaagaaaaaaagaaaacaacaacaaaaaaacagagtaagccaggcttggtggctcatgcctgtaatcccagcatgttgggaggcaaaggtaggagaatcacttgagcccaggaatttgagacctgcccggacaccacagtgagtctccatttctatttatattaaaaaataaaaatttaaaaaacagagtacctcagagtcacatatcattagtgtagatacaactattacctacaaggggatgaagtatgtccccagcagagtgagaactgatgatatctcttcagatttagttgtttaatctcatgaatcaacatcagttttgttgattcaatggtgcaaatataaagtttgatgaaagaaaacggtcctagtgttaggtcatagggtgactatagtttacagtaatctattacatattcaaaattgctagaagaaaagaattcaaatggttctagcataaagaaaagacaagtatttatgatgataaagagcccaagtactcatttgatttttacaaattatgtgaatctattcaattattacgtgtatcccaaaaccatgtatatccattatgtgtcaattaaaaaataacaaagaaaactccaaaaaacccatgacctttgaagtagatttcaatgtttcatattgaatatttacatatcatcatatttacatattgaatatttacctactgaatatttacattttacatattcaaaaagcatgtaatgagtggagaataccctcagggaacatgcttgcaatgtggataccatatttgtctttctcttatgttttagtggagaaagaaataaaaaagtactatttcctacttcattagtaccaggagaagtgtttggcagtagaaatagaggaatgttagaggaaatttcccaagtttggaaaggaaggaaagattccctgagaaagtggtgtttgaaggtaaatctgattggtaagtagagtaaggggtggtaatatgtagcactgggtctttctgggtagagtttagcaaggaatggagtagggaaactgtaaccatgagatcagcttgaaccagttcaactcaattgtttaaccattgtttaagctgttatacagttgcaacagaaccaacactgcatgttgtgtagcctgggcacaggcaaagggaaaaagctttgacttccagtcacacctgaaactgatgatgcttccctgtggaaccaaaaacagctggacatgaccggaaccaggatgctgaaacccattcagaagcaaagggtctactcccccagaagacattgtgctgaaatccactattccatatcttattataaatagccaaggttaaagccctttaattaaaacttgccacaccagcacttccacatacctctttttcttttcttttgtttgtttctttctttttttcttttcttttcttttctttttttttttgacagggtcttgctctttcacccaggctggaatacggtggcgtgatcatggtgcgctgaagcctcgacctcctgggtttaattgatcctcccacgtcaacttcctgggtgggtagctgggaccacaggtgggcaccatcacaccaggctagttttcatattttttgtggaaatgtggttttgccatgttgcccaggctggtcttgaactcctggcctcaagcaatcctcccagctcggcctctcaaagtgccatcattacaaacatgagacactgtgcccagtcacacacttcttaacccataaatatttgagctaacccccagatcagggagacagatttgagccctgcctcctgtctccttgccagctgacctcacaataaagccttaaaaaggaaaaaaaaaaaaaagaaagaaagaaaaagaaaagaacaaagaaaaaaaatggtaccctacagcacagcatggtggctcacacttgtaatccaagcactttggaggctgaggcaggtggattgcttccgctcaggagttggagaccagcgtgggaaacagcaaaacccagtctctacccaaaaatacaaaaattaactaggcatggtgatgtgtgcctgtggtcacagctactcgggaggctaagatgggaggattacttaaacctgggaggcagaagctgcgctgagtcaagatcgtgccactgcactccatcccgggcaacagagtgagaccctgtcttaaacaataacaacaaaatccccaaagcaatgccctagtattggcttatatacatgtcaagcagcaagcccattgctcagtaacaaaatgggtgacgcaaccctgaagagcagtaagaaccgcagtgtggctgggagacacagaatgaggtaaacgatggcaaacactgaggatggagaggtagcaggaaagaagcaacaagtacagatgattcagacttcgtggtctgagatgaggagcttcttctttatcccaggaacagtggaaaaccatgaaatgggtctacacagaacacagcrtggtcaggtctataatctcatcttctactgtgtccagagggttttggactagrgaagaataaggctgggaattgaggygktacmagttagtgggrtgttgcaatccagaaaggaagagatgatgaaatcttccacctggctcctracattataagagctggcaggatgtgggctggtccaggagctatttagggtcargccacaagacaagaagattaaatgattcatgattaagtgatttccatagcctccaataaatcgacttcatccttgttttcttgttctattattcatccttgttttcttgttccagaccaccatctctgaaaaagaagtaggattattgtgagatgccttctttgatcttttgttctttccttttttggggggtggggacaaagtctgactgtcacccaggctggagtgcagtgacatgatgttggttcactgcaacttccacctcccagtttcaagcaattctcctgcctcagcctcccgagtacctggtattgcagatttgcaccaccatgcccaggtaatttttgtatttttcatagagatgtggttttgccatgttggccaggctggcctcaaacttctggcttcaagtgatccacccacctcagcctcccaaaatgctgagattacaggtgtgggccatcacttctggttgctctatgcttgaggggctataatggaaccaaccaaggaaagaacatagcagcaaatggccgctcctcaccttggtatttctgggaattgtatgaggctactgtagaaaaatggtttgatgaaatgaagcctgtgatcacctagtaaattgtagagaaatggcttccacatgtgagtctgtcatttcccaagtacatgaccttaaggtgaaatggataaaacctctggcttggaaaggtagttagtataattaggaccatatttatttttcaaatacagagttgaagaccactgttgttttctgtaatgcatgtctaaatgggctcggagggactgtgaactctggtcctggaactgatttcataacctggggcatggaaatataaggttggaagggagcttgaacaggtctgtacagaacccactgctgattgcttttgatagaagaaatcactcacatgcctctgtagctgggtccattttaataagacagtgcagcttcctcctcagctttgaacatctgtggagacagagaataaggattccaatgccatcttttaatgatgctcttacaaaacttttgactaggtcgcagggcttgcttctacttttgtcaagctgcattaagcattctttcttcccatttgcattcaccaacccccttagcttctctgtgtcctctccaaccaaatatttcttttttaaaaataggcatctacacttgaccaaaagttgaatacatgtctacctaaggatgctaaaagagttctatcatgattttcgtaccactgacctatattttttttgtcttgttaataattgtaacttccaggccaggcacaatggctcatccctgtaatcccagcactttgggaggccatggcaggaggatcacttgaggtaaggagttcaagaccagtctggccgacatggggaaaccctgtctctactaaaaactcaaaaatttagccaggtatggtggcacacgcctgtaattccagctaattgggaggctgagggatgagaatggcttgaacccaggagacagaggttgcagtgagccaagattgtaccactgtactccagcttgggcaatagagtgagactccatctcaaaaaacaaacaaaacaaaagaaaacaaaaaactacattgtaaagatattctgtgaatggggttatactattaataaatgtttggatcaacatctgtagtccttttaggaagtaataagaaggtataagaggagaggaaagagatctttcattgcaatcgatgtgaggctttgggtgtgagctaggtttctggggttttctcagagagaaactgcaagagagagagaggcatgcttatattccatgctgccaagagtggcaaagatatgatagcattgcttcagcagtaatggtgacggtgagagggagatggtggcaggaagtgaaaaagcagtattttcccagtggagcacttttttttctttttaatagagaaggggtcttgctatgctcttcagtctggtctcgaacttctggcctcaagtggtcctcccacattggcctctcaaagtggtgggattacaggtatgagtcaccatgcctgacacacagtggaacactttggtgcttggctataaaaattattcccaagaagcccaaagatggagaaaaaaacatgtgttgtgtttaccaaaaacaagatgtctgctttgcatataacccaaagggagatcacctgggggcccctgccaaacatttgaagaaaaatttgcagaaagttccaagtccttcaagagtaaagacaaaagagtaaaagaatacaccagcattcatgatttcaaagtttgatttgctcccgaatcaaaagccagctttttcattttgattcacatctatacgttcacaaaagccatgctcattttgcaaaactcttatgctaaaaaggtgatgcttcctccttctaaatataaacccatttctctacaagtgtctacttttcctactttctgacaaagggaagacaatctaccctgtctgtttaattttttacatgcagcctctctgacacgtggaattgggagactggggtgccaaatctgttcttttcagtgtgtaattttatagctttccccagagcagaagaggacaagtcaggcaagctgtaaagcagaggggaggaatttcatgggacaattttattatgccatgaaaccaagacagaatttgatgccaatgaccatcttggacaggcaggatccagagagagatgaagtccatgacctgcagaagcacagtttgaagaaggcatgctgcaccctagctgttctctttgccctgaatggttcctgccttatgggaccaaggaaatgggtattgctaaaaaggtaaaattggcagcttctaggaaacttctggaggaatgtcctgaggcccctaacaagtcaacatatgttgggtggctaaaaataacaagactttattctcccccagttcagaagacccgagactgagaacaaagcatctcagggccgcgattctccagaggctctaggggaggctccgtcttgcctctccgagctcctgggggctccaggcatcactaggcttgtggccgcaccactccagtctctgcctccatctccacatggactgctcctctgtgtctttgtctgtgttacttcttctgtctcttattttattgtatgtatttatgtattttctgcatcaaatcatccattgctcttctgtctcttttaggaacacctgtcattttatttagaaatcactgtaatctagtatgatttcatctcaagatccttaactaattacatctgcaaagaccctatttccaaataaggtctcattccaggttttaggctttaggatatggacagatctttctgggggccactgtttagtccactacatttgtattcacttgcttccggagcctctaggggaggatacttcctgccacttccagctcctggcatccctgggcttgtggccaaatcattccagtctctgtcctcatctccgcatggcccttctcctctacgtctgtctctgagaatggcaaaggtctggcaacattgcttcagctgcagtggcgacattgagagggagatggtggtagcaagtgaaagaggaaaattttcccagtggagcactttttaaaaaaaatagagatgaggtctttctatgttgtccagtttggtcctgaacttctggcctcaagtgatcctcccacattgacatctcaaagtggtgggattacaggtatgagtcaccatgcctgactcccagtgggccactttgatgcttggctataaaagttatacttccaagcagaagcccaaagatggagaaaaaaaagcatgttgtcttcaccaagaacaaggtgtctgctttgcatatgaccccaagaggacacctcttagaaagacacaggttgttggatttggggcccatccagataatccaagatgattccatcttgagatccttaacttgattccatctgcaaagaccctatttccacataaggtcctattcccatgttctctggttaagatgtgaattcatattttaaatatagcttccctgggacatagttgcccagcatccagtgatgtaactggatttctgtgtgtttttaagagctgaaaaggaaggaataattatcattcctgaaatacccttggtattttagcaaaataaaagttccccagatttgcttaatgaatgtttacaataagtagcagggaattaagtatcatggctgtgatttgagacttggatgaattaagggaaaaacttaaaagttgttaaaaccttactacctcctgccagctcaccagacacctttaatgcttcaggagcagcacacgaaatacaatttttgaaggaggagagttccaggtccacatctacaccaatggaaaaaataactgggtggaaaagactaggaaaatgaacagagagtaattttcaagatttcctttcattaaaaaacaaaacttcttgttcagagataaaagaaggtggagcactttttttgtaaagggaagaattctaagatttggggtgaaacattgatatgagcagtaaatgaatagctgaaaatataagataaacttagtggaaagggattttgaaattattctttgaaactccctgtttcatatgctttgttaatctgatttatttacatgcatttaatgtgagcttagggactcatgcttttactcatgttatgcaggatttggtgtataaagaaatatatctccctatactgattatggttattggtaaaataaaatgaagactattggttatgatgtcttcctggatttgcaaatactgggtatgcacccagtttcaattgcggggaagtacgttatagggaaactcatgaatcactgcttattttttcaaagcatgtggaaattccactcacatgaaaaaacattcttcctcttaaaacagcgtaagtcaaatgggtgcttttgaaacaatggtatcaactcagaatcaaaattttctagctctctgatcatcagttgtagagttaaaatattaagggaaattgcttaagtgttgaaaagattttgaatagatgactatcacataaccatatggaatcaatgacaatccccaaatgcatgagaaagtcattttaaaaattgatgatgcaactatagttggaatacacacacataaacacacacaaaatgacctatggcaagttttatgtatatcatacaaatgttaagttaatcatagcctctagttaatgcatatccccgattttctgacactgtgcatgaaatctagacccacttgttgtttttgcagagttacatggaaatgttgattaagtccaaatggaatcacaggttggctgaattaaatgctaaatggctccaatcacttcctggagtgacagagaggggaatttagtgcaaatgcaacctgcacaaagccttctgttgaaaatgtagtggatacttggtttcacatggtcacctccacacagtagcttagaaaactgttgaaactttacagacagacaaggagagagagagagaaagagagagaagatagataaatagatgagctagagatgacaaataaatgacatacatatatatgtatatagatatatatagatatagaaataagtagaatcaatggtctggacagcaggataaagaacagaatttattgaaccgaaattctccatatgcctctgaaacagtgctagccaaaacccttctcagatgcaagagagggtcccttgattttcattcccttgttcctcacactaagtcgtcctcattcttagcagtgaggtgctctgtttagcactagaagtcacagacccagctcccaatgcaagagacatctgcctgttagcactcaacattaaagaaaaaatgggaaagctgttaacactgtggaatgggatgaagcaggagagcaggtgacagccactgttgcaagtctgctggctgcattgatgctctgtgtggcttcagtcctacccaagggagcccttgcctgtgggctttgcacggttttttttggctcacaagagcattaagggatggtgagagacaattaaagctcctgctgcctctgtacaaacttgacccaacctttaaaactcttgcttgcttctgtccaaccttgacccaaccttgagaaaagaacagtttgatgatgtctgagagcacaaagaacaggacttgcaagccagttagacctgcattttaatctcagctttaaagcttagtcaagatgtgatcttaagcacgtcttcccacctccctgcacctctgagatatcctgttacatgatgggcatttttctttgcaacatcattcgtgttgcaaatcagactacagagcacacattcaaatacaggaaggcatcactttgaatgagccaggattgaacttccgacacagctcaatttacacaaacagcaatttactaaaaaatttaagtgtttttttttaaatgaggtgttgacttactttacagccttgtttttcggatgaaaatattgagttttttttctcttatattctttacacttagagttggtttatcacacaatagacatcaataatttgttgagttcatcaagaaaaaatctaaaattaatggtgttaatccctggtgtttcttgccatgtgatataagacatggatttttttttttttccttgagacagggtctggctccatcaccgaggctggagggcagtggtgtgatcttggattattgcaacctccacctcccagcctcaattgatcctcccacctcagcctcccgagttgctgggactccaggcacatgccatcaccacaacccactaatatactttgtattttttttgggtagagagggggttttgcaatgttgccaaggctgttcttgaacttctgggctcaagcaatctgtctgccttagcctcgtaaagtgctaggattgcaggcaagagccaacatacctggccaagaatttttaacatacatcaacatttccatatatcgtatagttgttttttattattattattagtaacaatagtagtaatttaattttcaaggtgagatcttgctttgttgcccaggatggagtgtggtgttgtgatcatggctcactgaaatcttgacctcctgggcttaagcaatccatccacctcagcctcctgagtagctgggaatacaggtgcacatcaccatgtccagcaaatttttctcttttaggtacagatggggacttgtcatcttggcaaggctggtcttaaactatgagcctcaagaaatccttccgccatataattgcaataataataattattattattttgaaatgaagtctcactctgtcacccatggcatgatctttgctcactgcaacctccacctcctgggttcaagtggttctcatgcctcagcttccctacaggcgtgtgacatcacgctttgctaattttttctatttttagtagagacagcattttgccacattgcccaggcttgtcttgaattcctgacctcaggtgatccacccacctcggcctcctgaagtgctgggattacaggtgtgagccaccgtgcccagccaccatattattatttttaatagaccattatttttagagcagttttgggtttacagaaaaatccagtggaaagtacagagactatccatatattctgttgcccccagacacgcacagcctcctccactgtcaacatcccctactagagtggtgcatttgctacaatccttgggcccacactgacacatcatcataacccaaagtccatagtttaagttcacggttggtggtgtgcattctgagggttttgacaaatccataatgacatgcatcccacactatattatcacaagcatagtttcacttttcctaaaatcctctgtgctccacctgtttatatccctcctcccccaacctgtatcaacaactgatctttttatttcctccatagttttgttttttccacaatgtcatataattggaagcatgcagctgagagttaactttaaaaaataacattctgaattatttcttttggaaagaaaactttttcttagctaaaatgatgtttaaataattactatgtgtcagacattgtatataccttgcctaatttagttgttaacttctttgtgaataaagtgtgcatatcctcattttacagtacagctcagagaatccaaattcaggcagggtatgcatgtgagcttctttacctttgagccctttgctgttgactctacatttctttttggaaaccccagttctcccagcagaatactttaatcttgactttgaccttaggctttatttatttctatccaggtaccaatagacaggttgaagcaccacaaagttgagatttcctacacgcaaaatattcttataagcaggctgggcacagtggctcatggctgtaatcccaacactttgggagtccgaggtgggcagatcacttgaggtcaaaaattcaagaccagcctggccaacatagcaaaaccctgtctctactaaaaatacaaaaattagctgggtatggtggtgtgcacctgtaatcccagctactggagaggctgtggcaagagaattccttgaaccctggaggtggaggttgcaggaagctgagattgcaccactgcactccagcctgggtgacaaaatgaggctctgtttcaataaataaataaataaataaataaaatgttcttatgagtgatcgtctctttaggaataagggaaatgtcattcctataaacaattcatattttgttatcactggtcttccgttttaccgcatatttgatgggcaagtgaagaagaagaccagaaaaattttggagaaatgcctcatgtacacagacttagtagttagagaaatcaaacaagagaggacctcgtttagtaatgaaatagtctacctggattacctgtatacacaagagaagttttgatttttcatttggtagaatgctggtaaataattctttcttttccctttgacatcttaatgtgaattttattgtaatgtcttattgggcaaatcaaagaaaaaccacaaagggttgtgggtcttgtgaaactctacttaacataaagcagaaagtattgagataccacagagaagctctgagggactcactgggtctctctttccctggattgtgttacattcatgaattcacagtggaattccaggtacagcatcctttttgttgaaatgcttttcaggcaggctctgtagggacctttctcagaatcaatgactggtgataactcctcctagcctgcacttatatttggaatccatacaacctccttgcatgcaaataaagatggaaatgaaatatctagctgtaattaaggagagtgaaaagtggataattgctgctgtaatcaattgtgtttctatgaaaatacttaggcataattttaccaaattaattttgcagtaaccgtgtacttgagttaactcctatcgagtttatttgggtttaaaagaaatacagagatgagccagtttttacccagaaaggcagcagggagctactgtaataaatttacatcttatggctggtcatgaagaaaagaggttctgattctatgattcaccttgaaagaaaagaaattccagtttcttttttttttattattatactttaagttttagggtacatgggcacattgtgcaggttagttacatacgtatacatgtgccatgctggtgcgctgcacccactaactcgtcatctagcattaggtatatctcccagtgctatccctcccccctcccccaaccccaccacagtccccagagtgtgatattccccttcctgtgtccatgtgatctcattgttcaattcccacctatgagtgagaatatgcggtgtttggtttattgttcttgcgatagtttactgagaatgatgctttccaatttcatccatgtccctacaaaggacatgaactcatcattttttatggctgcatagcattccatggtgtatatgtgccacattttcttaatccagtctatcattgttggacatttgggttggttccaagtctttgctattgtgaataatgccgcaataaacatacgtgtgcatgtgtctttatagcagcatgatttagagttctttgggtatatacccagtaatgggatggctgggtcaaatggtatttctagttctagatccctgaggaatcgccacactgacttccacaatggttgaactagtttacagtcccaccaacagtgtaaaagtgttcctatttctccacatcctctccagcacctgttgtttcctgactttttaatgattgccattctaactggtgtgaaatggtatctcattgtggttttgatttgcatttctctgatggccagtgatgatgagcattttttcatgtgttttttggctgcataaatatcttcttttgagaagtgtctgttcatgtcctttgcccactttttgatggggttgtttgtttttttcttgtaaatctgtttgagttcattgtagattctggatattagccctttgtcagatgagtaggttgcgaaaattccagtttctatggggaaaaaatctaacttctatggagaaattctagtttcttgggggggaatttgataccagagacaagaagggaggagaaggtcagagagaagacatttatacaggaagtgcgacacacacacattcacacaaacacaacaggcatagggtggacacttcaataaaagcaaggaatagtatgaaaaaatgcagttctggcagaatggctcatacttgtagtcccagcactttgggaggccaaggtgagaagatcacttgagcccagaagtgtgagaccagctgagaaacatgatgaaacactgtctctacaaaaatgcaaaaaaattaactgggcatggtggcacacacctgtggtcctggatactcaggaggctgaggtgggaggatcaccttaggaagtcgatgccagagtgaaccaagatcgcaccactgcactccagcctgggtgacagagggaaactctcaaaaaaaccccaaaaaatgcagaagaaaaatatttgtataggatagtaaaaaggagcatccacttaattgaaacagccaaagtatgccaaaaatattacagatggttaagacagattaaaataatgcagagaaagttgttagcttggaggtggtccttataatatgcagacaatcaaggtaattttctgtgtgatgataatggaaatgtggatgcgaagatcaacaagaaacaatgacatcatctgttttgcaattctccacttctgctgtctaatgttgaaaaagaccttgcttaccaagtgcttccacaggcaacaggagataaagagtgagtatgaaaaataaaagtggcaataagaaactattcaaagacatgagggtaacctccaggcatcgctgagagtgagggtagaaaacaatggtgctaaaatgcatacatgattaccattttggattctttacacagactggggttttccttagtaaagactgttaactaatgtgctcttggattctgtcattcttgttgtacagatcccctgcttagccaaaaatttagcctggaaatccttgcaagtcatcctgttagtcgccaaagactagaaataaaaatttgttcctacacttttctaattagattgattgaattatactctggcctcagaatctctactaaaaatacaaaaacttagctgaatgtggtggctcatgcatgtaatcccagctactcaggaggctgaggaaggaggatcacttgaaactgggaagtggaggttgctgtaagccaagatcttgccattggactccagcctgggcaacaagagcaaaactctgtctcaaagaaaaaaaaaaagacagaaaataatttttataactagtgtaagtatgatgatcaatcacatgataattcgctctacttttatcagttaagaattaaactttgttatgcaaataaatcaatattgagaaacacatgtcaaacagggaacaaaatgtcttaaaacattttttttctggatagttctctttttccaaagtatataaaagtctgtcattcttggatattttcttaactttattaataagttagaacaccacctttattgatttttagagttgtaaaccaggattttctgacaaacaggttatgctgatttgaatcaggccatcaattgatgaaaaaatgtctaaaagtttaatatttaagtgtgctgaaataaactagtgtcatcttaaataacagagatactctgtaaaagaaaagatatttatttgggaatgtagcattgcaatggaaaatcgcatgccataggaaactatgtgcatatttatggggggagaaggaagataaagattttttaaagagtatcacttaattgttttgaaataattatctgtggctacaaagatcaataagaaggatgggttaggcatggtgggtcaaacctatatccccagcattttgggagacaaaggcaggaggattgctcaagctcaggagttcaagatgagcttgggcaacatggtgagaccctgtctcaaaaaaaaaaaaaaaaaaagaaagaaagaaaagaaacaagaaaaaaagacacaaagaaaggagagacataaagaaagaaagaagagagaaagaaggaaggaaagaaagaaagaaagaaaaaagaaggaagggagagaggaaggaaggaaggagagaaagaaaagaaaaaggaataaaggaagagaaaacaaaagaagaaaagaaagaaaaaataaaacatagaaggaaagaaagaaaggacagacaggaaaaaaagaaagaaaaaaaagacaagggtgaaaaaggaagtgcatctgtctctggagagtaacaggaagtttgtcctgcacaggacaggaatagaaagtgtgtgctgcacagaatagaaacagaaagtgtgtcctgtaaagactatgcacaagaagtgtgtctcacacaagggaggaacaggaagggtgtcctgcacaggagatgaacagtaagtgcatcctgcacaggggaggagctggtagtgtgtctgtcttaggagattaacaagaagactgtacttcacaggagaagaatagaaagtgtgtgcttcacaagagaagaacaagaagtgtgtcctgcaaaaaggagacacagaaagtatgtcctgcacaggggaggaagaaaaagtgtgccctgcacagaggataaacatgaagttgtcctgtacaagggagacacaggaagtatgttccacacagaggagaaataggaaatgtgtcctgcacaggggaggaacaggaagtgtgtccttcaaagaagagaaaccagaagtgtgttcttcacagaaaagaaacaaaatgtgtgctgcacaggggaggaacagaaagtatgtgctgcacagggaaggaacaggaactgtgtcctgcataggagagaaacaggaagtgtgtctgtctcaggagtgtaacaagaagtgtgtccaacacaggggagagtaacaaaaagtgtgcccagaaacaagaaagaaacaaagtgtgtgctgcatgggagaaatgagaactgtaacctgcacaagagaacagaaagtgtgtgttccacgggggaaaaacaggaggtgtatcctgtacaacagaggaacagaaagtgcttactgcacagggggaaacagcaagtgtgtcctgcacagaggtgacacaggaaatgtgtccagcacaggggacacacaggcagtgtttcctaaaaagaggaggaaaaggaaaaacaggaagtgtgtcctgtacaggaaaagaacaggaagtgtgtcagtttcaggagagtaacaagaaatgtgtcctgcacaggggaggaacagaaagtgtgtgcttcaccagaaggaataggaagtgtgtcctgcaaaaaagaatgtgcaggagttgtgtcttgcaaagtagagaaacagaaagtgtgttgtgcacaggggagacacaaaaagtgcatcctgcacagggcagaagcagaagagtgagtctcatgagagtaacagaagttgtgtcaggcacaggaaagacacaggaagctcatcctgcccaggggaggaaaagcaagtgtgtctgtctcaggagagtaacaagaagtgcatcttgcacaggacagaaacagaaagtgtatgctgcacaaggtaggaacaggaagtgtgtcctacaaaggggagacaaagaaagtgtgtcctccacagggaagagaagacagtttgtccttcacaggggagaaacaggaaatgtgtcttgcaaaggacagaaagaggaagtgtgtcatgcacagggagcactcaggaagtatgtcacagacaggagaagaacaggaagagtttctatctcaggagagtaacaataaatagctgttacacaggacaggaacagaaaatgtgtgctgtgtagaataagaacaggaattgtgtcctgcaaaggggagacccaggaagtgtgtcctgtaaagaggagacacaaaaagtatgacctgcacaagggggacaaggaattgtgtccacaggagagaaacaagtgtgttattcataggacagaaacaggaagtgtgtcatacacaggggagacactggaagtgtgtgctaaacaggagaaacaggaagtgtgtctttcacagaggaagaacaggaattgtgttcttcacagaagagaaactggacatgtgtcctgcacagggaagtgacaagaaaagtatctgtctgaggagagtaacagaaaatttgtcatgcacaagggaaattcaggaagtgtgtcctgcacagagtaggaacagaaagtgtgtctgtctcaggagagtaatagaaagtgtgtcatgcacaggggaaataggaggtgtgtcctgcgcaggggaagagaaggaagtgtggctgtgacactaaaataacaggaagtgtgtcatgcacaggatagaaacagaagtgtgtacaggacagggcagaaacagaaagtgtatcttgcaaagagacagaggaagtgtctactgcacagggtagaaacagtgtgtgctgcatagggaagacacaggaagtatgtcattcagagagctgaaggaagaagcatgtgcttcacagaagaagaacaggaagtgtgtcctgcacagggaaggaacacaaagtgtttctgtctcaggggagtaaaaggaagtgagtccagcacaggggagacacaggaaatgtgtcctgcacagaggagacacaggaagtgtgtctctctaaggagagtaacaagtagtgtgtcctgcacagaacagaaacagaaagtgtttgcatcacagagtgggaacaggaagtaagtcctgtaaaggggaggcacaggaagtgtgttctgcacaggggagataagaaaatgtgtcattcacaggagagaagcaggaagtgtgtcttgcccaggacagaaagaagtagtgtgtcatgcacagggaaacacaagaagtgtttaatgcacagaggaagaacaggaagtgtgtctgtctcaagagatcaacaagaagtgtgtcttacacaggacaggaacagaaagtgtgtgctgcacaggaaagaaacaagaagtgggtcctgtaaatgggagatacaggaagtgtgtcctgcacacgggaagaacagcaagtgtgtctgtcacagaggaaaagcaggaagtgtgttcttcacagaagagaaatagaaaatgtgtcatgcacagggaagtacagggaaaagtgtatggctgaggaaagctatggaagtttgtcatgcaaaagggagatacaggaagtgtgtcctgcacaggggtggaacagaaagtgtgtctctctcaagagtgtaataggaaatgtgtcataaacagtggaaacacaggaagtgtgtcgtgaatggggaaagagcaggaagtgtggctgtgtcatgaaaataacaggaagtgtgtcattcataggataaaagcacaaaatgtgtatcggatagggctgacatagaaaatgtgtcatggaaaggagagacacaggatgtatgtaccgcacaggggaggaacagaaagggtgtgctgcataggggagaaacaggaagtgtgtactgcacaggggaggaacagaaagtgggtgctacataggggagacagagaaagtgtgtcattcacaaggctgaaagaagtgtgtccttcacagaagaaaaatagaaagtgtgttctgcaaagggaaggagcagaaagtgtgtagtgcacaggggaggaacagaaagtgtgtgctgcagaagggagaaacaggaagtgtgtgctgcacagtggaggaacaaaaagtgggtgctgcataggggagacacagaaagagtgtcattcacagagctgaaagaagaaacatgtccttcacagaagaaaaacaggaagtgtgtcctgcactgggaaggaacagaaagtgtgtctgtctcaggattgtaacaggaagtgtgcccaccacaggagacacacaggatgtgtgtctgtttgaagagtaacaagaagagtgtcctgcacagaacaggagcagaaagtgtgtgctgcacaggataggaacaggaagtgtgtcatgtaaagggaagataacgaagtgtgtctttcacaaagaaaagcaggaagtgtgtcctgcacagggaagtaacaggaaaagtatctgtctgaggagagtagcagaaagtttgtcatgcacaagggagacacaggaagtgtgtcctgcacaggggaggaacagaaagtgtgtctgtctcaggatagtaataggaagtgtgtaggaagtgtgtcatgcacaggagaaacacaggaagtgtgtcctgcactggggaagagcaggaagtgtggctgtgtcatgaaagtaacaggaagtgtgtcctgcagagttgaagaacaggaagtgtggctgtctcaagagagtaacaggaaatattttatgcacaggatagaaacagaaagtgtgtattggatagggcagaaatagaaaatgtcttacaaaagagagacataggacgtgtactgtacaggggaggaaaagaaagtgtgtgctgcataggggagaagagggaagtgtgtactgcacaggggaggaacagaaagcgtgtgctgcatagggggaaaaaggaagtgtgtcatgcacaggggagacacaggaagtgtgttctgcacagggaaggaacagttagtgtttcctgcacagaggataaacagtgtgtctttcacaggggagaaacaggatgtgtgacctgcacaggagacacaaaggaaatgtgtctgcctaaggagattaacaggaagtgtgtactgcacggggaaggaacagaaagtttgtcattcacaatggagacaggaagtgtgccctgcacagggcaggaacaagaattgtgtccctccccaggagagtaacagaaagtgtgtccttcataggaaagtcacaggaaatgtgtcctgcacagggaaggaacaggaagtgtgtctgtctcaggagattaaaaaaattctgtcttgtactgggaaagtacagaaagtgattgctcctcaggggaggaagaggaagtgtgtcctgcaaagggagacagaggaagtgtatgctgcacaggggaggaacagaaagtatgtctctcaggagaataacaggaagtgtgctatgcacagaaagacaccagaagtgtgccctccaagaggtacacacaggatgtgtgtcctgtccagggcaggaaaaggaaatgtgtcctgcacaaaggataagcagaaagtgtgtccttcagaggggagacacaggaagtgtccagcacaggggaggaacagaaagtatatccttcacaggggagacagagaaagtgtgttctgcacagagaagaaacaggaagtgtgcccttcacagaagtaaaacagtaagtgtgttcttcacagaagagaaataaaagtgagacctgcacaggggaggaacagaaagtgtgtcttcacaggtgaggcacaggaagagtatcctgcacagagcaggaccaaaaggtatgtctttctccagagggtaacaggaagtgtgtccttcacaggaagtgtgccttgcacagggaaagaacaggaagtgtttctgtctcagaagagtaacaagaagtctgtcctacacagggaaggaacagaaagtgtatattccacaggggaagaacaggaactgtgtcctgcaaggggagacacaggacatgtgttctacacagggcaggaaccacagtatgtcttgcacagaggataaacagaaagtttctcctgcacatgggagtcacaagtggtttgtcctacacagaaaagaaacaggaagtgttgctgcacaggggagatagagaaaatgcattttttacagaagagaaacagaaagtgtgttttgcaaggggaggaacagaaagtgtgtccttcacatgaaagatacaggaagtgtgtcctacacaggggaggaataggaagtgtgtctcttttaggagaatgacaggaagtgtgtccttcacaggggagacacaggaagtgcatcctgcactggggagggacaaaaagtttgtcttttacaggggagaaacaggaagttgcccatgttgttctcaagctcctggactcaagggatcctcccaccttggcctcccaaaatgtaggaattacaggtgtaagccactgtgccttgccctcagatcatttctttatggccagtttttacatggaaaggtgagtagagggagttagagtcatacttttaggctttatgcctggctttggggaaaaaggtgtcttgtttcttggatccaccttgggaaggagggattctagtttttacggtgccttggatgagaatgggactgagatactcaagatggtagtagagtgatgtctgatcgtcctcactgctacactcccaccagcaccatgacaatttacgaatgccatggcaatgtcaggtagttaccccatatggtcaaaaaagaggaggcaggagtaatccacccttgtttagcatatcatcaagaaatcaccataaaaatgggcaaccagcagccctcttgggactgctctgtctatggagtagccattcttttgttcctttactttcctaataaactttctttcactttactctatggacttgccccaaattatttcttgcaccagataagaaccctctcttggggtctgtttcctggaccccattcctataaaaatatttgttcaaaataaatctcttcaaatattttacagagtttgactctttattgatattcttatgagtcaggagaagaaaaataatgacatttttgggaagagagaaaaaaatctgtacctcatagaacaaagggatttgttttttctctagtcctgggcctcctggctttttaagtatagctatataactgcttctgtgctctctgtctctctcccccacgtttctttctacatctctctctcatatacttccccccacttcctttccctaccttcctttttctctctcttttctctacctgtcttcctcccttgtttctcctttctttcttctctctcttcttcttgagattcctagatatcaccagggtggctcatatatgccctaggttgtgatacctatttgtgctgttgaaggagagaaggacgtgccttcccaaaatatgctggattcgtatctttcatatttagagttgaaaacactggagaattgtagtttcagaaagggctagtcgacctgtctcttcctgcaggcagcaagctataaagattcctctgggaggggattcctccccttaccagggtgagaaaatagctgtcatcaccagagactgggctttgggacctgcaatggacctcaacaaatgcgcttcacactagtttaacccctcccatatatctccttgtgactttcccagaaattcactgccccagtcagattctctttgtttttcatttcttctcaaatttgtcattcttcgtctaaaagtacaaaagtgtcttggtttcatcacctctttgaacatcactcttgggaatatccccattgtctatggaaaattaaaatatgtatgttttcctttgttaatctgcctagtgtcaacttggtttctagttgcagctacagagctcagtaagagctaaagggggtttaaagggatctctggctcctcctcctgcatgccatgcacagagggcagctgacctactgacacccgggatgcctcatgaacagctcagtgggacaggagctcagaggtcttaggggtgtttatgcagactccagtagcttccaaggaggaacaggattcagcagatcaaagtttcccagcatctgtgatagtctgaagccagcaggagggaaggtaaacaaagactctcaaccccagccccaggagccatgaacattcatagggaaggaagggagaagacagtgttgagtttctgaagaggggacagtggaaagcagctctaagcagaaattgccagtatcttcagatcatttctgtgtcttttccctctgctgactcctgaattacatttgttttccacaaaagcaaaaaaaaaaaaaaaaaaaaaaaaagaaaatttacaaggcttcttctacctttggtcactatgcatgggaatgttcacatttcttttcttcttttctcctccctctccttcttttcctccctctcctcctcctcctcctcttcattttcctccccctcctcctcctcctcatctgtcttcttcttagacagggtctcactctgtcacccagactggacaatcacagctcactgaagcttcaaccttctgggctcaagtgatcctcctatctcagcctcccaaagaggtgagactaccagtatatgccaccacgcccagctaatttttttattttttggtatagataggatcttgctttgttgcccaggctgttcttgaactccttgccctaagtgatccacccgcctcagcctcctgaagtgctgggattacaggggtgagccaccacacctggcaaggatgtctagaattctaagagcctgcggacaggctctaagaataaatcttttttcttctctggtgcaaactgccaaagatcccttttcccaggacttatgtttctcttgttagcattaatgatttctactttgtgaggggtgaggctgttttctcacaaccatatggaaatatgcatgttaggacttttcatagtgtaagctctaatgagattttccaagtaagaaaaaagttgtcaatctcaggattttagttttgttgctaagccttttcaggtttctgtgtggtggtgaggtaggagaaatgtatctttttcccctttaatttttgaaactgccttttcttctttttaaggatgagtgttcacaaattgtaaaaacttccatgaaacatgaacagggtgagtcatagcctcataagtttgtatagttgccagcgttgactgaagtgattggagggagagtaagggcacctgtcttcatcccttcttgctccattctgaaagctccatcttattttccaaaaatatactccataattaatgctccctactctgttggaggcttgcagtataaaaacataatttaatatttttgtcactgtggtataaaaaaagaacagacaagtctgtgagtttgcaaggacactggactttttattctttccaatgcaacttgggagactcattttgattaggatgtgggtgaaattttgttttcatctctcatgggggttacagaccttgggatcctggtaaacacacacacatacactcacacacacacagtcacacacacacaaacatacaaacacacacagtcacacacaccccacacggtgttttttctgtgagacatttttctgttttattattttatttcttgtttttaattttacttctatcttcccaccagaaatagtggcttcaaagccataggttaacacttaaaaaaaaaaaaaaaaacagaaacaaagcatagtgaatggtgcaagtttgattcatttttttcctttcaatcttccaaagtgcatgtagaagggtataaaataaaagctgaataatcaaagttttcatcaaaacctgtggtgttagtgtgtagctttctattttattttttatttttcagaaaagaataaggaaatcatttttttctgggaagagtgaagtttctgtgagtgttttgtggggttagagactgaataaatcaggaaggggacagatgtttggtgtgattagcaggtttgattgaatggaaccagctttgaagtctaattgaagacatttgacattaaaatgctaagattatgtttttcgctgcacaaaataaaattaaaaagaaacccaataaagaaaaaatatataatatgaaacatttgttggctaggtgagatactatgctgatgaaattattattggcatctgaagactttgattgaaatttatttaaattttccattctactcagtggtgttttgctgaaaacagtataagacttgtggaacatgaaaaataaacttaagtatcttttccaaaatcagtagatatgactagaagaatttaaaacaagatataaaattaacaactatttggagaagacagttgaagagggagatgaatgggaaataaacttcttatatttcagatttggaactcaaaacatccagcctaaaataggttggcaaataaatacagatatcttgtgtaaaatttcagaggttatcatccaagaattaaaaactgcttgggtgcagtggctcatgcctgtaatcccagaactttgggatgtcgaggtgggtgaatttcttgaggtcaggagttcgagaccagcctggccaacatggtgaaaacctgtctctactaaaaatacaaaaaaattacctggacatggtggcaggcttcctgtaatcccaactactcaggaggctgaagcaggagaatctcttaaacctgggaagcagaggttggggtgagccaagattgtgccattgcacgccagcttgggcaacgagagtgaaactctgtctcaaaaggaaaataaaataaaataaaaactgataaggcaaaacggatttcctttacctcccatttgagcatatctagaaggggagaagggaattcttttcacatatttttacctttgtgaactattgtgtttttatggctgtcttacaggtatcaatgtttcaccttggaacagggaaccaaaatagtacataaagctctattatcacatgatccagcaacctcactactgggtgattgcccaaaggaaaagaaatcattatatcaaaaatatccctgcacatgtgtgcttatcacagcaccattcacaatagcaaagatgtgaaatcaacctcagtgtccactgatggatgatgggatgtttggataaataaaatgtgatatatatacacagtggaatactacagagccatagaaaataaaatcatgtatttagcagcaacatggctagaactggaggcaattatctcaagtaaaacaactcagaaacagaaagtcaaattctgcattctctcacttataagtgggagataaagaatgtgttcacatggacatccaatgtggaataatagacactggagattcagaagggcaggatggtgggggttgagggatgagaaattatttaatggctacaatgtacactattcaagtgatagatacactaaaagcccagacttcaccactatgcactatatccgtgtaactgcacttgtatcccttaaatttatacaaataaaaaaaagcttctacatctactttgcactagcccattatgttttactttcaatcagtagaaatgcaattctctcttttacttgggataaaaaaaagtttgttgttgtcattgtttgttctgtttctatgatgaaaaacaccagtttatggctttgcttagggaaggctacacggacagtaagcagtcccagctgcaggaaatgggataattaataaaacatggtctacccaaagagacagtaggacccaggatggagaaggtgcatgtgaatgaaatcaccccagcaaggcgtgtgcattggtttcctggagggctgccatcacaaattaccacacactgcatggctcaaactaacggagatttattctctcagccttctggaggccagaagcatctgaaatccaggtgtcagcagaatgggttccttctagatgctctaggaaacactctctccaagacacttcctgcttctggtggttgccagccattcttgatgttctttgacttgcagatgcatcattccgatctccatctccatcttcacatggtctttttctttatatctctctgtgtcctctcctctcctgtttatttatttttttcaaaaatgggttatgagactggccaacttttctctttttttgtacagatgatgtttcaccatgttgcccaggctggtctcaaactcctggtctcaagctatccagctgcttcagcctcccaaagtgcttggattacaaccatgagccaccacacccagtcctcctctcctcttcttataagggtgccagtcactaaatttagggcctacttaacctgcaaagattctacttccagataaggacacattgtgaagttccagatggccatgaattatgaattatcagtggagaatactacttagctcactacaacgtgcaaaagtgcaaggacataccttctgtaatcttctgtgaccagaggagggaaagagactcaaaaatattggaagggctgaggctgagaaatggagtgaattccctatgggtagcttttccatttccaggaagtatgtggtaagattatgaaggggatcaaaatatgccacccaaaaatatgacatttcggtgcaagcattactttgagctaaaggctactgaataagagcaggcacagaacaagctctctaccctccccctttctgttaaaatgcagggcatatgttttccctttgaaaagaaaattcatttgtaaagaaaaatttcatttataaaggtgtcctctcatggatgattccagagatagggattatcacctgagatgacttgagtctatataataatctatacttaccaggcattttctagccaccttctacaaacttacccccatcctagatgcttaaattccatttgcctttgtctagttccttctctaaactttatcaccctgtgttaaggtggtatataatcccctaggtccaagcacctcttcagggtcctcacttcttttccatgtgtctccccatgtgtacatacaaaataaaccatttcttctgtaaacttgtcttctgtcagtttaatttgaagttcccagtaactaaattaaagataacaaaggttttatttctccccttcctataattatctattaagagcgtgtttgtgtgttgggtagatgagaagttggtgggattggcactggaaaggtctaatgttagacgatagcatatagttagatgttgattttgtcaatggcaaaaactaggatgacaaggcagtttggagacctggttggaatgaaggactcaactgtgccatggcacccacatttctagtaaagatgagcccctgggtaagaaggggatctctggcatttgggctcactcaaagatggcagatttccaggtaaatgtttacatagacaatggggcaaataattaaacattttggagaattcttcaggtgttgaaccatggaatttaagttgggtgggtaacaaaatgtaggaagcagaactagtgaagaaggattaagcaaaagagtcaatgaactggagagtctacctttgcaaatatggttgtgtttctctccctttcaaaggattatcaacatcctcatttaatgttacctcattggtatgagcaacagtatttactatcacaatgtgtgaagtattcagtttgaggatgatgtcagcaagtcaagaaaccttagaagagtattttctttttggagacagggtctcactctgtcatccaggctggggtgcaatgatgtggtcatggcttactgcagcctcaacctcctggactcaagcagtgctcccacctcaacctcctgagtagctgggaccacaggcatgtgtcaccatatctggctaacatttgcattttttgtagagacagagttttcctatgttggccaggctggtctcaaattcctgagctcaagcaatccgcccacgttagcctcccaaagtcctgggattaaaactatgagctgccatgcctggataaaattggtctttaaaatcatttttaaccatatggcctaatcactccatttcctagggatatatcaagtagaactgaaaacaagtactgaagcaaaaactttgtgtgcacatattgaaagcagttctgtgcccacaacacaaaaagtggaaactaccccaaatttcatcagtggttccatggataaacagaatgtgggccatccggaaagtagaataccattcagccataaaaatgaatgaatcggcctgtgtggtggcttatgcctgttatcccagcactttgggaggctgaggtgggtggatcatgaagtcaacagattgaaagcatcctggccaaaatggtgaaaccccgtctctactaaaagcacaaaaattagctgggtgtggtagcgtgtgcctgtagtcccagctactgggaaggctgaggcaggtgaatcacttaaacccaggaggcggaggttgcgtgagttgagatcgcgccactgcactccagcctgggtgacagagcaagactcttgtctcaaaaaaaaaaaaaaaaaaaaaaaaaagaatgaatctctgctacatactactacaatatggatacatcttgaagtcatgaggcctagtgaaagataccagacacaaaaggtcacatatggtatggctctatttatattaaacatacaaaactggcaaatccatagagataaaactcagattagtggttgccaggggctgggggaggaaggaatggaaatatctccttaatgggtacggggtttcttttgtggtgatgaaaatgttctggaactacgtagaggtaatggttgcatatcattgtgaatgtgcgaaatgtcactgaattgttcaccttaacatggttagtttttttctttttattttattttattttattttatttttgagatggagtctcgctatgtcacccaggctggagtgcagtggtgtgatcttggctcactgcaagctctgcctcccaggttgacaccatcctcctgcctcagcctcccgagtagctgggactacaggcgcccatcaccacacccatctaattttttgtatttatagtagagacgaggtttcactgtgttagccaggattgtgttgagtccaggaggttgtggctgacctcatgagccacctgcctcagcctcacaaagtgctgggactacaggtgtgagccatcgctcctagacccatcttaactcattctagcattaactcgaaagtccacagtccatagtctcatatgaaagaaggtaaattccttctgcctgtgagttggtaaaatcaaaaacaagttagtttcttccaagataccattggagtataggcagtgaataaatactcccatttctagaggaagaaatctgctgaaagaaagctgctacaggccccatgcaagtctgaaacttagcagggcagttattaagtcttaaagctccaaaataatctattttaactccatgtctcccatacaggatatcccagtgcaaggccttgggcacgggaggtctcagagaaaaaagggggaaaaaaatcctgcagttaccctctgtgtgaatcaaagaaatttatttgcttttttttctaatttcctcattataggtcttattttaaggctgtgagttgaacactggttcactgtgggaaaaaaactgaagaatgctatgaatttacacattttatagagactgcttatggagccccttgctatcctaaccacccagaaggtaggatctcagtggatgcgacacttggaaaaacaaatcattatttttatcttattcacatttatgttttgttgaataataattttgttttaccttcagggttttttaaaatgtggttttacctggggagccatttacaatgtattagacatcctcattcattgggaagtctgctatataggactcaacacttgttgctcaagaaggggaagttaataagttgtcagaagtcagtgagaaggaatataaagagatgtgaaggcttatctttgttcttaccctttcatacagtctgcattttattttatttatttatttacttacttagagggatgcaccagtgcacatagcttttttttaataataagcattttaacacatttatctaaaacatagttacaaaagaaaacagagaaacataattggaatactggggaatagtgtctatcacttctgtcctgtctgttgccattttataaaaagcattaagaacaagcagtgtacatatagttttcaggcaaacagacatgtatctgctatgagaccattttttaaatgatgaaataactctgtgtgtgtttgtatgctttgtgtatccgtttacagtagatagctattcaattcctctttgagatgcaaaaggaaaaaaaaaatcttccacaaggtgtgtgttacagactaaatatctgtgtcttcacacaatgcatgtgttgaaatcctcccttcaaggtgatggtgttatgacctggggcctttgggaggtgatgtggtcatgcagatggagcctaatgaatgcgatgattgcccttataaaacagaccccagagggttccctcacctcttccaccatgggaggacacagtgagaaggtgatctgtggactaggaaatgagtccttaccagacatagaatctgccatgccttgatcatgggtctccagcctccagagctgtgcataatcaatgtgttaagccattcagtcttaggtgttttgttatagcagactcaatggactaagacaagaaaaaaagactttggcttctagcaaagtgaacttgctcttctgtccttaatagacacaaacaaatggacaaagatgactacatcatcctaacccataaatcaaagattttcaacccagaagcaaagatccaactgacataagcaaagctcctctctttacaggggtaaacagaaagtgtgcagatcataggtagcctctcttgtttgtgcaaagccctttgtgaaactccatgttaggcagattcatggcagaatcatcactttggtaaccaaaaaggaaccttgcacacttgtacagtaattcatctgtaagtgcatctgacaagccaagatacacaatattcttggtactgtgcttgtcattgtcagttcagtgaagagcaggatggattcatcaactttcataagctacatggtggacgaaagggctgagaagttagtgggcattggctacccctggtacaagttgcatggggatagatgacttagatgtaatcttaaggtgggaatgaatggtgatcagaggaggcttcctgatgcctgtgcactttctgagcccttgccaatgagtgacaaacggaaaggctaccttgagcaaaagaagaagggaataggggttcctagcaggaagatggggttcctgcttgaggtttctagcaggaagaggccccagtgccttggctcataggaaaaagtagcagatattgaggaactaaagttggttagcatttgctggagtgtagcaggtattgaagaggcaggcaacagtggtcaggtaatgatgaatttagagatgaaggtgtggaaataaatgaatgccacctacgtgaaaagaagcaaggtgtttattccgagcttggtgtagcaaaggaatcagccatcatcactcacatctggcagagattcaaaggctgacacagccatggggaagctttatagtgggggaaaagggaaaactaaggtgtgttctgactggaggcagttgggggttcaccagaagtgagacatcctgtgtgactggttagggggcacatttgggtttctctgctttgtcctaagttggaaataggggaaaaattagggaagctcatagttattgctcaggttctggacattttcagctggttgctacagggcttgctgttagcttcctgggtgagttactgcagcttacagattagatctctctctttatatatggtctagtcaccatccatttgtatattacttctctcaatggtaaggatttgagaacatatgctaggaacaacagttatctaagtgtttgaccccagggaatttttattctattacttgttttgtcattctttctccttcatctgttccattttttttttcacatgttgtgatgtgcgaatatcacatcactgttctcccaaacatgtaattcaagtttcttgtcttttcctccatggtttttatttctgtattgttgctctgagtttcagatatttctttcatttaatattctagttcagagattggcaaattttttcagcaaagggccaaatagtaaatgattttggcttggtaggccgttcagtctctattgcaactacacaactccatcgttgtactgcaaaagcagtcatgcacaatatataaatgtataggtgtggctgtgcttaaataaaactttatttacacaaacagttgtgggtcagatttggctcttgttacaaaattttctgacttcttttctgggttacttatttaagtctcacagatgtgtctgcatcagtgaatacaatggcaagtataaatgcataaatttgttttctataaaattgtataaagtatgtgtatttgtctgtgtgttatatctgcctaaatactctgaaaggcatcagagtgtgtaatctccaaatacatcactttggtttgagaattatttttagctgaggtgaaaggatggcttgaacccagaagttcaaggttgcagtgagctaagatcacaccacctcccttgagcctgggcaacagagtgagattctgactcaaaaaaaaaaaagatataataaagcaaataattaatagaggtgcagaggtgatgtaaattccacatatggtcagatagacttgttgaacaagaaacacaattttccaacttagaaaatagttatgtcaaagttgaagagggtgtattcacagagaggaagtgggagaatcaaggactggcatttccaagagttcagatggcagggcccgtagggatcaccgagagctggaattgcaggaggagccacttgtgttgtgcgtct

SEQ ID NO: 96968 - DNA, 17621 bp, Homo sapiens
aattatagcaaatactgagatccagcacttactattgccaggccctgttttaaaagctttacatgtatttgcacatttactgctcacaaccaccttatggggaaggtgctaggcaggcagggaggaggaaatggaaagggaaaggaaaagggaaaagagcgggggaagaaaggagcaagaaaaagtcaatgcaattcggcaattatttgttaagtgctaactgtatgtcagggtctggtaatcaacagaacagaggagggtataatgaagaggggatataggtagagaaaagaggatgagtgggaagaggaggaggttggagaggaggaaaggaaaggagaaataatgaagacaagagaaaagcaagccatgcacatggagggcaatggtaagaggagaaacctttgccacaacctcaagggttggccgcactgtctgggctgaggcagaggctgctttctcctggcccagtcttttacccattgttaccacgaggttggcacagcttccacacagtcctttaataagccagctctgaccctggcgacatttggcctggtacagctcaaggcaggtagcctacaccctggcctagccaggcctttccctagctcacaaaggtcaacttcataacgtggagcgtgagcttttaccatgttctcagagaatctgcctcttagtatttctttttctaaaggcttcattgacccatgtatccctattgagtcttcaagcactatttgacagaagggcttgtttttatctgactgctccctgcaatattacttttccactaagtttgccagaggtacccctttctaacatttgctacctgttcggatggtcacctcatgtcacatttttctcttcctgttccgcccaccctcagcccttgtcggaaaggaccctttcggcctctctaatcaccagaagggactgccagggccttgtgctgatgacactcccaccctccgtcagcctcctccactagctgataaatggcaccagccatgctgtctctctggtttttaggggtcccaagcaaggtacattgctgctgctgcccagcccctgccataccccagacccacctcagtcctgacttaatgcaggtagcttcccagatgcattgagatgccaggacttggaaggtgggactcgatcgcagcagacactggccctggagacatattcttacagtccagagaggaaggacagtctgagcaaaccccaccctttcacagccactcagttccctttttttgcttcctgacctaaaccaatgtctttttttcttctcagcagcatgctatctggttccctgctgccgtccctattccaccccctcaactgtccccgcccttcatttgcttgggacctctgacactactatcttgagtctatctttgaaagaacctttctcaacatgactggggccactgagactctagatggggctggcctgagcagacaggtcatcaagctatcctcccagaggtaaagggacaacatacctaaagtactatgaagacagtcagcacagggagaggggcttacaggaaagaggagagatgctgggggctggcagacacagagcaaagagactggccaggaagagcgtttttcgagtctcctgtcctccggggcagaggagtctcagggacacacagttgaacttgatagtgaagggaccccaaaggacaaaacaagacagaggtagagacaagacttccccgtgctgagtcattttctaagaaagcatttttcccctacagataaaaatgtcggaatataagcccacagaaatacttgtgcccttccccattttctgtggatgttgactttctccatttaagatttggcctcagggattaactctcaatgtccacctttctcttgagtcctgtaaaccggtaaagcagactaggtatgtcacttgaagcctggaggttttctcaggggccccctacattatgctccaactgcaatgattcccccagggattctcctaggaaatgcagccagtattgaatgcagaccatgatggtggagcccctgctgactgatctgcctgcccaccttgacacctcgggcactgccatatttccttgccccaaggcactgtatcctaatgtagaaacagatcacaggtcccactacaatttcatccgaagttttaagtcaacaggaccttatttttttttctttattttgtctaaaaaacaaacaaacaagcaaacaaaaaaaatggggtatatgtgcagaaggtgcaagtttgttacataggtatatgtgtgacatggtgatttgctgcacctattgacccatcctctaagatccctcccctcacccccaagccccaacaggccctgggaccttttttttttttttttttttttgagacagggtcttgctctgaagcccaggttggagtgcagtggcgtgatcatggctcactgcagcctccacctcctgggctcaagtgatcctctcacctcagtcaccctagtacctgggactataggcacacatcactgtgctgggctaatttttctactttttgtagagatggggtttcactatgttgcccaggctggtctcaaactcctgggctcaagcgatactcctgccttggcctcccaaaatgcagggattacaggagtgagccacctctcccagccatcaacaggactttaaataaaaacatttaaagtatttgtagactgatgatagagtggttgatactcacatttgcacaagacagatggacagcatgtgttgtatgattgccttactttattgacaacgtctatcctttcgctagtcacccccaatagctgttccactcacctgcctgagggttggccacaggcattcatcttccctcctcttttcttcagttttttttttttttgagacggagtcttgccctgtcgcccaggctggagtgcagtggcatgatctcggctcactgcaagctccacctcccgggttcacgccattgtcctgcctcagtctcctgagtagttgggactacaggtgcctgccaccacgcctggctaattttttgtatttttagtagagacggggtttcaccatgttagccaggatggtctcgatctcctgacctcgtgatccacccgcctcagcttcccaaagtgctgggattacatgcgtgagccaccgtgcccaggctcttttcttcagtcttatgccacttgttgtcacatgccctgtcctttctcaagatccatcttggggtggggactgggaggtgataggcatccaatgggagagctaaacaagagagagagaggagcacaagggaaaagagcaagtagacgtaggcttttcttcaccctctgcccacgaccactcccctagcacactcatccatactgacagaaagactgtactcagatagtgcaaataaacagctgagtgtcacctgaagagattcccaatgcaatataaggttctattcttggtgctatcctgttcagcatttttattgatcatctttgaggaaaatataaaaagtagcccggttagtctatgaatggtgcaaggctttgtgtgctagactggatgacagaagagggcaattagttcccaaaaagatcttgatcacctggtgtgagaagccaaattccacaaagtgtattttaccagggctaaaggtgatgtctcataattgggccccaaatttgaacttcaaatgactccaggagaaagtggagtagcagtagcatttgtgaaaatggttcaggggtttttgctgatagtaatcaaaaggcatgtcatcagttaacatggcttccagaaaagccaaggtgacattgaggcttccttatggaagtaaaatatctagacagaggaaggtaacatgccacttactctgcaaagccagaccacacctagagtcctgcattcagttctgagtgcctcgtcttaggggaaattaatgagcaggagcatgtccaaaacagagaacagctcaagcgatcctcccacctcggtgtcagcattggtgtacaaactttcacttataggatgtataagctctggggatctaatgtgcaatatagtgaccatagttaataatactgtattattgaaatttgataagagagcagattttaagtgtcctcaccacccccatggtaactatggatggtgatggatgatagatgtgttaatcaatttgactgtggtaatcattacacagtgtatacacatatcaaatcatcatgttgtacaccttgaatataaacaatttttgtcaattaaatatttttaagtaaacaaaaacaagcaaaacccccacaaagccacataacaccagatatgatagaaagaactaaggttgattaaatgaagaggggccatgttcacggtcttcatatttccatgttactaacataaacccctaaaggccagtgagattgcttaagaatctggaaagaaaaagaaaatgctggaagtttggcaaagaaattttcaggaaatgtagcaggtagtggtaatatatttattatctcattcccagagaccacccaacaaaaaagggggtgatcagagtgtcagctcaggtcccacgcgtgttcctggagggttgtgcaagcaagataccccagactctcacggttcttcagcccctattccactgccacctcctcctgtgtctcagcccaattctgtctcctcaccatcctctacactgcagatgcccctgcttcctttgtatgatgtagtggttaagtgcaaggctatagtgttagactacctaggatcaaattccagctccacaaaaaaataacaacctgtgtgacttcaggtaagtaaacttaacatctcttgtgcctcagtttcctcacctgttaaatactaatactggtatatacctcctggggttgctgtcaggattaaaaggggtagtatgtaaggtggttaggagaatgcctggcatatagtaagtgcgccataatttttttagctattataattaccaggccacaacagcaatattttataatgttaaaggaacgcgggctctagagtcagtctacttgggtttgtatcctagattcactaaataccgttgacattgggcaaatcgtttaacatcctacagcctcaatttcttaatctgtaaaatgagaataatagtaccacctgtctcctagaattattgtgagaattgtatgacacaatctatttaaaatgtttagcaccctgaagtctttctatgctggactctcttgagacctagtatatgccttctgccaggtttgcaaggaagggaagagccgctaggtactttctacttctaggcttgatgattgctattacaggagccaaacaatttcattgtcacttttcagaacctagagctgctgacttactccctcaacagaagggtgctgctttaatgccaatcattgttccttttcttcaaagtacttagttcataattgcacatttataagcctattagattactgtacctctcccccggaacagtgcctgccacataatgggcatccaataaccatttgttgaatggaccaactggccatgtgatagatgaactggaacaattggctccctccaggtcttcattgaattagcagtttgctgcgaaaggtgttcccagtgaccttgaggtggaacaggaatggaacgtggaggtggaggaccccttcattcgaccctagtcctggcttccctcggggacggggaggccagaggatctgggaaaaacactgctcccttcactgaacgccactacgtagcagagtccaccaaaagagataaagtgacgaaacgttgaaagctgcggggcgggaggaagtcggggtgagtggaccaccctttaggcggagtccttccttaagctcccgcccgcggctccgaactgagtcctctcagccgcccgagggcgctgcgctgagccttacactctatgattgctcctaccgactcccatgaggaagtgcgatcgggaacctcctatatacttccgtttgcctcgcgrtttctttctttccgcgccgatagcgctcacgcaagcatggtaggacttgctggtgggggccgagtaacatccarcttaatctttcccccccttcgtcgcccgtgctatgccgggatgggtccaggctcctgtgtggactcgatatatcagagcaacccaatcttgccgggatcaaccctaaagggaccgggctacggggccaggaattgaagtgatgggttcaaagaggtagagttagccgggggtggagttaatgaggtctcttccctctttggggctcracggagggaggaagctctgcttgaagcacatggggctggcccaccctgtagtcagaggtagcaagtaatgaggagtcctcctggagtgcctcagctttagctgggtaaggtagggcgttgtgccattgtggtcaaataacattgcacgttctgaactgtttctttactaggttaacgtccctaaaacccgccggactttctgtaagaagtgtggcaagcaccaaccccataaagtgacacagtacaagaagggcaaggattctctgtacgcccagggtaagatggattccgcataatttggtgttaatgtgacrtttgtgttgtagaataacatacgagtccgggtctctctccctccacgcctggcttgagcgttaatatttctgctgcgaaattaagataaaacctgtaagacttacttgctgatcttcagtattttataacaaataccaattcgttttcccaggaaagcggcgttatgacaggaagcagagtggytatggtgggcaaactaagccgattttccggaaaaaggtgagtggtagttactatttgacgtttcccagttaattgccgtaaggatatgcacttgtctctagtccacacacttcatgatataggtatagcgttagtttagcgaagttttcactgcactgatatatctagtaggtgatggagctgggaatgcaactcatgtctgactagtccacaatactgcactatttcagtgtttacgattttttatcctttcccttctgaagaggcaaaaaattgaggaatgtgccctgctttcctaagaactgaagtgtgagtacactggtaaatcctttcatttgccttgttccttatctgtcaatatgtctgaatcctcgcttgttggttgcactaagaattgttctgttgtttctcatcacagaaatctgcagtcaactacctgttctcgtgaagtcttaaaactcttatagaatagccatttaggcctttctgctagcctcctgaattctgtattctcaggctgagcgagtttctgtttactctcaaaccttaggtgatttggctaactcttaaagtaattagcacgatgattggaacggagcattctctccaacacagcatttcttttggcactttgcttcttgtgcagtttagctccagaaagtattaaggaatgactttagtgctcatttggatgcagtaagtggtttgatctcagggtggcaaaaagaatgctttttttataccttttcacattcggataacttgtttagaagacagaggttctmactaggttttggcctattaagaactgcaaactagcagcagcagaactctggctaaaggggcaagcttattaggaaattgagtatttaaaagttgagctaccatatgatccaacaatcccactgctgggtatatacccagaagaaaatcggtatatcaaagagatatctgcactcctatgtttgttgtagcactgtttataatagctaagatttagaagcaaccttagtgtccatcgggatgaatggataaagaaaatgtacctatacgcggccaggcacggtggcttgtgcctagcactttggaaagccgaggcgggtggatcacctgaggtcaggagttcgagaccagcctggccaagatagtgaaaccccgtctctagtaaaaatacaaaaattagccgggcttgtggtgtgggcctgtaatctcagccacccgggaggctgaggcaggagaatcgctggaacctgggaggcagaggctgcagtgagccgagatcacgccactgtactccagcctgggcgacagagcaagactccatctcaaaaaaaaaaaaaaaaaaaagagggaaaaagaaaatgcacctatacacagtggtactattcagccataaaaagaatgagatccagtcatttacaacaacatgggtggaactggagatcgttatgttaagtgaaataggcacacaaagacaagcatcacatgttcttgtttgtgggatctaaaaatcaaaacaagtggacttgtcatatagagagtagaaggatggttaccagaagctgagaacttctggtggcgggaggtggggatggttaatgggtacaaaaagaaaaaagaatgaattagaccaactatttgatagcacgacagcgtgactaaagtcaataacttagttacatattttaaaataacttagagtgtaattggattgtttgtacctcaaagaaaaaatgcaataaaactttacagtggagaaacctaacaagcactacctcagccaggtaatcaaggttaacatcaacagtcacgagtcatgttgatatatacccttgataaggtgtgatgaaaatgacacttaaacctaaaaatccataaccctatctaatgagaaaaataacaaatcccaagaggggcattttacaaaatacttgaccagtagtgcggaaattgtcaaggtcatcaaaaaagtctgagaaattgccacagccaaaggagtctagagacatgatgactaaatgttaggtggtgtcctgcgtggggtcctagaacagaaaaaggacattagaaaaacataaggaaataaaaaaaaagtatggacttgagttaataaggcatcagtgttggtttgttaatgagtcatactaatgtaagatgagaaactggtaaggtttataagaactctgtagcatgyttgcaattttttggtaaatagaaaacttgtaaacaatagttctgttgtttaggtaaaaggagcaatcaaggccgtgcgtggtggctcgcgcctgtaatcccagcactttgggaggccaaggcgggtgtatcacctgaggtcaggggatcaagaccagcctgtccaacatgatgaaacccccatctctagtaaaaataagaaaaaattagctgggcgtggtggtgggcgcctgttatcccagctactcaggaggctgaagcaggagaattgtttgaacccaggagaaggagctgagatcacgtcattgcactccagcctgggcaacaagagcaaaactccatctcaaaaaaaaaaaaaaagaacaataaaaaaagttgaggattagtggggagtgtagtttgagttaaataattcagttgaatggacataaattctagacataattgtaggtagtcttagaatttattgatcttttatagagatggggttctcactatgttgcccaggctggtctcaaaatcctgggctcaagtgatcctgcctcagcctcacaaactgttgggattaaagaactatgcagagctgctgaatggccacaagttcagggtggcaagatgagttgcccatttgataggaagctctaggatgtttgatctgaatggggtttggattcaaacttgatgacaactgggtgacatgccatctttgctattaccacattttctctttatatatatatatttatatattatatattatatatatttttatgttttttatatatatttatatatatwatatatatatatatattttttttttttttttgagatggagtctctgtttccctggctggagtgcagtggtgcgatctctgctcactgcaacttccgcccacctcccgggttcaagtgattcttctgcctcagcctcctaagcagctgggattatagacacgtgccaccatgcccggctgatttttttgtatttttagtagagatggggtttcaccatgttggtcaggctggtcttgaactcctgacctcatgatctgcctgcctcggcctcccaaagtgctaggattacaggcatgagccactgtgcccagccttctctttattttttttagtccacaagttctacacattttctcttaaattcactgatttttagattattttctccctatggcttaagagtatactgagtactatttaaagcaaagcattgcaaaagaatagttgccccactattcatttgcaatgctttgctttaaatagtacttaaagtagtcatttttgaagaaagtgatcttctgtagttatttattaaggctttaatttaattttttttcaggctaaaactacaaagaagattgtgctaaggcttgagtgcgttgagcccaactgcagatctaagagaatgctggctattaaaagatgcaagcattttgaactgggaggagataagaagagaaaggtatataattatgggtggaaggtgcaatctttttcatagctttattatttgaaaaggtgaacatctattcattgtggcatagagctcaggggtaatcctctaaaaatattagatctatagctaaagatatgtgaggtcttttgctacaaggaggaaaggaagaatgaggcagcttaacagcatggtgagtattttaggaacagataatgttcttaatggggcagtagttcatggcaaaatacaaaacaacttttttctgttctgttacagggccaagtgatccagttctaagtgtcatcttttattatgaagacaataaaatcttgagtttatgttcacttcatttgtttgctgttcatcttttgggagggaataagctagagccatcaatacaattccgcttgtggggaaatttatgcctcttacyggtactacttgttttgcattgaagctgactggttgagttcacatcatatgttgcaattttctaatttggcacttcaatcactaggggccttatgaggcagtttgtcattatgcaatggttattggttatcatgtgagtagacacatttcaggctaatagggagaagtcagtaacacattcatagtgaatatgagatgtctttgctaagagttaagtgtcagatctttgttataacagttaatttaataaagaattttggcattgttcttcagacacagtacactgtaacatatataacattgtctgtggacttggtcttacactcttgaacattttgacattccccctcacattttaaagtagatatatttataccaaaataactacaaagaataggttttctagtgtatgaaaccccccagtggagtttttttttttttttttgagacagggtctccctctcgtaagtgccagtggtgtggatcatagcttgctacagctttgagcttgcaggctcaagtggtccacctgcctcagcctcctgagtagctgggactataggtgcctgttaccatacctggctaattttagtttttgtgttgggtgtctctctttgttactcagctagtctggaactcctggccttcagtgaaactcctatctcagcatcccaagatgttgggattacaggtgtgagccaccaggtctggccaaactccccggtggaagaatcttaagagacaaaatatccattctttaaaatgcctcttaacagttccaaattatacatctttttttttttctttttttgagatggagtgttgctcgttacctaggctggagtgcaattggtacaacctcagctcactgcagcctctgcctcccaggttcaagtgattgtcctgcctcagcctctggagtagctgggattacaggtgcctgccacctgcctggctaatttttgtatttttagtagagagggggtttcaccatgttggccaggatggtctccatctcctgacctcgtgatccgcccgacttggcctcccaaagtgttgggattacaggcgtgagacaccgtgcctggcctatacatccttcttaatacatttcagtcttaatgatgtttagctcttggtagttaaatatgctacacattttgataattgggagagaatctcaacaaggggggtgggtatctggatgagtaaatacgggtttaatagttttattcctaaagtttaaacttcggaaaattttattcaaggaaatagaacttttttttttgagatggagtcttgctctgttgcccaggctggaatgcagtggcgtgatcttgggtcactgcacccccccacttcccgggttcaagtgattctcctgcctcagtctcctgagtagctggggctacagaagctcgccaccatacctggctaatttttgtatttttagtagagacagggctttactatgttagccaggctggtcttgaaatcctaacctcaagtgatctgcctgcctcagcttccaaaagtgctgggattccaggcatgagccactgtgcctggcttttttttttttttttgagatggaatctttgttgcccaggctggagtgaggtggcatgatctcagctcaatgcaacctccacctcccgggttcaagcgattctcatgcctcagcccccagagtagctgggaccacaggcgtgcgccaccacacctggctaatttttatatttttattagaaatggggtttcaccatgttgtccaggcgggtctcaaagtcccgacctcaggtgatctgcccgcctcagcctcccaaagtgctgggattacaggcatgagccacctagccttgagcttttaaagtgaatggagaaaaaggtggacaggaagtagtagttggcaataaaataaacattttaaagtaagtcttttaatgacatctgcattgtattttctagctgaagcaaaacagtgcctgtgggatttatgtgacttcttaaccttgaagtccattcatagaaccctagcttccttttcacagggaggagctgtgtgatgaagcaggcaggattacaggccactcctttacccagggaagcaactgcgatggtataagagcgaggtccaccaatctcctgccggtttatcatagctacagcccaggctaagcctgagagaggtcgttcccacacttcaaagttgtctccctgaaaaaccaagaaagtgtggttgcttagcaactagtgataagtggccctgttagtttggcattcattcttaatgtcagaactatcaagcacttgtaggaaaaattaaaatgatcctgtagcattattttggaaataaagtaatgtttctagcaagaagctttattactgatagtaacatcaagagcaagggaaaaaaatagatttaggcccaagacaaagttggtattgggtatataaagccatcttaaaatatatactcttatttacctgtctaagctggtacccttgcttgcccaaggggtcctgattgatggcaattacgtccttatcctgaaggagagctttggcttgagggctgatgtgtcggaggtcattagacatgaataaaggagcagccatgatagcccagagggccatctgagttacttgctgattccagctgaggccaaagttgccaatcactaactgagaaaaagaatgaaataattcaaacaagagaggaggaaacattcttaaagttacctagatgacccatatggagaaaccactttccacagcatcctgctctaagtactctcacataaagcctcctcccaggaactttacctgtatttaccttgaatgtcaaaataggaaacaagcctaccgcagggtcttgaacaaggagggctcaagtttttaccatatctgggtcattccaaccccctggtccagcaacatcaacaattctctcctggttaaaagatgtccagtccaagatactctttatacttttccaggaatcatcaatgtcagcaaaatttcgccagtgattgcagtactgtcggatttctgtataattgggctgtgaaaacagatatgactcttctgtttactttctactaacatccttgtgagatgaaaacagtttaaaggaggcacttgtagccttctcttgagtttacagattgaacgtctccataaggaggtctaaacccttataatgaattttcactgtaagaagtttgcttcagaagtaggccatataacttgaaatcccttaaagttaatttacttctataatcagaactaaaatggtcttagtaaaattaaaagctgcaaaattacataggactccatcaagtattaagaaaacttaaatcccagcatatagtttgttaatggaataaaaagtttgtagaggctgggcacggtggctcatgcctgtaatcccagcactttgggaggccgaggcaggtggatcatctgaggtcaggagttcgagacaagcctggccaacatggtgaaaccatctctactaaaaatacaaaaattagccagatgtggtagcgcacgcctataatcccagctactgggaggctgaggcaagagaatcgcttaaacccgggaggcggaggttgcagtgagccgagatggcgccactgcactctagcctgggtgacagtgagactctgtcgcaaaaaaaaagtttgtagataggcaggtgggatatcaggtttaagatgttgagaaaaaagactattttgcagagataatgagggaataatagggattcattccataaataactattcaacacttaaccatatgcgagagatacagtcaaagtcagacaaggtccctgccctcatgaaacttacactctagtggggagacatggtaacaagtcaacaaatacttccaaatagtgtggagctctgagaagaaaattaaacaggttaatgtgatgaagaatgaatggacagagggctattttaaagtagttagagaagaactgtctgcatatgtggcgtttggtctgcgacttcaatgttaaggagcccggccctttaaaaatctttggggaagaactgttctaggcagaaaaaaagcaagtgtaaaggccctggggcagcaataggcttgcagtgttgagggacagaaagaaaaccagtgtagccagggaaagagccatgaccccttggactttggggaggcaggcaagggctggatcagtgcagtttggtttcattccaagtgcaattggaagcgagttaagggttttaagcagggaactgatgatgacatttatattttttataactctgttaagtctcagggtttttttctttaaaaaaaaaactgatatttacattttaatatgataactctagtgctgcttggaaaatagatgggggttgagacagagtggaagcagagagatcaggtggtcccagcagtctggttgagagccgatagtagcttggaaggccagggtgcatgtagtgaagatggaaggaagtgggctgattcaggagatattttagagatactggtggaaggactgttgatagacaggacatgaatggtgaaataaaggggaagacacaaggatgactttccaggtgatggtagcttaggctataattacagcagtggggatggtgagaagtggttggaacctgggagagatggtaggatgatagtaagtaacgttggactttgaaggagaccttggtttcctttgttgtcaagttctatctatcagtacagttctattggattctgggctcactatctcaccttttgaaagggccacatataaagaggccactcacaggagtacacaatgcttctgccagtcctattcagggccaaggacatgtgcttataacctgtatgagaaaacaatgggtaaaataagggaaagaaatgaatttccagctggggctatatatatagttattttattttattttattttaattttttgagatggggttcagtctgtcatccagggtggagtgcagtggtgcgatcttggctcactgcaacctctgtttcccaggttcaagtgactcttctgtctcagcttcccaagtagctgggattacaggcatgtgccaccaaagtcagctaatttttgtatttttactagagatggggtttcaccatgttggccagggtggtctcgaactcctgacctcaagtaatccacccgcctcagcctcccaaagtgctaggattacaggcatgagccatcatgcccagctggggctgtatattttaagaagaggctacctggaaggttcatgtttaaactagcagcagggacaggcagttgctctgtgcttaaattgtgtaaagtacctcccagactgctgggattgttctgaggaagtagtgcagagatggtgtgtatattgaggaaaggcaggaatgaagatgcttctttctctgtgaccgattgacaacctggactcccctaaatgatgttatagagagttacaattactaattaactcttagagccctcttgaattataagtgcacaatattagctatggttaggtatgcatggattttacatgaattaattaattaattaatgaactgaaagagaagagatgggagctctggcacatggagaataattatttccagtattgtgacagggtatttaaaattctgaagattggttctttggctcagctaccatggcctcaaagttctttcctttgtggctaaatctctggaatgaaacattaccatctgccaaattttccaaactgtcacagtaacaaccatcaaattttagcagatctactccccagtcagcaaaggtctgggcatcaatgtcgtagtatccaaaactcccagggaagcctgcgcaggttttatttccaacatctgcataaatccctagcttcagtcctttgctgtgaacctgaaatgagagggaggaaaagagtcaccattgtagaagcacaatcgtgaggtagcagaaagagagaaccattccaggctgggggaagagacaaggttacttcaccaggtattgggggcttttccccacaaacccccaaaatcatccagatgagtttgttggaagacaaagaataaatcccccagttctgctgagctagttcaaactaggcatgtgagctatagcccagaactgaggagaaagctagcagccatgctaatcttcctgatgggatcctgaaaattaccttttgagggaaatgatagatttaccttgacaaagactcttcttgaccaaactttagttagacttctctgatgagccttcttttcgactagacctccaccttggcttcctatgtctgtcctagcaagacctcttagcaagaatcctgctaagtcaatactgccaccattgatatctgatcaatttccctcatcccccacccttcttgtttaagtacatgaagctttagcaagaagctccctacccttgatgtcttcttaaatattccatccactgaccccctcaatctgctcattggctataaatctccacctgtctttgttgtatttggaattgaacttggctctttcctctactgtggtagtactgaataaaatctgtcttcatcggccgggcgtggtggctcatgcctgtaatcccagcactttgggaggccaaggtgggcggattacaaggtcaggagttcgagaccagcctggcgaatatggtgaaacc

SEQ ID NO: 96969 - DNA, 124379 bp, Homo sapiens
tctcactacccatggagctcagctcagtgcctggcacaataagcctctgctgaacgcatgagcaagggaaacgcaccacagctgtggaattgttgacggtgtgctcaaagatgaagggggtgtccggcaggtccacaaccacagaagattctgagtgcgttgaggaggtttctgtctccagctcagggttgtcaaggtccagcaggccccttgtggccatctgggacttcgatgggcatgggcaggggccgagcgccaggtcctcattttctgcattcttggccattggggagaagctgagtttgttcagctccccctccagcatccctgcaaagaagctgctgttgggctgggtcacagctaatttgatggggttcagcaaggtggatgagaaggcagagatgctggtctcatcagagctgcagtctgaatcctctactggcagcggcttcctggagcaaaaggggagacaggtgaatcagatgaaggaggccaccccagcccgttccacctgagggcaggccttgggcctgacttaccagcatccccagccatttgcaaacagcttggaacagcctcattgctctatagcattgcattagactcaccagggcacttactaaaaatgcagacttttagtccctggtccccagttagcatgggactagagaatccgcatctttaataagatcctggctgggcgcagtggctcacgcctataatcccagcactttgggaggccgaggcaggcagattcaaggtcaggagttacagaccagcctggccaacatggtgaaaccctgtctccactaaaaacacaaaaattggctgagtgcggtggttggcacctgtaatcctagctacttggtaggctgaggcaggagaattgcttgaacccagggggcagaagttgcagtgagccgagatcacaccactgcactccagcctgggtgacagagtgaaactctatctcaaaaaaaaaaaaaaaaaaaaaaatgcttagaaaatcctgatgcaagtgttctgcaaaccacaatttaaaaaacatgctaaaatggcaagtcctccctccaaagtggggtgcaaatgccccagggaataaccacaaagatctactggggtatggaagtaatacattcaatttcactaatgtttatttactattgtttaaattttaatggaattactaatatttacttacattttagtggcatttaataatacctattaatatctagcacgtaaaattaacagaaatacaaatacatatatgggccaggcgcggtggctcacacctgtaatctcagcactttgggaggccaaggtgggtgtattacctgacgtcaggagttcaagaccagcctggccaacatagcgaaaccttgactctactaaaaatacaaaaaattagctgggcatggtggcggttgcctgtaattccagctacttggaaggctgaggtgggaggatcgcttgagcctggtaggtggaggttgcagtgagccgagatcctgccactgcactccagcctgggcaacagagtgagaccctgtctcaaaaataaaataaaacaaatatacatatgttggtgtggatgctcaaaaacttatttcttccactctgaattttttaaaattatgaagtattttagacttatacaaaaatatcaagaatattatattaaacctccatttactcctcatctacctttagaaataaaatcttatcactatgggtaaagccccccagacacttctgtctcccaccaaagtccccatccttcgaccgacaagtaatgagtacagtaaagtttaaattgtgtatttattactcaatgtgtgtctttataggtttcttacatatttatgttatccctaggcaagatctattatttttcacgtttgtagatgttgtacaaataaaagatattattcagcacatacccatctgcaacatgcttttttcactcaactttgtgttgacattcatctatcttgatacatgtagctctggttcagtcgtttttactgttttatgattttccattacatggatatttgtttttgtttttgttttttgagacagggtctccctctgctgcccaggctggagtgcagtggcacaaactcccaggctcaagccatccgtccacctccacctcctgagtagctgggactacaggtgcacatcaccatgtctagctaatttttgtgtttttctgtagatgcagggttttgccatgttgcccaggctgacttcgaactcctgggctcaagtgatcctcccaaagtgcttggattataggtatgagccactgtgcccggcctatatggatatttgtattgttatgagatgtttgctattacaaagaaaaaccttgtacatgatccccaccacttaacatttcttttttctgtttttactcttttttctttttttttttttttgagctggagtctcgctctgtcgcccaggctggagtgcactggtgtgacttcgactcactgcaacctccgcctccctggcttaagcgattctcgtgcctcagcctcccgagtagctgggattacaggcccacactgccacatctgcccaatttttgtatttttagtagagatggggttttaccatgttggttaggctggtctcgaactcctgacctcagatgatttgccggcctcagcctcccaaagtgctgggattacaggcgtgagccactgcccccagccaaacaaaaaacaatatttttttaactgatgaagaacaccaagccaaaaagtttggctttcaaatctttttttacctttacccaaagtaaaatacactttccatggcaacttagtacatgcatatatacgcctataactaagacaaacatttcacagaccaacacttactctgtgtgcaatgggctctggaatttccaattctattatagtttattttatttatttatttatttatttttgagatggagtctcactctctcagccaggctggagtgcagtggcgtgatctcagctcactgcaacctccgcctcctgggtgagagtgattctcctgcctcagcctcccgagtagctgggactacaggtgcggccaccatgttcagctaatttttgtatttttagtagagaaggggtttcaccatgttggccaggatggtctcgatctcttgacctcgtggtctgcccgccttggccttccaaagtgctaggattacaggcgtgagccactgcacccagccagtttatttttatcatagtggtcttcaccaactagaaggacttcttgacccattaataggtcacaatccacagtttgtggatcccttactcccatccagcctcccaggtcttggttgatgaacgggccaagtttttcctccccaggttccagcctcatcagcctcctcctgagaaatcctgattagcccagatcccctatgctagcgcttggtggacatttggaataaatgattcccccaccaaggtcttttgtagactgaagagtctgggtattaatgtcatatgtgctttagattgtcctaatgaattaatatttcagattcacttactgcaaatgctggtactgaagcaagcacagaaggccgctaggcactggctacatgctgaacatctcctcctcctgatgttcacaacagctctgctggatggatgttagccccatttggcaaacaaggggctgagggtccctgatctgtttttttttttgttttgttttgttttttttatggagccttgctctgtctcccagacccctggctggagtgcagtggcacaatcttggctcactgcaacctccacctcccaggttcaaaggattcttccgcctcagcctcttgagtagctgggacaacaggtgcgtgccaccacatccagctaatttttgtatttttagtagagacgaggtttcaccatgttggccaggctggtctcaaactcctgacttcaagtgatgcatccgcctcagcctctcaaagtgctgggattacaggcgtgggctaccccatctggcctccgatcttaattaagttgtctaagaccataaatctctaagtggcagaacttggatctgagtttgggcttctagtccaagattcccagtataccatgaagtttcctacgagcatccatcactttagccatacctgcttgcttacgggcactttggggaatggacaccacatccctctcacatactcaagaccagctatgtagtctgtggagcccagtgcaaattgaagtaccctgagccccttattcaaaaattctgaatttgaagatagtaacagaaaagcattaaactaagcacaggccccttgtaagtgcagggctatttgtgactgcacaggtcattcacccatgtggtgggtgacctgcaagtaattccctcagcccacatcaccctgtaccaccaccccttcactggctaactcctttccttccttggagactcagctcaaatatcacttcctccaagaagcctccttcaactgcacccagtctcaagctatactaagcccctctggtccctcaaggcatcctgtcctggcacttaccagaccatgctatatcattctggttattgcatgatccccatcctttcacccctgacctccacatgccagactgggagctccttaaaggcagggactgtgctttccagctctgcgttcccagaacttaaacactgggacagacaccttgcaggtgctcaaagagttttgtggaatgaagtagaggaaaaccagacttggtgaggaggaacagcaaaacccagtccgaaggaaggcaggctactggggagcagtcaggtagatgaaggtaccaaagagagagggttgaggaagaggagccatgggtgtgtcagggatttggtgatggtgaggaccacagccagtcaaggcaggataaggagcactgtcaacaaactgactaatccaagaaggcctcctggagtgggagctccatatgcctccaagaagtgatttggggctcaggaatacataaatagatccaacctgcccacacgctcttctctgggagtcaaggaactgggttgtgacaagtcagggaagtatagattctttgtctctctgcccagccctcggctccagcctttcttagaaactataggcatggtggctcaagcctataatcccaacactgtgggaggctgaggcgggaggatcgcttgagcccggaagttcaagaccagcctgggcaacacggtgaaaccccgtttctaccaaaaaaaaaaaatttatatatatatatatatatatatatatatatatatatatatatatatatgaaaattagccaggtgtggtggtggcgcgtcaatagtcccagctacttgggaggtggaggtgggaagatcacttgagctcaagaattcaaggctgcagtgagccgagattgcaccactgcactccagcctgggtgacaaagcaagatcctgtcaaaaaaaaaaaaaaaaggaaggaaggaaggaagggaggaaggaagggaggaaggaagggagggagggagggagggagggagggaccagatttgtgacttacagtaggttgatggtatcatcctccaagaagttgaccaaattgccctttgaggctagtgggagtcctttggtagtgacggtccggttcatagacttggggtttggaaagggttttggcagttggtcaagggcattcatcatgttgaagttttctttcttcagtacagcctcctccccatctcccacttgatggagtgcctctgatgccatctgatttgttcgggatgacacccgtcaccatgcaggacaacccagctgaccagaagcagagagaaactgtgggggcagtggcccacctttagtttggacagtctgcaggtgcaatgagctgacttcataatcatcacagagtgtaacaattacaggccagcctccccccttgatttgaggctactgctgccaggctagctatgtggctggccagaccaagggccagtgtgactgtgaagcagcatcatgagaggggtaaaaccaaggaacagactgcatgagcccttgggccccttccagctctaatactccatggtgatggcagccctgcccttctctgaagatctcaaaatgcctgacacctgtgtccttccgcactgccctgggaaggagaataaggatggtgagagatgggcgtgggatgtagaggatggtggtgtggccctgagagataggcagtattggaaagtgtctgctggggagggaaactttgtccgtagaagctaaggctctctatcctgaaaccataggctgcagactccactgtgcccagtcggttagtgaaagggaaagcccacatggttcataggggttcatggctcacatatgatcagacttcactgctagaattctaaatgtgccacacccacactcccaagtactttcctgtgtggagtgacaatggtggcagttgcagtgggatacagagatgggccacacatgatctctgctctcagagaaaccaccttacagtaggaaaacatgtacacagcttcaggggtggggaggggggctgttagaaagcactggctttgcagagtcagatgtggatgtgaagtccagccctgtgccgcctagctgggtgacctttggcaagtgatttaacctcactgaacctcagtttcttcattggtgaaacagggataaaaaatagcgcctccctcacagatttgtgatgagataaccatgtaaagttttatttcttcctatggatgaggcaaagcaaaggacatttaaaaataccaaatcatatctttttgtgtgtgttctatataaccaaggtttcttgcccttaaaaaaaataaaaaataaaataaaaaatagaggccgggcacggtggctcacacctgtaatccccgcacttcgggagaccaaggcaggaggattgtttgagcccagtagttcgagacctgtgtgggcaacatggtgtaaccccattttgtagaggcgaaacctctacaaaaaatacaaaaattagctgggcaaggtggcacgtgactgtagtcccagctactcaggaggctgaggcaggaggatcgcttgaacccaggaggtcgaggctgcaaagctgagatctcaccagggcactccagcctgggcggccgatcgagaccctgtctcaaccaaaacaaaacaaacttttgaaaaatagacgcaggtgccctctggatgctttgctgcttcttgacacctgtcgtataatctgtaatgatgtgatttctgcgattccttttcattgtctgtctttcccttgctcacagtaagctccctgggggtaagggcgggtcgtcttgtgtcgcattttgtctccagcggagatccgttccgtttggaacggaagctggcgcacagaaggctctttagaaggtcggtgtgtgtgttgcggcagaaggtagaggccgaatgtggccgcgggtggcgtgttgagcgcggagggggtcgtgggactcgggaacctgtgcaggcggtggagaggggcgcagcggctctgccccgtgcggcccgcagatggcgctgcaggccaggtcctcgccgcgcgccagcctggaacccggaagcggcagcgcggcgcgacccggcgggcgggctctgggcgcgggaatcccggcggatcccgggcgggcggatgacccccagccctacccttggtgccgcctcctcctctctcctttctcctccggcagccagcgcgcctgtgtcctctctaggaaggggtaggggaggggcgtctggagaggaccccccgcgaatgcccacgtgacgtgcagtccccctggggctgttccggcctgcggggaacatgggcgtgctcagggtcggactgtgccctggccttaccgaggagatgatccagcttctcaggagccacaggatcaagacaggtgaccgggtgtgcgcgtgccagggagccgcgcgggcctcgcacaacctgggcaggccccgagggctggcgcactgccctggcatacctgcagggcgcttcccctccattcctagagggccgcgcttctggagaggctcaggaagggtgggcgtggggagccaagctctaaaacagggtagagattcctactgtgtgcagggcaccgcgccggctcctgcagctttgttatttcayactggcctcctgagacggcctgccggggggtagaattgacaccccatttgacagatgaggaaaaaccaagtgtgggaggccccagtcctctctgccaatccgctatacgtgttttgttttcagtggtggacctggtttctgcagacctggaagaggtagctcagaaatgtggcttgtcttacaaggtgagctcctgatctccacattccaaacctgagtgtctttttaaaaagtccatcccaagccagctgggcgcggtggctcatgcctgtaatcccagcactttgggaggccgaggcgggtgggtcacttggagtcagaagtcaggagttcgagaccatccaggccaacatggtgaaaccctgtccctactaaaaatacaaaaattagctgggtgtggtggcccacgcctacaatcccagctactcgggaggctgaggaaggagaatcatttgagcccgggaggcagaggttgcagtgagccgagatcgtgctactgcactccaatctgggcgacagagtgagaccctgtctgaaacaacaacaataacaaaagtccatcccaagccaaagggagcagagggttctcagatattgagaagtagggtgaatgacaccctgggatgccagcttctacgggcaatttgttgctgagcagtctggggccctttggcaggccctggttgccctgaggcgggtgctgctggctcagttctcggctttccccgtgaatggcgctgatctctacgaggaactgaagacctcyactgccatcctgtccactggcattggcaggtttgtgtgtgtacttggggaagaaggagagaggcaggaggatggggcctcctctcagctctgcttttgatgcttgagtctagacgggaggggttttttttttaaccaataatggatgggaaggaaaggggtcaggacatctgaattcttatcctataacagggttatggggtatctcagccttggcactattgatatttagggacaggtaattatttgttggggggtggaggctgtcctgtgcagtgtaggatgtttagcagcatctctggcctctgcccactagatgccagtagcaccagccctgctccagttgtaaccatcaaaaatgtctcctgacatggctaaatgtcccctgggaggcacaattgcctctggttgagaagcattgtcctataacacaagctgtcagtatctcattattttcaccatcttctctggccctacttcttattttacttaaggatatggcaagagagaacatttactgagtgcctactatgtgcaggcattacctgtatgttctaggtaatctcttcagtgactctaccagttagagataattaaccctacttgagtttagcctaagaggagcaagtggcaaaggtgaggctcaagcgcgggagtatgtggcccagaacttattcaccacatctgcagcagtagagaacaggagagttcagagaaagaaggagttgcggtccagatgcagtgctcatacctgtaatcccagcactttgggaggctgaggcggcagatcactggaggccgggagtttgagacctgcctggcctgcttgcccrcccaaaatgatgaaaccccgtctctactaaacatacaaaaattagtcgggcgtggtggcgggcgcctgtagtcccagctacttgggaggctgcagcaggagaattgcttgaatgtgggaggtggaggttgcagtaggccaagatcgcaccactgcactccagccttggtggcagagcgagactctctcaaaaaaaaggagcagttatgtcccgccacgttgtttggtgggttggggaagagttgcaaagacgacagacgtttgctggccaagtgagtcttgacctttttcctggtctgtttgttcagaaattgatgaataactgccaccataaaggtctttggattggtgtggccctttctgtttccttaacacattctcttggcagggttcatgcagtgtggtgcttgctttccctggttgggggtctgagtctgtgatccatcaagcactggctaagggcctgctgggtgcttggtatgtgcagatgatacatacacgaatgaggcaaggcccctgcmcttaaggcctctagttgggtgtaggggaaaatcaagtgaatacaagagagctgtaagcaccgagggaggcaacggtaaggagggagtggtgaacaggaagccgattggccttgggcttagggagtttataaatccaacagacatggagggcgcactcaagtgggaacctgggaggactgcagctgcctcaggtccccgcagggagatcgtggagtggggtcaggaatgctctgaagaaggcaggacttgggcatggaggaacagatggactttcgctgaatgctttcgatgaacgaggcactgcggtcagcacttcacggtacattatttcatttattcgtcacaaccaccaatgagcatgttactgtttaaatcatcattctaggccgggcgcagtggctcacgcctgtgatcacagcactttgggaggctgaggtgggcggatcatgaggtcaggaaatcgagactgtcctggctaacacggtaaaaccccgtctctactaaaagtacaaaatattagctgggcgtggtggcgggcgcctgtagtcccagctactcggaaggctgaggcaggagaatagcatgaacccgggaagcggagcttgcagtgagcggagatcgcaccactgcactccagcctgggcaacagggcaagactccatctcaaaaaaataaaataaaataaaataaaataaaaataaatcatcattctataggtgaagaaattgggactcaggttaaatgacttgttcaagattgtgcagttagcaaacggcagaccagttatttgagttcatgcttgtcacactcctaagtctaagaacgcggctcttaactcatctgcccggctgtctccctggaggcgggaggccattgtgaaagcagggttatagacagtggggtagaggtgtgcagggtggaagggtggcagaggccaagcagggccctggcagtgctggcctggggtatgtgagtccagtcyagaacagtgggagacatgttgaagaggaactgtgacaagacctactaccaggaggaatgtattgtgaagaatcaaagctgactcaccaggtttctagcctttctttctttctttcttttttttttttgtcggagtttggaatgtattgtgaagaatcaaagctgactcaccaggtttctagcctttctttctttctttctttctttctttctttctttctttctttctttctttctttctttcctttcttccttttctttcttccttccttccttccttccttccttccttccttccttcctttccttctttccttctttctttcttttttttgacggagtttcactctgttgccaggctggagtgcagtggcgtgatctcggctcactgcaacctccgcctccagggttcaagtgattctcctgactcagcctcccgagtagctgggactacaggtgcgtgccatcaacgcccagctaattttttgtatttttagtagagatggactttcgccatgttggccaggatggtctcgatcttctgacctcgtgatccgcccgccttggccttccaaagtgctgggattacaggcgtgagctaccatgcccagtctctagcctttcttaccgtgtgctgtggacagttaatggtgtaactttaaaacttgggaggaggggagttctgtagtcagaagtttgagaaatgcctgactaatccaaattaaacaggtttctctgttgtaggccgcctcagaacctttagtgctgaggtgcaatgattccttacagggtgttatagcatgtaacgtactttgggaaaagctatgttgatgagggagattgattattccttataggccagagctaggtctgttcatcccacagtcccctcattttagaataagactgtcaggaaatatgaggcattgaagtggtgtgtgaatggatgactgaaagaatggctaaaaggcagttcagagggaaaggcagaggataagtcccagaaatcacctgtattctaggcagtggtaaaacccaggtgtacttctgcttcatggggcaagacaggggtctctccctgttgacatgcggagttaaaggtgatggggacatattggtaggaaggttctctgggcagtcggagaggcacggaatggaaactcaggtgagaagttggctggaaggtggatttgggaataccttatacagactgatctccacagccaaggatgtggttgattcttgactagagtcaacaccagtgcttcaaccccagctgcacgttagaatcatctgggaaacttgagatattcatgctctggtcccaactctatatattctaatttaattagtctaggtcagtggttcccaaacttgtgtgcccattggagtcacctgaggactcttttaaacattacgaagtccaagtctcccccagaccaattaatctcattcactgtgagtgggacacaggcatcagtattttttaattttttaatttgttttttagagacagggtcttgctctgttgcccaggcaggagtgcagtggtgcacaatcatagttcactgcagccttgaactcctggactcaggcagtctccctgcctcagcctcccaagtagctgggactacaggtgctcaccaccatgcctggctaattaaaaawaawtttttttttttgtagagacaggggtcttgctgtgttgccaaggctggtctcaaattcctgggctcaagcaatcctacctctgtctcccaaagtgttgagatgacaggtatgagccaccatgcctggccaggcatcagtatttttttgaagctcccaggtgaatccaatgtgcagacaactttgggtactgctgacataggcattttttaaaaaactcccctgattttattttatttaattaattaattttatttttttgagacggaatcttgctctgtcgcccaggctggggtgcagtggcgcgatctcggctcactgcaagctccacctcccgggttcatgccattctcctgcttcagcctcccaagtagctgggactacaggcgcccgccaccacgcccagctaattttttgtatttttagtagagacggagtttcaccgtgttagccgggatggtctcgatctcctgacctcgtgatccacccgcctcggcctcccaaagtgctaggattacaggcgagagccactgcgtccagccaactcccctgattttaatgtgcaggcaggattgagactaactactctagtctaatggttctgaaacttgagcaggcttcaaaatcacttggaggccttgttgaaactcaagtttcaagtgtgggctgcattcccagagtttctgattcagtaggtcttggggagcggagctgtgaatttgcatttctagctagtccttaaaggttgctgatgcacctggtctggggaccacactggggttcctctgatctcaatgggaagaatggaatcaggagtggtagaggctggatacttattaaacagagatggggtgagcacaattatctcaagaagccacagggctagagtggtaaccagagtgttttgactggcaggaacctgtgggtataatcatggggagtccctggaattaaaatggttgggggccaggcacggtggctcatgcctataatcccagcactttgggaggccaaggcgagtgggtcacctgaggtcaggagtttgagaccagcctggccaacatggcgaaaccccatctctactaaaaatacaaaaattagccaggcgtggtggtgggtgcctataatcccagctactcgggaggctgaggcaggagaattgtttgaacccgagaggcggaggttgcagtgagccgagagcacaccactgcactccagcctggygacagagcgagactccgtctcaaaaagaaaaaaaaaatggatgggatgcttactaaagtgctgttcggcatatacagagaggtcatgggaggtcatcaagaaccatctcaaggactggaacctaggaaggtgattgtagggctaggaaaggtacgcatgtgrtcaggcattggtacaggccgtggcatagaagaaacttcagcctagagatagggcagggcatggagggtaggtggtgacctgtttcatgtggttgagggagagaacctggtttaggaattggcatgtcatgaggtttatcccaagtctttcacagccagtgttgatgatacagaagcgaaataaaagtgatagcacctttctgttactcatttttctggaatgattattgggtgcctcctgtgtttcaggcactgtgctagtgctggggatgcgacagggatcggacccagtccttgccccatggtgctctcagctagatgagcaagacaaacaaaaacaagcaaataacaaataattacaaactcctaggactagtgaggatacaagaccaacacatacaaatcaactgcatttctctatactcacagtgaacatgtcaaaactaaaataaaaaacactaccatttattggccggccgcagtggctcatgcctgtaatcccagcactttggaaggtcgaggcaagtggatcacctgaggtcaggagttcgagaccagcctggccaatatgatgaaacctggtctttactagaaatacaaaaattagctgggcgtggtggtgggtggttgtaatcccagccacttgggaggctgagacgggagaatcacttgaatctgggagatgcaggttacagtgagcggatattgtgccactgcacttcaacctgggtgacagagtgaaactgtctcaaaaaaacaaaacaaacaaaatggctgggcgtggtggttcacgcctgtaatcccagcactttgggaggctgaggtgggcagatcacaaggtcaggagatcgagaccatcctggctaacacagagaaaccccatctctactgaaaatacaaaaattagctgggcgtggcagtgtgtgcctgtagtcccagctgctggggaggctgaggcacgagaatgacgtgaacctgggaggcagagcttgcagtgagccaagattgcgccactgcactccagcctgggcgacagagcgagactccgtctcaaaaaaacaagcaaataaacaaacaaacaaaaacacaatgccatttatagttgtttcagagaaatgaaatacttgggtataagtctaacaaagcatgtgtagaatctgtatgctgaaaatttttaaattgytgatgaaagagatcaaagatgactcggataaatggatgacatgtactttgttcatggattgggagactgaacataatgaagatttcaattgtccccaagttgatctgtaatttaacgcagttcctattaaaatcccagcaagttttttttttctatagacatagacaagcttattctaataattacgggaagaccagttttacctagattagctaaaacaatttggaaaaaggatagctggaggaatcagtctacccagggttaagacttgctatatagctacataattaagcctagtgtggtattgaccaagggacagatggacacagatcagtggaacagaatagataacccagaaatagacctccacaagtatacacaactaatttttttttttttgagacagagtcttgctctgtcacccaggatggagggtactgctgctattacagctcactgcagccttgacctccctgggctcaggcaatccttccaccccaagcctcccgagtagctgggactacaggtgtgggacaccatgcctggttatttgtatttgtatttttttttttttagacggagtttctctctctctcttttttttttttttgagatggagtttcgctcttgttgcctgacctggagtgcaatggcgtgatctcggctcaccgcaacctccgcctcccgggttcaagcgattctcctacaggcacatgccaccaggcctggctaacttttttgtatttttagtagagacggggtttctccatgttggtcaggctggtctcgaactcctgacctcaggtgatccacccgcctcggactcccaaagtgctgggattacaggtgtgagtcaacgcgcctggcctgagtttctctctttttgcccagactggagtgcaatggcgtgatctcggctcactgcaacccccgcctcccgggtttgattcacctgcctcgacctcacgggtagctgggattacaggtgcatgccaccatgcccagctaatcttgtatttttaatagagatggggtttcaccatgttggccaggctggtcttgaactcctgacctcaggtgatcgcccgcctcggcctcccaaagtgctgggatcactggcgtgagccaccgcgcccagcctgtttgtattttttttatagagacagggtttcattatgttgcccaggcyggcctcaaactcctgggctcaagcaatgctcccgcctcagcctcccaaaatgctgggattacacacaattgatttttgacaagggtacagaaacaatgtgttggaggaaagacagcctttgaacaaagggcgctggagctattggacatcataggctaaaaatatacaataatcaacctaaaccttataccttatacaaaaattgaaaatggatcatagacttaaatgtaaaaccaaattgtctaatttttagaacaaaacaggagaaaatctaggcaaagagttcttagatttgatgccaaaagtatgatccatgaaaaaatttttgattaatggggcctaatcaaaatttaaaacttttgctgtgcaaaacagaatgaaaagagaagtacagaatgggaaacatagttacaagccatgtattcaacaaaggacttgtatctagaatgaagaaagaattcttaaaacccaacaataaaaaatcaaacaattcaattagaaaatgggcaagggctggctcacacctgtaatcccagcactttgagaggctgaggtggtcagattgcttgagcccaggagttcaaaactggcctgggcaacgtggcaaaaaccctgtctctaccaaaaaaatacaaaaattagctgggtgtggtggcacatgcctgtagtcccagctacttgggggagctgatgtgggaggatcacctcagcctgggaggtcaagattgcagtgagctgtgaccatgccactgaattctagcctgggtgacacagtgagacgtgagaccctatctcaaaaaaaaaaaaaaagccaggcgtggtggcttacgcctgtaatcccagcacttcgggaggccaaggcaggttgatcacctgaggtcgggagtttgagatcagcctgaccaacatgaagaaacctcgtctctactaaaaatacaaaattagccaggcgtggtggtgcatgcctgtaatcctagctactcgggaggctgaggcaggagaattgcttgaacctgagaggtggaggttgtggtgagccgagatcacgccattgcactccatcctgggcaacaagagtgaaactccgtttcaaaaaaaaaaaaagttcaacactattaactattagggaaatgcaaattaaaaacacagtgagctattatttcatacctatcagaaagactaaaataaaaaaataatgataataccaaatgctgatgaagatgtggagacactggactactcatatatacattgttagcggatatgtaaaatggcatagccactctggaaaatagtttggtagtttcttataaaattaataatgcatttaccataccacccagcaattgtattcttgggcatttatcccaacgttgtaaaaacttgggtttatacaaaaacctgtaaaaaatgcttatagcagttttatttatagtagccccaaagtggaaacaaccaaatgcccttcaatggatgaatggttaaataaactgtggtacatccataccatggaatactttttagcagtaaaaaggaatgaactatccatatatgcaataactgggatggatctcaagggaatgatgctgagtaaaaaagccaatcgcagggccaggcacggtggctcatgtctgtaatccccgcactttgggaggctgtgttgggcggatcacttgaggtcaggagttccagaccagtctgcccaaaatggcaaaaccccgtctctactaaaaatacaaaaattatccaggtgtggtggtgggcgcctgtaatcccaggtactcgggaggctgagacaggagaactgcttgaacctgggaggtggaggttgcaatgagctgagattgcaccactgcactccagcctgggcgacagagcgagactccgtctcaaaaaaaaaaaaaaaagaaaagaaaaaaagccaatcacaaaggttacacagtgtataattctatgtacataactttgttcttgaaataacataatagagattagtggttgccagggattcgggattaggggtgaatgggaggaatgtggctataaaagggtagcaggaggaagacttatagtgatggaaatgttctgtatcttgattatagtagtcgtgtaaatctacatatgtgataaaatggcataggactagacacatcaacacacgtgcttgaatgctaggaacactggtgaaatctgaataagctctgtggatagtaccaacatcagtttgctacttgtgtgatatactatagtccttttttttttttttttttttttttttaaagagaaaagggtcttgctatgttgcctgggctagacttgaactcctggactcaagtgatcctcccaccttagcctcccaagtaactgagactacaggcccctggctagtacaatacattttgtagtacagttgttattattaaggtaaaccaggtgaagggttcatggactttttgcaacttcctgggaatctataattatctcaaagttgttttttcttgttgttgttgttgttgtttgttttgtttttttgagacagagtcttgctctgtcaccaggctggagtgcagtggcgtgatctcggctcactgtaacctccacctcctgggttcaagcgattctcctgcctcagcctcctgagtagctaggactacaggcgtgtgccaccatcaaagtttaaaaaaagcgacaaattttgggaaacgctatcaaggaaacccacaaacagctgggcgtggtgactcacgcctataattgcagcactctgggaggccgaggtgggtggatcgcttgaggtcaggagtttgagaccaggctggccaacatggtgaaaccccgtctctaattaaaaaaactagtcgggtatggtggcgggcacctgtagtcccagctactcgggaggctgaggcaggaaaatcacttgagcctgggaggtggaggttgcagtgagtagagatcacgccactgcactccagcactccggcctggacaacaaagagagactccgtctcaaaaaaaaaaaaaaaaaaaaaaaaaaaggaaacccacagggcctgagatgaaaaatgaagggagaaccttctgatggggtggcagaggcctctctggagagctgatctttaagagtggagggatgaagagagaccagagaaggcacatttgggcattccctccttaccagaagaaaacaccaggagaagcctcctggccagtgatgttcaaagacagaaccagtgcttgaaagaaatgtcttacttttcttcttggtaccttttcccctgtcttcctcctaacctcttgtgttgattttcttctcttctgccatcagtcttgataaactgcttgatgctggtctctatactggagaagtgactgaaattgtaggaggcccaggtagcggcaaaactcaggtacatgtgaggccagcagtcaggaggatttaggggtgagggtggtagatgcatagcccagggtccctgggggagcttcagcgtaytaatgggttcagagcccaacagagagaagatgggtaataaggaatggggtcgggactcagcccatttgtgttgctggaatctgggcaaggtttggtggggagctcccatctggaccctctctgaagtgtcaagttcatccaatgcccccacccccaggtatgtctctgtatggcagcaaatgtggcccatggcctgcagcaaaacgtcctatatgtagattccaatggagggctgacagcttcccgcctcctccagctgcttcaggctaaaacccaggatgaggaggaacaggtaagggcaggatgctgggttccattgagattctgacacaggaaaaccccattatcccttaacattgtaagaatktgggttgaatagtcattccttgccttcaaacttgctgttctattaatacatctcgtattccttaagccacccctgttgatgcmatcatcccatttgggatgctactcacacygattcttccaggaaaccctcccaactctttgcatgccctaaaccagggctggcaaacaccaagctttgtgtttccagtccatttctcacctgtgagagacatcactaatcagtcrtatccctctttcctgctgagttctgagtactttacagctcagcacccaggcagccaccacygtgacaactgaccattagacaaagctcatttgccaccctggacctgagtccttgcatccaggtkcctcttccttctcagccttaccttgacccccctactccctcttatccaaagtccttgcttttcttttccaccgcttcaggcagaagctctccrgaggatccaggtggtgcatgcatttgacatcttccagatgctggatgtgctgcaggagctccgaggcactgtggcccagcaggtgagcctgctgttctgcccctccttgcttaattcagctttctaggtgctatctctgtgggcaggtgtcctactacagactgtttggaaatgcagatgtgcaatctggtgactccaactatgcttgctactcccaggatggaattcccgagcacctaaatcacatacctcattgtttacatgttcatcttccctgctgaacagtaaagccccctgagtggaaggatcatgtcatatttatgtctgcattccccactaggtgagtgaggaatacttttagctgcaagtaatagaggttgtctgacagagacttgaagcttgaggacatttaattatgtcacatgagttgggaggttggcaggtccatgctatcagggcaatagatttgtgtgtctgattttcttgttcttcccctcatggttgcaaagaggctgccaaagctccaagcatcttgtcttcacacatccacatccatattcaaggcagtaaaagatagatggttcttttctgtacctcctcccttttatcagggatgaagaatctttctccagagcccactaatagacgtccctcttccccttacatctagttggccaaaatggggttatgtgtgtatcttggactaagacctgggcccaccatccctgaagtmagatttctgyccagtcgctgaacacattcagagtcatgttaatgggaaggatttagaatggcatttgggttggcactttgctactcatgttgggtgcttagacaggatttggtgcactgatttataaatgactagatgtggaggataccttaaagatagaatagtttatctcaaacttttcctctcaccccaaagcatgacgtgttcacacgggcatccccacgactatatataaagtcaatgatttttacaaactttagaacatataatagttgaacaagctgggagtggtggcccacacctgtaatcctaatgactccagaggctgagacgggaggattgcttgagcctagcagttggaggttgcagtgagctatgatcataccactgtaccttagcctggtcagcagagctagaccccgtctttaaaaaaaaatgttgaacaaatacttacctcagaagtcatagctggttatgacccaccagcttgttgagacatgaagctgagtagtgcttacctcacttttagagatgagaagagtgaaggccggagaagtgaagtgagttgaccaaagttgaccaaatatttagggcaagaactaaccttatagcccaaacctctcaattccagatcagaagactgtattttttactgtaggaccattagatgatatatcttctattattgcataataagttaccaaaaccttagtggcttaagacatagtatttcttatctcacagtttctaggggttaagaatctgagactaggagcggtggctcacgcctaaaatcccaatgctttggaaggccaaggcaggaggatcacttgagcccaggagttcaggaccagcctgggcagcatagcaagaccctgtcttaaaaaaaaaaaaaagaaaaagaaagaagaaaagaaaaagaaccagaatcaggatataagaagtaagggagaagagaaaagaagcatcaaaaacagtttaagtccagggaaaccaggaggattctcctgcttgtgtaaagacagaaaattatggttagaaagatggcacaggctaggcttggtggctcatgcctgtaatcctggcattttgggaggccaaagtggccagatcacttgaggccggatttcgagaccagcctggccaacacggtaaaaccccgtctctgctaaaaatacaaaaattagcacccrtagtgtgcacccaatgtgtgcacccatagtcacagctacttaggaagctgaggcatgagaatcgtttgaaccgaggaggcagaggttgcagttagctgagatcatgccactgcactccagcctgggtgacagagcaagacttagggaatttatttggaggcattttagatacggaagatgaggcctagaggcatgatctagaaggagacagtgaagtaaagagaaggctaaactcttcagcaaaggaagttaggaatttgagggtggtagttagcaggacaagggaaagaaaggagggagtcagaaaaggaaaagaagggccttaccaccatggtgggaggctggacacaggagagagatggctgctgagagatccatgaccagaggcctcaggactctctgcggagctttctgaaatttgatgactttaatgtagtttttagttattttattttattttttttgagacagagtcttgctctgtcgcccaggctggaatgcagcggtgtgatctcagttcactgcaacccccgcctcccagtttcaagcgattctcctgcctcagcctcctgagtagctgggattacaggtgtgcaccaccacgcccagctaatttttgtatgtttagtggagacggggtttcaccatgttggccaggctggtctcgaactcctgacctcaagtgatccaccgccttggcctcccaaagtgctgggattacaggcgtgagccactgcgcccagccactttagtgtagttttgatgtcctgtgatttaaaccctttctttctacccaagtcttcattgaagtctgttacacatgccaatgggacgagggagacattgctgctgatgacattctgtgatgcccgtgcagcttgctgtatttgggatgggggggctatttcttactagttttagatagaaaagcaagcttgtcctgtaatgtgtcctagaggctgacaggttcatgagtgcttcccccacattccttcaggtgactggttcttcaggaactgtgaaggtggtggttgtggactcggtcactgcggtggtttccccacttctgggaggtcagcagagggaaggtgagtgatgtggcagagcctggggccagtggaatgtgacctcgcctcccagctctggagtctggtctctggccagccccatccctggttccccactgccctccctctctgcttctcctcctcctgcaggcttggccttgatgatgcagctggcccgagagctgaagaccctggcccgggaccttggcatggcagtggtggtgaggaagcaggcttggccaatgaacttgatttctagttattgcgagctctttatttcccttaaatgtcagcttctgaaccccaaagtggccctttaggaaagggacatatcccagcttccctgggtcagctacagctttgcaccataaatagctaagggaatcaggaatcgtcttgttgtttttttgttgttttgttttgtttctacattttttctttttagtcaggtttattgaggtataatttacatagagtaactttctccttgtttgaagtttgactaatggatatagttgtatccagtcttgtgaccccaccaaaaggtcccccaggcccaggcaaccactgatctgttttccatcccaatagtttggccttttccagagcttcatataaatggatctttttgctattgaagtaactttttctgcttatgaggtagtttttttaaagtctgcatgcttctcatagaaaggatagaaaataaatatgattcaaatttgtcatcaatctccacatccacagaaaccatattaatatttttacatatctccatacaatactttttctgcatatttacttatacttttagccaactttctttctttcttttttttttcttttgagatagggtttcgctctgtttcccaggctggagtgcaggggcacaatcacagctcactgcagctcgaccttccaggctcaagcaatccacccgcctcagcctcccaaagtgttggtattacaggtgtgagcccacacttaaccagctttctaactaaactaacctcatgaaaaaataaaaaaaaataggccaggtgcgctggtttatgcgtgtaatcccagcactttgagaagccaaggctggtggatcacttgagcccaggagttcgagactagcctgggcaacatggcaaaaccccacctctacaaaaaatacaaaaactaggtggccttggtggcaggagaattgcttgagcctgggagatcgaggctgcagtgagctgtgatcatgccactgcactccagcctgggcaacagagcaaaacctcatctcaaaaacaaacaaaccaaaacaacaacataaaaaataccatctgagtccatttcctatgttttaaaatagattttttagaaatgtaatttttagcagctatatattttttccagtttcttttattgtggtaaaatacatgtaacataaaatttactatcttaaccactttaaggtatacagttcggtggtgttaaatacattcataacgctgtacaaccatcaccaccatccatctctataactcttcaccttgtaaaactgaaactctgtacccattaaaaataactcattttccccttccccagcccctgacaaccaccattctactttctgtatctatgctttttgactactctaggaacctcatatacatggaatcatatggtatttactttttgtgactggagtatttcacttagcataatgtccagaaggttcatccaccttgtagcatgtgtcagactttccttccttttaaaggctgagtgtctgggcgtggtggcccacacttgtaatcccagcactttgggaggctgaggctggcggactgcatgagctcaagagtttgagaccagcctggaaagcatggtgacatgtgccccatcgccttctggttcgggtcaaacctgaggcatcgagatttagtggaaagagcggggcacaagtcaggaggcccaggttctagttccagacctgccattaggttttgtaaccttggggaagttatttctctgtgctaggcctctgttttcctctccgtaaaatgaagcggtagtaatcgatgtcctctatactagcattatggatctgtaagtctgtttctgctgcaggtgaccaaccacataactcgagacagggacagcgggaggctcaaacctgccctcggacgctcctggagctttgtgcccagcactcggattctcctggacaccatcgagggagcaggagcatcaggcggccggcgcatggcgtgtctggccaaatcttcccgacaggtgagccagccccaggaagatgccagtaatcttgggccctggagggtggtttccatacccrcagatgtcttcgagaagaactctttagaggctgaaaccttgcaactaaagaagctacccacttgggttgcttaactccactgactccttacttcttcttccagccaacaggtttccaggagatggtagacattgggacctgggggacctcagagcagagtgccacattacagggtgatcagacatgacctgtgctgttgtttgggaaacagggaagcattggggacccctcccaacttttcttcccagtaacgcctgctgtttactgccacctggcactggtgactacagacgttctcaggctggccagaagagacatcttgggttccttggcctcactctctgtaagcatataaaccacaggcgaaagaggatgctgcattgcgaggacccagaaattcatactggtgccacgtttccttcccttatttctaacgtgtatgtttctggtggaaaccaagttcaccctggctgggagcatctctgatgaggcatgctggcgactggatggataatcctgtgcatcaccattgtgtcctgtgctccctcctagygcagtggccaagccgggaaagcctctaacttgcctttgctgctgctgccttttttttcttttgtctctgcctttccatttgttagatgggggcccactcttccttagctctgtctctgagttactgggtggaaataagcttataaatgaaatactcttcttcatctctgttttgctcttaaaaatataaaaaggcaattccccgagccctagagccacctgatttccccttagaaggctgtttttcagtttcccccagtgaggcccaaagaacagtttattcctcctttcctcttgctgatttggtttcagacctgcctgcatcaccatgactaggtgagaacgtgtgggctcgctgcagttccagggatataatttaacagaaagggagggtatgacctgctcctggtgaatccagccactcatttaatatgcatggtgccctgtggggcccctccacagtacagcataaccagaggtgctgaaccatggccttgcccataaacagacagaggagaatttgcacagtaaatagagccagctgggaaaattgatgctgacgtaaataatacatggcaaatctagtcctttatgcagaaattcattgctggtggctccaagatgcaatataattacacctctcttcctgccagctgtaccacagctagtgccctagtgtatgaaataatccctctgtctttcaccagcactgtggccatccgtctgagagccatgaccctggctgggaggggacgaagacaccagggaatggaaaataaaaggaaaagtacagaaatgatcaggattggttactggccacatcttttaaaggaaggtcatctttcttggttagagagcctgttgtgtaattaatcagttatgtcttggctgcaggaaaggagggtccgagttacactcagaaagtaatgacatttagaggtgatgaatgcaacagggatagaatcatggaggattgggaaggagtggcaaactggcaccagggtgttggattcaggacagggttggtaagcctaagcctgggggaatcctagcgcttgctttcacagaagacctcaggagaaattaatcttcagtatctttataccatgggtgattggcacattcctgcaaccacagtaagatgcaatacatgaagctggaaattgcaaattcttgccactcaaggtactatttgggcatcttcagcccacagcagacatgaccaatcgggcacaagcactcttttttgtggaagtcaaagtgtttttagaagtttttctcaatatagcactccagggggccactaccagtcagttggagttggtattcaaggtggagtctggttgccgtctctgccctgttcccattatgtagtgagttcaggtacttaatacctaactgaggaccctaggactgcagtttgagatcatctggggccaggcacagtggctcacacctataatggtagcactttgggagcctgaggcgggaggatcacttgagcccaggagtttaacagtttaaaatcagcctgggcaacatgatgagacatcgtttctacaaaaaaattttttaaattagctaggcattgtgatgtgcacctgtggtccctgctacttgggagcctgaggcaggagaatcgcttgaaccttggaggttgtggctgcagtgagccctgatcgcaccactacaccccagcctgggtaacagagcaagaccctgtctcaaggaaaaaaaaaatcatctggcccatcctgttacttaacagagaaggtacctgaggctcaaaaaggatgactgacagtcctagtggcagaatggaggtgggatctggaacccacaacttgattcctaggactcttttttttttaattcccacattggctgggtgtggtggctcacgcctgtaatcccagcactttgggaggctgaggtgggtggatcacctaaggtcaggagttccagaccagcctgaccaacatggtgaaaccccgtctgtactaaaaatacaaaaattagccaggcatggtggcccatttcctgtaatcccagctactcaggaggctgaggcagaatcgcttgaacctgggaggcggaggttgcagggagctgagatggcgccactgcactccagcctgagcgacagagtgagactccgtctcaaaaaaaaaaaaaaaatgcaaaaattagccaggcgtcgtggcgcatgtctgtaatcccagctcctcgagaggctgagtggggaggatcacttgagcccaggaggcagaggttgcaatgacctgcgatcatgccactgcactccagcctgggcaacagagactctgtttcaaaaagaaaaaaaaaatccccacattttatttaattttcagtccatacagttctattcctgctagggctgtaactccagctgaaggcaccacagctgtcacccaaggagtttctgtggccatgggaaggtgttgcattcactgctacttgagaccaccacgtgacattcctgcaggctgtgcccctcacagccagcttcatcctttggctcctcctagaccaggactttgtcttgcctgcctgctgccactgcactctgttccggccacaccacactgtgcagtcccctggtaggacttgggctaggctggctctcctgtccaagtgccttttgctccctttgcttatgtgtctgtytctgcccagctcccactgtgtctggtgcacacccaccctgacatccttttttatgcctcagctgtgatctagatagatgcttacagtaacttccctgtattagttattcacttgtactttctgttcacgtgtctgcctacaggctcccactttttgtcactttttctctttatacattatggaagctcagtaatgattaaatagatgaatgatgttttaaaaatatattttaaaaaagcaaaggactggctctatctcaggggttccttccataaagcgtcaactttcaatttcccctgcgggggtggtttgagacctgagggcactctctagttcttaggaaaaaaatatacatatacatatacatatatatatatatayacacacacacacacacacayatacacacatatatatacatatatatacacacayatatatatatacacacatatatatacacacatatatatacacatatgagccaggcgcagtggctcacgcctgtaatcccagcactttgggaggccaaagtgggcggatcacaaggtcaggagttcaagaccagcctggcctatatagtgaaaccctgtctctactaaaaatacaaaaattagctgggtgtgatggctcgcatctgtaatcccagctacttgggaggctgaggcatgagaatcgcttgaacctgggagatggaggttgcagtgagccgagattgtgccactgtactctagcctgggcaacagagtgagactccatctaaaaaatatatatatatgttcacacccacatcattgagtccccagagtgtcttcttacatatctttttacaggggactattgtatgcccttcgtctgacatcagatgaaattaatgttgagatcctactatgtgctagcacttgatggccttaattaaaaatcaggcatttgaattcccaaggactcaggcaaaggtccatgtatcattaaggctgcaagtaacaaaacctagcttaaagaagtgtaaatactagggacacttatttatatttatttcttttatgtttcaagacagagtcttgctctggagtgcagtggcacaatcacggctcactgtaccctctacctcccaagctcaagtgatcctcccacttcagtctcccaagtagctgggactacaggtgtgtgccaccacacccatctaagttttgtattttttgtagagacggggtctctgtacgttgcccaggctggtcttgaactcctgggctcaggtgatctacccgccttgacctcccaaagtgctagggattacagtcatgagccaccatgcctggcagggacacttattatctctgataacaggaagtctgaggtttgttaatttagtggctcattgtcaaatggcgtagagcctttgcatccttctgctctgttcttttatgttggttttgtcttcaagcttgttccccttatgaaagcctggctgcagccattttgagcatcaatccagacgtgacaatatctacaggcaggagaaggatcgcctcctgtgtgtcctttaaagaacaaggtgttaacatgccaggaactgtggctcctgactgtaatcccagtaatttgggaagccaaagtaggaggatcgcctgaggccaggagttccagaccagcctgggcaacatagcaagaccctatctctataaaataaaataataaaaattaagaaaacaaggtgttaaaagacaaaattaaagcaaatatagttttgcagattgtaattgacttttatttgcaattctagaattgggctgccctcagaaccaggacaggttcagagaattccagagctgcaacatagtctgaaagcatttatggtcagaaaacagaaatgagatacaaagacaactaattggttacagctctgcctttgccttatttgaaaatggtttgaatagttggctgcctggaacccactgaagctgatgatgtgattggctgagcctcagcaatctgttacaaaagtatactcctaaattaggttttcagttagtttgcatactaaggctgcagtttgttaagggcccaagtaaagcctcctcaggtcaattttttttttctttttgagatggagtcttgctcttgctcaggctggagtgcagtggcgtgatctcagctcactgcacctctgcctcccgggttcaagtgattctcctgcctcagcctcctgagtagctgggactacgactacaggcgcctgccactatgtccggctaattttttgtatttttagtagagatggggtttcatcatgttggccatggctggtctcgaactcctgacctcagatgatctgcctgcctcagcctcccaaagaactgggattataggcatgacccactgtgactagccctcaggccaaatttagcttttgtttgtttgtttgagacggagtctctgtcacctaggctggagtgcagtggcatgatcttkgctcactgcaacctctgcttcctgggttcaagcaattctgccgcagcctcccgagtagctgggattacaagcatgcgcccccatccccggctctttttgtatttttagtagagatggggtttcaccatgttggccagactggtctcaaactcctgacctcaggtgattcacctgcctctgcctcccaaagtgcctggattacaggcgtgagacaccacacccgaccccaawtttaatttaacaaaggactaactcagaactaacttccaaccaaagctgactcacctcaaatctcattggtgcagaattgcttcatacacccatgtgtaatacagtaactggcaagaaaaagggactgctgtgattgactcaaaccaactaggaaatagccctggagctgaggctggggacaggctttcctgaagcacatgctggagccactgaaagaaaaatgggagttctcctttctactagaaaggagagtgtgtggatgaactggatgctgggtgggcagcctctcactagtacttacggtagtaccaaagacgagttaatcaaggctctattatgtatccttaggcccttgatgcatgtctcattatgaccttaggacagccttgtggcagagggaatgattccatttaatagacagtaaatgggatctcagtgaggttaaggacataaagctaataagtggcagcacgggaatccagacacatgtctgcctgataccaaacccattttttcccatctgcacgctgccttctgctgtaaatatgtaaatgtttccacaaaattctttttcatactttgccctgatagcagcaggggctgcacatcccaacctcttttcagcttagctcaccataaaaagcgggatcagagatctacttctcagctctttctgatttcccccagggaagttacaaaagaatgacaaaaacttggagaaggcagatatcattagtattaaagagaactggaggtttagggggaaataaagctgaataaaaaacagcagggctggctgagcgtggtggctcacgcctgtcatctcagcgctctgggaggctgaggtgggtggatcatttgaaatcagaagttcgagaccagcttggccaacatggcgaaaccccatttctactaaaaatacaaaaattagccgggcgtggtggcgggtgcctgtagttccagctactcagaaggctgaggcaggagaatcgcttgaacccgggtggtggaagttgcagtgagccaagatcacactactgcactccagtctgggtgacggaacaagactccatctcaaaaaaacaaaacaaaacagggcctatgcatccctgagatgtgaagcagggggagataagggatttagatgtatatcctactaggtttttgctgtgttctgccatgcagttgtctgggcaggatttatttatattttaatttatttcaggggccatgctaatcatctttgtattgttccaattttagtgtatgtgctgctgaagcaagcactgggtaaggtttaaactgtctagttctgtgtgctggggtttggcattggagaaggctctgtgatgcatagaccttaaattagagttaggtatattattaatccaaagtgatcctgaatgctttctatcatttttttcttgtcctattgcactggctaaactgacttttagtactacacagaatagaagcaacaataacaatcatccttgtcttgttcctaactttagtggactatttacaatattttactgagttagatgccttaggttccacgtagctgctctttatgaaagacctcactgggttacccttcagtcttggaggagtctgggtattggccatgacatttgccatgaatgatggagttctctctgccaggtcctcatgccctggagctgtacggctgcacttcagctgctgcacatttgactttttgagtagcccttgaatctctgctcttccttggcctctctatagtttttggtataatagcctcagcttaagtttgagttttgtaggaaaacaatgggcctgtgctgacaaagatacaaagtcaaggaacaggattttttatatctcaactaacttggtcctagctttgacatttacttgccatataacaatggatgaataacagtctctttaagccttagtttcatccaccgtgaaatgggaaaaataatatctgtttcatagagttgttttaggatcatgtaacttatgtaaaacactgaatagttttccaggcatgatataggcactcaatctcatattatgaataagcttatgatgcatgggggatactgatgacagctttcttctgtccaggcaggcccagctacatggtggtatgaccagtgcagtcacacagccccatgcttagcagggctctgcacttagtttaatgctctgctgttgccatcttgaagttcttaatttttaaacaagcatcccatattttgcactgtttcttgcaaacagtgtagccagttctgtctccaggaatggatccagcactagtactggcccttctctttgggaaacatccttccattgatttcttagggagtaaatcccttgaagagtaacctcccatagaaaaattagggttagcaccctgtgtatgtttatctctaactgttccattctcagtaacctacacatcctctctcattaaaaaaacaaaacaaaacaaaaaacactttatattttacagaagctattagatccagagaggttggtaggggtgctggtgaaatggaatggtgatttgggattttggaatcaggaaaaagatctaagttcaaaaccctgctagtccctttctggccgagttacttggacaaggtaatgtctctgtcctactggtaaagtgtatgttgcaggggaattacattctttgttggtaaaatatatgcctcaggggaattaaacagataatttatgtaaagtgcctttcacagagagtctggcacatagtaggtggtcggtcactattaattcttccagctcttgccagaaataactaaaatcagggcactaggacttccaagccgtgctgctactaataaaagaaataatatgatttattttttcacaactgtttggggaaaggcctgtgcttcataaatatgcgttggaaagtacttagcaaatgagtagaaataataaaaatatgtccaagtaaacagctcctataaatatgtcacttggtagacaaattagtgttttatcactactaaatactattgctcgctgaaaaggatttcggattgcttgcacaatgggtacattattgaatgcctctgtggaagggcatgataaagatgaaaaatagtgacggtggtaatgcctaaggtggagaaaggaggagcgtggataaacgcagctcggaggcctctgtgctgcagtgatatgcacattatttagcagcattccaatgatttgcttgtaatatggaccagagggcccagaaaaaaatgatttccacaggatgtcatgaatccaaacttcaattattggatccaatcagtggattaagtgcaccccctttcagaactgaaccttcaggttgtaaactaagtttatgaaaggacatccccaggtctcaccccacccttgttctggacctattaactttttttctgtttgtttgttttttgttttgagatggagccttgctctgtcacccaggctggagtgcagtggcacgatctcggttcactgcaacctccacctcccgagttcaagtgattcccctgcctcagcctcccgagtagctgggattataggcgtacgccaccacgcctcgctaatttttgttatttttattagagatggggtttcactacattggccaggctggtctcaaactcctgacctcaagtgatcaggtctcccaaagtgctgggattacaggcatgagccaccgcgcctggcctggacctattaactttctataactatgatttctatcaagagaaagagtgatgtggtggaaaaggctgtgccttcatcacagctaggaatctatttcagaattgagaggatggacaaggtcctggcatatctagggaaaaggaattagagggaaaggaggagaccataaatgcctttggagggtagggctggaaatgaagacttagagagaagcaaaccagacagaattgcatcagggaaagttacaaaaatagccaggaaggaaaatgaagggtacatttaattcggatgtgggaggcctttagcaggtcagtctttccgtgcattccaggtgattgaaaaaatcagttttaaattccagctttttggggcgcagtggctcgtcctggtaatcccagcactttgggaggccgaggcggcagatcgcttgaggttaggagtttgagaccagcctggccaacatggtgaaactctgtctctaccaaaaacaggcaaacaaataaacaaattagccaagcgtggtagcgggtgactgtagacccagctatagggtgggaagatcctttgaacctgggaggcggaggttgcagtgagcggagatcacgccactgcattccagcctgggtgacagtgagactctgtctcaaaaaaataaataaattgcagctccgtgtattcaagacactgctggttgaaagaaaaaaaagcaatacattccagctccacctttttctaaccatgtagttttgggtaaattacttaatatgtagatcctcattgataacatgggaataatagtactcagtttgctgggttgtgaggattgaaaataatacttgtaaagtgacagagtctgatatgtatacgtgatcttattgttattatttctgaggcgtcgtctcgcccttgttgcccaggctggagtgcaatggcgcgaccttggctcactgcaacctctgtcttccgagtagctgggattaccggcacccgccaccattcctggctaattttttgtatttttagtagacatggggtttcaccatgttggccaggctggtctcgaactcctgacgtcaggtgatccacccacctcagcctcccaaagtgctgggattacaggcatgagccaccacgcctggctcaygatcttattttccttacgatattcyttgtttgaaaatacaaattgttcagaaaaactaggagttctcaatagaacctaaagcctaagaaaattgtgtcactagacaccatttaaaagaaggattagaacttaatattatgttcatgactaggcatcgtagcccacgctggctaaccatcccctgggccgccctgctgcttggcggtttactaaccacagctacatgcatgcgctcactaaatcctcacgccaacctgcgtttctgggatgagaaaaccagagttcgtaaaggttaggtaccttgctgaaaggtgcatgggtgaaaggcagggatggatcctcgctgagtcattctcattctaccacagccttcctcagcagcttcctgactttcctgaggggaagtagctagtcctagcggtttagactgggcagtgctagagtgagtgggacaagcatgggtttttaggtcccacagacccggcttctaatacctcccagttgtgggacgctgaataagctcgtaacccctagtggggctgggtttctgcaatcatgaagcgggggaaaccatcgcctgctcatcgcaccgaggagagagtcaatgagacatgaaagtcaggcacctttcaaagttttatgacatgcgttcagaggtgttgagggactcgctcaaggtcaccaagccgggtcttgacccagctgaaacttggacctggacccttgggcgcctcccgcagagttgtgtgaccaaggtaaccagcagcggccgaccccacgactttggggaaacgacgcctcctacggccccacggctcaggccagcccggccccgccgtcgggagcctcagctccgccagggggcgcgagcggaggccgcgctcgaggccgccgggcgcctcgctcttctctatggtggctcgggcgcggcgggagcggaggcgcgatcccgagagggggcggggccgagtcaggggcggggccgcgcggagggcgggagcggycgggccgggccggctggggatgggtgggagggggggccgacttcctggggccgcccgtgaggatgtcgcgaccgcccccgggtgcccctcagccccagagacgccgccgcggcggagtccgcagcctccctgcctgaggcgtccgcggccgggatccggcccctcccctcgcctcctctcctaggtgccggccgggagggcggccgcagcaggtgaggaggcggcggcggcggcgctgggggccgctgggcgcccggcctggggaaggacgggaagggggacggtcgggtgccgtcaggctgtggtctgggggcccttcctctgtgtggggcgcggcctgggactctccctgccctacaggggtggggrgaagcccttggctggctggaagtccccgccttcagggcagcccacacctgtcctttgaaaagtcccctcaaagaaagcgtttcacctgtgggggcagtaacaggagacgtgcgtcctcgattatccccaagcgccctgcagaccggcaggtctagttggcttgtggggaaaagatacctctttgtacgtcagaagaaactgaggcaggtccgcggcggcctgcttacccctttaaaggaaccagcccgtccctatctccgtcttagaggaggcggctggaggagggaggtttggagtttggaggtttgatggagaagtttgggaatgcggttctccccgcagggtccactgttccctcgcttgggagttgtcctctgttcgcgatgtgtgtgaggtcgccactgtgcggcagcggtcaagaccgagagggaaatggggcctctcttcagccggctgcccaggagacagttgaccagacatggggaagtctggcgaaccaggggagccagagcctccgctggcacgtctgctcagagcttgagttcaggctggcagaagagataaacaacagcatatcattttctcctttttgttggtctgtcatttgttctaggggggaagaagactgcttgtgtaatcaagagtgtaccgtgcaccccccagtctaccataaggaaggataattgttagcttggaaatagggttttacccacaactgtctctttgctccctggttaaaggccagagtgacgtgatgagcaaacatcccggggtgcatgtggccttctaagaaagcagtgagttccttatgtatccctttgattattggtttggaggacagagagacttcctgttaaccactgtcgctgcaactgtttggggtgccttattctccccgtgacagttcaatttactgaaatgtgggccgggctgcccgtttattataccattcttctaggaatgggagtaggcaggggacaaggtactgggctgaatttgtgtacagagttctagggctgcagcctagccgtggcagctcctttctgttcaggggatttcaggtttgacaacttctttatccttttctctgattacattctctttcacattcaaggaagtagatgatggcaaaggtttccgaacttttattgtatatttcctaattctgaattttagagtacaattcagaagttacagtttatttagagktattcttaagtttgaaaatatttgggtatattttcataacaattgcagattgatgtggcagggctaatatcttgattgtgattgaagaaaatgttcatgtaatctaggacgcactcattttaatgcccgtctaattacaaagaccagcctgttaaaaactttcatattgatcaggtagacagttgtgatttcttgtttacattgggatcaagggttgtaaatatttaaatcgaccagtttaaccagcctccaaaataacatgcacaaaaaaagaaagctcttctcagaaaccttaaaaatcaatttctttcaaaccttctctcatgaccaagccagttgacataactctgcttggtaccatctaataggaacaccttttttttttttggagacagagtctcactctgtcactcagactggcgtgcagtggcgtaatcatggctcactgcagccttgacctcctaggcttaggtgactctcccttctcagcctcctgagtagctgggacctcaggcatgtgcaaccacacccagctagtttttgtattttctgtagagatgaggttttgccatgttgttcgtcatgaactgggctcaagcaatcctcctgccttggcttccccaagttctgagattacagatgtgagccaccgcgccaggccggaacacctcttaagggttgtggaaaaggcgtttttagtgaccagcatttaagaagacaaaacaaacagcaacaataacaaaaaagggcacaatttcttttctaattacatgtgcattgttatttaaatacagtcacacccatctctatgagcgtcatgcctaagactttctgagaacacctctgtaaacctaagaagttgttagggggactaattccaccttgattttttattcttgtcatagaacctttaatactgccatggttttaatgatagaggcttttataccaaacttgtactagtcatagtgtttatgtttttggaggaaagatttaacctctataccttagaatctcataacttgttaatacaataacagaattaaggtattagagtttaatgagaacgcatagtttaaattactattggtgaagtctcaagtgaggagctgcttcattgttgtttggtaatggttactggtttaatgatgattactggttatttttgtttcacttctggttattggtaatggttatttggtgtttgtgtaagaaagattttggcaattgtaaagatagtcttttttttttttttaattgagatgggggtctcactcttgtcaaccatgctggagtgccatggaatgatttcagctcgatgcaaccttgcctcctgggctcacgcaatcctcgcctcccaagtacctgggaccacagatgtgcgtcactacgcccagctaatttttgtgtttttggtggagacagggttttgccatgttgcccaggctgatctcaaatgccttgagctcaagcgatcctctggcctcggcctcccaaagtgctgggattatgggtgtgagccactgtgcccagcctaaagacaagcttttcatatagaaacagactcccgggtctttcgtaaggaaatatctgattaacttcttattttgtgactttatattagttaagcagttttaaaatagtaaaactaatttggctcttagtaggatatcctattatatctcacataaaagccatctcagataggtaggaattggcctcatgtatttaaagacctctgccctccctgtttccaagatttaacagctgccatcaggacagcggtcatagctaatcctgttatgccagtcttagtttaaacccattatcctttctcttcgttaagactgtcatgaagttcttcctttacttttcttatgcagggtgaatattccacatttttaatgtatttgggcctgttaacattctgcagtgaagccaagcagttggttaaaagagtcctgcatgtttttaaacagtttcctttttaaagcataaaatctgcatcttggctgggygcagtggctcactcctgtaatcccagcactttgggaggcagaggcgggtgattacctgagatcaggagttagagaccagcctgaccaatatggtgaaaccctgtttctactgaaaacacaaaattagccgggcatggtggtgcatgcctgtaattccagctacttgagagactgaggcaggagaatcacttgaacctgggagacggaggttgcagtgagccgagatcgcaccactgcgctacagcctgggcaacaagagcgaaactccatctcaaaaacaacaacaaaaaactgcatttcctctggagtaaaaccagctttttgaatctgataataaaacaaaagctgttttttcctgctctctactaatagaaagtctttattaactttaccttactggttttgttagtacagtgactagtgactggtagtaaatgataacctagtggtaatgggagatcctgaagtctcctgaatcatcaatgacaggtcacattgggttcagtgcagctttagccttttgagtatgttttattgtaaggagttccaaacgccagccactccttgaaagatgaggtacctggtgatttgctgctgagtcactgaccgagatattctttaaaaatgcagatttcccagccccacttcctggagattttgactgagtgggtaagtgatgaccagagaattaccttttattttttcaattttataatttattattactactatgaggccataccaygtagacgctaccttttatttttattaattatttttattttatttcattttattttgagatggagtcttgctctgtcacccaggctggagtgcagtggcgggatctcggttcactgcaacctctggatctcggttcactgcaacctctgtctcctgggttcaagcaattcttctgcctcagcctcccgagcggctgggattacaggcacccaccaccacacccagctaatttttgcatttttttttttagtagagacgggttttcactacattggccaggctgatcttgaactcctgacctcatgtgatcygcccgcctcagcctcccaaagtgctgggattataggtgtgagccaccacacccagcctatttatttatttttgagacagtctcagctctgtcatccaggctggagtgcagtgaggtgatctcggctcactgtaacctccacctcccaggttcaagtgatgtgcctgcctcagccacccaagtagctgggaccacagatgtgtgtcaccacacccggctaatttttgtatttttagtagagacagggttttactatrttgaccaggctggtctcaaactcctgacctcaggtgatctgcccgccttggcctcccaatgttgggattacaggtgtgagccactgcgtccagcaggaagctagctttaaaaaatctcccttgcatctttattttcaaaaagctccccaagtggtttttatttatttatttttttgagatggagtctctgtcacccaggctagagtgcgtggcatgatctcggctcaccgcaacctctgcctcctgggttcaagcaattctcctgcctccgtctcccaagtagctgggattacaggcacgcgccactgcgcccggctaatttttgtgtttttagcagaggcagggtttcaccctgttggccaggmtggtctcaaactcctgacctcaggtgatccrcctgcctcgacctcccaaagtgctgggattacaggcttgagccattgagccaccgtgcctggcttcccaagtgctttggatgtgcagtcaagtttgggaaccaccgttttattgcattgatactctttttcagggtggggggggcattatctcctgtacatcaggccccatggaactttgaaaattggggttcacttttcttcccttttctttctttcttttttttttttttgagacagagtcttgctctgtcacctaggctggagtgcagtggtgtgatcttggctcactgcaacctccgcctcctgggttcaagcagttctcctgcctcagcctcccaagtaactgggactacagacatgcgccaccatgtccagccgatttttgtattttttgtagggatggggtttcaccatgttggccatgctggtctcaaactactgacctcaagtgatctgcctaccttggcctcccaaagtgttgggattacaggtgtgagccaccgtgcctgacccgcttttctttttttaatttttagagtgaaattatgcacattgaaattccttataaattggtagtccctctaatagaatcgttatgctatccaggatgtttgatttgctagaatagcccatttcctagtcatgacagataacaaagagcttttataacttttatgtaaattgctttacagtgaggcctcctctgctgtattatctatcaggagtcatgagggagggtttttggtgaaagtagcttcgtttatctcatgagtggacaaatgaatgataatgtggaaacaactagaggtctgaataggtagttgaatctagttatgatcatcagtgttggatggcagagatgcctgggaattctctgtatgtcaaattttagaataaagtcagtttgcctgttttatttctacacagctgaagcctttattgaaaataataggtgcgtaacaaatagttaataaaatttagtcagcagccgtttgatgagttcatgggaggaagaataattgctgaaatatagaaccatctgatttaaaacagattcaggcactagatacgttatccctaacgtagtttgtttgtatagacaaacctggttttgaattctgactcccccacttcctggctgtgctaccttaggcaaattacttaacctctgtgagcttcagttttttcatctgcaagatgaaaatacctggtaggattgttatgtggattaaaagggggaaaatatgcaagggaggattgaaagagagaaaaatatgttttttgtatattgtaagcaactcaataaacgtcccttctcccacttcctcacacaatttttattctgtaggcttaagatgcttttctaaatccagctttctctatatctctttccaggaatatctattcagtcagctcttttagaaaatgtatgaaagagtgaggactaaagttaagaaccagagaatatgggtaagaagaatgagtcacaggacaattagcaacrctttaaacaattttttagaatgagtggagtgttggcatgtacccagagttactatctgcaggaataaatgaataacattacccaaattctgccatctgtatttggacggtagcccagattaggctaggagcctttgagggtggcctcattaagtagcacctgacatccatttctttcattatcttcttttctcccttttggtcttcgtttcttgttccctgtctcctccttttccctcttttaaagctgtccttcctttagacttgccaatcatcatcatagatgcaggcccagtccctggaactcgaggctaaaagaggtttctggttgctaacacctgtctcctagctaaatgaataagctcttttgtgggcaggatgttaaaaaagctgattagtacaataccagcttaaagggcctattaatgatacagcatatgtaaatcacagtgatttaaagccattttagagattaatttcttatatatttattttctatattgaattatgatgtcagttgaatttttacatctaaaccatgaatctgtttattacctaaacagactaatttctttcatattgattgggaatcatttatattctaaagaagtttccacccttaagggcctttgtattgtttggcaaatgtctaactagtgtgtaatacaattgaagttttgttcactgcgctgctgccataactagtttaatttctgctccttatatatttctgttggcagctggaaaattaaaatactagatgttccataaaactgattttttgaggggtgattttactgtcatttgaatggacttaggccccagggtacatttttttaagatgtcttaytcaactttcctgtaatagtctctctctctttatataattaatgtattagacacataattggctgtttaagcattcagaagagacaatgtttggccttttacccagagattatttttttctacatctcttgaggaaatgtgtgccatttttggaaactcctaagtatattacagttacactagcacgtgaatttttgcaaagactagagaatgaacaattcccaaatcgttctattctttttagatcatagtgtttccaacctgatgtgaaaggagaaaggctgtgatgtgatacctagtaaatcctcctcataatttttctatatgtttcacagaaatatatagtcttcaataactgaagttactctcaaggagactttacatttaattactcaatccacacttaatttcctgcaagattcttggagagacactcaccaggctactgatttcatggagttataacctacacaggtttttatctctgttaaagctactaacccccactttttttttaggttgaaaagtgaccttggtctggtaatttcttcattgtcytctcctctaaaaagatacagcaaaaccttcttgctctctcagcagcgtttttcaactgctactaccgccatgtgctgaatttgaatttgagcacacttcagtgtatgattttgttgagctaatgttatctgactttttaaagctgccgctctgcaatgctacagttaaacctacattttctgttttcatgttcacatgccttttctagaattacatataaaaatatgttttcattatctctgagttgtggagtgttccctgggacagtcacttgtttctaccagtggctagttctaagagtaggggaaatccacctggatttgaactacttggcagccagtatgatctgctgaaacattttaactgtcttggtcctttttaaagaaatgctgcctactcatcttgaaacttrcaggaagttaggccaagtggaggctctgctggcttctgagtggttaaatgcaacttattagtgatcaacaccattgtttatttgcaactgctggtggattatgttaaaagatttgaaaggaaaaaaagcttttcttaagtaaatcgtgcatcctcctctcccacctcaccctcttcttgttttactcttcatttgctttggaaaatctttccagtcttggtactgatcacatgtatatagtcttagtggcaattgaatcaacgtattttatcctaaaatatacaaaaaactatgtgccctaccctctgcattttctgctaatcctcccatgcttttttaccttcataatgattaaaatatgtgcctgagaaataaccaagcttcatcctctatcaacttccaaccctcttctaggtcttgcgtcagtagatgcataaccatttgcagttgggttggattgtaccatcttaactatactaattattattttacatggtgtggaagatcagccagagcatatgctttattctaaaatgctgggcaaaggaatgttctaatttggagagagaggaaggagtgttttctagggccttagcaggagtaggtccactgaaattcagctagtttgaggaatctggatttttgtcaaggggtggaaaggaatagttaggggctaaaattatgtgcaagcaggggtgggaaggaataatttatgagatgaggactttcccagtccacagtggagaattcttaatcttccagattctcttatgtttgtctacttatcatatactgatggaagagtttgtgtaatccttctgtgtcagagctaaagtataccttagccattgtttactgagagggtgggaagagggatgtcagaatattctcagcttgtcaaagggcattccaccttcctgttgtacccttggccatatggttgaatccagcacttcagatgattctgaatcatccccaccactcccattgatstagttcagtgtttcccaactctgaaatgttgacacagttagagaccagaagcttgaggaatagtgactgtgagcccaccaattaatgggggacattaaaatgatagtagttctgcagcttcacctctagatgatcttcatcagattcttaaattgcatttacttgataaaatcctcaccacagcacatcaacatgtctcttgcactacccaaaagcagtattaaaaaggaaaatacgttgacaattactatctaattaggtttttatttgagatacaggctatctatagctctgttgttatttgtggaaatgctagcaaaaaaacagactgaaatctttctccttatgttgttgttttagaaacaacacaaacaggttgggcggtggctcacgcctgtaatcccagcactttgggaggctgaggtgggtggatcacttgggttcaggagttcaagaccagcctggccaacagggtgaaaccctcgtctctactaaaaatacaaaaatttgccaggcatggtggtgcgtgcctgtaatcccaggaacacaaacataaaaataagcctctagttttatttgggagggatcgatataccatattcgagttctgaatatcgtgtcaggaaagcagtttttgatgccactagttaaatgtttgtgtgttttgatataccgttggtcttcccaaccaaacatcactttttttttttttttttgaaacagtgtctcactctgtcacccaggctggagttcagtggtgccatcttggctcactgcaacctctgcctcctgggttcacgtgattctcccatcttagcctcctgagtagctgggaccacaggcgtgtgccaccacatccagctaatttttgtattttttgtagagacggggtttcatcatgttggccaggctggtgtcgaactcctgacctaaagcgatctgtctgcctcggcctcccaaagtgttgggataagtgctgggattgcagatgtgagcctctgcacccagcctatccctttttaagatggggaaaaatggaaatttgctgttatgtattacacatattatgaaagcatattagaatgtattttctgggccgggcctggtggctcatgcctgtaattctggcactttgggaggccaaggcaggcagatcactggagcccaggagatcaagaccagcctgggcaacatagcaaaaccttgtctccaaaaartacaaaaaattagctagatgtggtgttgtgcacctgcagtctcagctactcaggagtctgagttgggaggattgcttgagtccaggagtttgaggttataatgaactatggttgcacaactgtactctagtgtggacaacagagtgagaccctgtctccagaaaaaaaataataaaaatcaaataacttctttattggagattacatacaaatcgtgacctttttttttattcctraagtctttagtaaggttatatgtttactgcaatagatcttaaattttactatgatcaaaaatctcctaggtgcttgtaaaaaataaagattcctggttcctagcccagccctacagaatcaaagtgtttgggatagagatgtgggattctgatgtagtttatctgtagaccccacttggagaaagaatttatgtgagaaagaaccacacataaaaaaaaagattgagaaatgctattattttgcagaggaggaatttaaagcacagaaaagtcaagaggctcagacttaactaggatatccagctagttatttgactcttgcagaccagaagctaggttggctgactactgtggatttgtgctctttccattagattatagtctggggtgtgccatcttttggcctccctgggccacatyggaagaagaagaattgtcttgggccacacataaaatacactaacactaatgatagctgatgaaagtttatgaatttgtgttgggcccggaggccatgggttgatcaagcttggattatgccagggtgcctccttgctggtttatctgattgcctttaaatcagaagctataagataatgagggcaaaggtactttgattccttcagaacaataatgactgaactggcacttcatagtgtgaaaagtttgtgcttcttaaactatctgtggtgaaggaccagctttgtaagggtttcccttcacccctaatctgttgccagccaataattgtgtaaagtacaagaaaagggaatcaccagaaaaatcatgcacttggatgtcacagcaatgtcaagcactagaaaagtttctaaatgcttactgtgattttctgtgttttatcttgacgtgaatgggcctccagcagtctgacacacacactttgaatagcattgttctaagtggttcttaggacatcttaagaacttgatatcagaggtccttgatcattttcttcctcatgccacctataactgaagctaccatctgagagctcccattcctacctggggagagaagtttcatgacttggtggtttcctaggtcagaaccaaagttgataatacttagggactagttaaggaactatatagttaattwatttaattattataaataatttatatatatttaatatatatataatttattttaatatattttatttttatttttaaaaaccagaacatttattgtgttactaattgttgaaattcttaagatgaactggatgctgcagcagctgccctcttgggtttaggtggtgttctttcacagaatccatgccygaatttgctgtatacaatttttaagtgcctcatttgaccagttccagtggtagtttgtcttttagccttggcactccagttatacttcctcttgcgcttggcagcatagccacatttgccacaggtcgacttctgaaggtggtaygtcctgtcacgtcttattgtgatgctttccaaacgatgatgttcccttcatcatctggcttctgttactattattattattattattattattattattattattattatttgagacggagttttgttcttgttgcccaggctggagtgcaatcgtgcgatcttggctcaccgcaacctccgcctcccgggttcaagcaattctcctgcctcagcctcccaagtagctgggattataggcatgcatcaccacacccggctaattttgtatttttagtagatggggtttctccatgttggtcaggctggtcttgaactcccgacctcaggtgatctgcccaccttggcttcccaaagtgctrcaattataggcatgaatcaccacgcccggcgtttttactattatttttaaaattactgctccttgcagagcagggctaccctataggcaatgtgcccacagtagccaacctttaatatatttaagagtaaattgaggccgggcatggtggctcatgcctgtaatctcaacacttttggaggcctgaggcgggcggatcacttgaggtcaggaattcgagaccagcctggccaatatggtgaaactccatctctactaaaaatacaaaaattagccaggtgtggtggcacgcgcctgtagtcccagctattcgagaggctgaggcaggagaatcccttgaacatgggaggtggagattgcagtgagccaagatcatgccactgccctccagcctgggagacagagcaagactccgtctcaaaaaaaaaaaaaaaaaaaaaaaaagaataaattgatagaatttgcattgggtgcttgtattgggaggcatattcccctctttttgactaaatactggaaaggagtttctaacttcttggcctgtaacttaactcacagttaagatgcttaaagatgggagacagaaaataaaatttaggggtgtgcaatttcttcgagacgcttttgtgtttgctttttagaagccttttgtgaatagtctacgaggatgcattattagtttttgtggttataatgtcaaaattagtgttgatttggagcaggcagggaaatctctccatgcatgcttttcatcctggtttaattgcttagttggatgaaatgtcaaacttgatagattattggagctgttattttggtagttaaacaataatgaaactgtttgaatgtttttggagaacactgcttcctgtgtctggactttgcactggagaaagtttcaattgttcacaagcaatactggttagaaaatgcagcttctgtggctcctaacacagctgtctaaattactagctatatgggggcctttggacaagcactgcttaacacttttggaaacaatttgtttctgattccaaaaatgtcgatggtcattccctgaatacttgagaaaactagaaatgggaaaaaggtattgcatgtgtctaggttatgccagtcaagtgttttttctttaagcatctctagaacaaatttacctttttagctaaggataagaggtttatggaaatgttgtagcagccccctgggcctttctttcctccttgatgactgttcagcagggtagcatgttgtcagcttgtgtgccagcttacagagggcttgcgttattataaccttgattaggaaagagggatggggaacaggagtgagaggacagatgtttttgaaagtccctctgcctgctatgtgaaatcttgaattttcactttgaacttcactgttgtttggtgacagatgttataaaactgtctttacaaacaatcccctttcctattgaaattgtatgttggccacaggagctagggaagcaytgggcatgttcagcaggatttatttcactcattccactgtgtcagatgatactttttctgaatgaaattgtatgcattcttcagtgggagttaggggaaggcttattcttgtctaaaagtatgggagaatttgtgtaagactgatcaaaagactagcacttcttttgctatgtgatacttctctttgtgccatattttacctgtaggaaaattaccaacagttattatgtgctctccaggtgccagggactttgctgtattaacaagtttaatcctcctaacaatcctatgaggtgtgtaggtgttatctgtgttccacaaatgtgaaaatgccgcacagagaaattaaagagggggcccaaagcctcacagtgttggaacccaagtattccagctgtcaaggttgagctgtcaactactgggtgacagctgcctcacactccgtcaggatgattaccttttgaataagtctttacaaatatgtcggctgcagaagtaaccagtccagaatgaatgaactctcaccgcagttttagctcagcaagcagtgcctgctatcagaaacatccaaaaaccacagcaattagacaaataaattgtgaaagatgtggtttccaggtaagatatgtgacaggcttcttaccgcaaatagtttttcttacaaaaggagaaagactggtgggagagatggtggaaaaaatgaaaacaatgtgtcttttatgattgtctgggcccatcctcacaggacttcatatgtagtgaaggcagaatatttacctcaagcccagatgaccaacttttactttctacactgactcaggcttcttcctaaaaatggtgtttcaccatttattccactaacatcactttttaattcttaaaataaaaaagaatagttttattcataaaactacatgggcctacttgtgtggaatgtgatttaaaaatgatgttagcaatacttgttacttattttactagttttagctttgttagtgctgaaggatgttttatagtttattctaaaattgtaaacgtttttgatgtgtaagccagtcacccttaaaagcacatttggctaaataaataaagcattaggttagagaagagttcactggtggttattttttgttttgtgtgtgtgtgtgtgtgtgtgcgtgtgtgtctgtgtgtggggtcttcctgtttgtcaataggccttcccaattaattgaattctacataagatacatagatgttagtgccccatagggcctcatcttgtaagtgatgttagtggagtaaatggtgatataccattttcagtaagaagcctgagtcagtgtagaaagtaaaagttggtcatctgggcttgaggcaaatattctgccttcactacatatgaagtcctgtgaggatgggccagagaatcatagaagaaacattgttttcattttttccaccatctctcccaccagtctttcttcttttataagaaaaactatttgcggtaagaagcctgtcacatcttacctggaaaccacatctttcacaacttatttgtctaattgctgtggtttttggatgtttctgatagcaggcactgtctgctgagctaaaattgcagtgagagttcattcattctggactagttacttctgcagccttctggcccattactcatggctttggtgaggctcgataaaaatattgtgatggatagggcacaggtagtgcctgaatgtatttcagatagttgggccaacaaccaatctatgcttaaataatcatctctcctgcatagtagagactgcaaaatagtatgaaacatgctatactttataaacattttgccttttttagctccccgtagtggctggacagttgactgaataatttcatgtttttttttttttttgagacggagtttcactcttgttgcccaagctggagtgaaatggcacaatctcagctcactgcaacctctgcctcctgggttcaagtgattctcctgcctcagcctcttgagtagctgagattacagatgcacgctaccatgcctggctaattttgtattttgagtagagacggagtttctccatgttggtcaggctggtctcgaactctccacctcaggtgatccacctgcctcggcctcccaaagtgctgggattacaggcgtgagccaccacgcccgaccacttttttttttttatactttatttttaggtaattrtagattcacaggaagttgcaaaaacactacacagttcccatgtacccgtcacccgtttttctcccattggttatgtctcatttaaccatagtacaatatcaacaccaggaaactgacatggtgctckgtgtgtgtgtgcatgtgtgtgtgtgtgtgtgtagttttctgctgttttatcacatgtatggatttgtgtaactgttctaccaccacaaagatcccccttgtgctactcctttattatcatgcatatccgttttccctactgtcctaatctctggaaaccagtaatctgttcggtgtctctataattttgtcatttcagaaatattatggaaatggaatcataacagtatgtgacccaatatgtgaccttttaagactgggttttttgttttttacttttatatgcatagaacaattggaactttttttttttttttttgagacagtgtctggctctgttgcccaggctggagtgcagtggcgcaatctcagcttactgcaacctctgcctctctagctcaagccatcctcccacttcagcctcctgagtaactgagactacaggtgtgcaccaccacacccagctaatttttgtattttttttatagacagggtttcaccatgttgcccaggctggtcttgaactcctgagctcaagcgatttgtccgcctcagcctcccaaaatgctggtattacaggtgtgagccactacacccagcctcgaatgtattttttgtagagataggtctcactgtgtttcccaggytggtcttgaacccggcatttttcacttagtgtcacaccatccatccaagttattgtgtggcagcaatagtttgttccttttatctctgagtagtattccatggtgtgtatataccacaggctgtttaactattcaccggaagggcattttagttgttaccagtttggggctattacagatgaagccataatgaacatttgtgtacaggtgattgtatggacacaagttttagtttctttgggttaagcatccaggaatgaaattgctggttcttaaggtaagtaagtgtatgttcagttttccaaagaaattgctaaactttttttttttttkgacagtgtctcactcactctatcacccaggctggagtgcaatggtgcgatctcagctcactgcaacctctgcctcctgggttcaagcaagtctcctgcctcagcctcccaagtagctgggactacaggtgtgcaccaccactaccagacaaattttgtatttttagtagagacagggtttcaccatgttggccaggctggtcttgaactcctgacctcaagtgatctgcccacgatgtcctcccaaagtgctggcatgacaggggtgagccaccgcaccgggccaaaattgctaaattcttttccagagttgctgtaccattttacagtctcaccagcagtgtatgagatccagtttctctgcatcctcaccagcatttgatattgtcatcatttttaaatttttgttttttttttttttttgagttggagtcttgctctgtagcctaggctggagtgcagtggcataatcttggctcactgcagcctctgcctcccaggttcaagcaattctcctgcctcaccctctcaagtagctgggactacaggcatgtgccaccatgcctggctaattttttgtatttttagtagagactgggtttcgccctgttggccaggctggtctcgaactcctggcctcaagcaatttacctgccgtggcctcccaaagtgctgcaaatacaggcatgggccaccgtgcctggccaccattttaaattttagctattctaataggtgttatatctggtttttaagttcatcagattacttagtaaaactgattcgactgacaaagatagaagatttttgagttgtatttttagctctctgaatgaatctgcctccatacagtgtcacagtggtctgctgactggctttttagcacccctgccatggtttccttgacagcaagaccctagacaaactctttttacccagcaatagatagcacagcactcccagtacagtactgcccatagacaaataatacaatttcaaaactgtgaatttcttgttaattttttatacttttgcctccatgactgtagctttaaatgtactcaaaatttggcttccaaaggccctaaaaactttttcaaattgttttggtttatgttatcaaatggtcttaggtactttatttctaatacgattaacttaaactgctcacacctataatctcagcactttgggaggttgaggcaggcggattgcttgagcctaggtgtttgagatcagtctgggaaccatattgagaccccatctctacaaataataaaagaattakccaggcatggtggcatgcaccagtgatctcagctactcgtgaggctgaggtgggagattgcttgagccagggtggtcaaggctgcagtgagctgtgatcacaccaccgcactccagcctcggtgacagagtgagaactgtctcagaaaaacaaaacaaaacccagctaaaatagcataaagtagaagttagacccccatccctactaggaataactgctattaaatggttttagtatatgtgtgcgtgctcgctcgctcttttgcacgtgcgcgtgctctccctctctcggtgtgtatgtatatatatgtatgtgtgtatctatcatatataattaaatatatattcccccctgctgttcacagtgctttttttcaaatgggtaatgtattatggagcattttttaatgtgaattttttaaarcatttaggacctgggatggagctttgggttcctttctccaacccttgtctgttctgttataaaagggatgagagaggtacctttgaaagacctaaagaaaatacgttttcttccttgttacatgggtttcagttgaaataaggttttagctttatttgtgagtaaatcagtagaatactggatgttaggatgcatctctccactttattataaataatgcaaggctgattttatgatgtgatctcttgcagaactttgggggaagtgagaactgtgagcacaataatcttcagagaatgcacagtcctttgggtatttgtctactcatcagctgcttagtcagatggagtgttttcctaagtactactgaagtacacagttcagtctttattttgaaatctctccttctgccttctctccctcttccattactttgattaccttgatgggacattcaagctgtgcagtcgtatccttttatttctatagcctgcagaaaccaggttgaagattaactgtaggtgaacaggtaatcttatctacttggctagaaatcacccttcaagatgaaacacgtgttgacaaaggccccctagacttggggacatgaacaaaggtaagttaatcttggggcattattagtggaaaccagggtagacgtttaggaagtttgacttattggaggcagggcatgtgtgtcagggagacagagcatgtgagtgtgtgtattaggagaagagacgaattcagaggtatacagaaaagaagaatgatgaattcaggcaatcttcagagttgaattacagaatcttttttctgagagtatggttactgcggcaaggtagtaataggacatgagcctgctaagtcacttcattatgaagctattagaatttaggtgatggagtttgatgacaggggtcttttccctgcccttctactgtattagctgctcagggaaaaaaaacagaaaactaagaaatagccttatatagaaaattatacccatcaaatggttccaaggtttctgttgctgggtttctgaaatgagctgcccaagatagcagtttggtcatgttgctgacttcttgctgacttcctttctcctcctcctcctccatcgggtcctcaggctgggtcctgacccctctggattctttcttttcctgcatgcttgctactttttcaattactgacatacaggaacctagtatttcattgtgcctgaggtaggcagttgctagcctcttgatattggataccttttctgagctatgaagtattacaccatagtggataataaagtactcacaattgcattatagaatagattctggtaactgcaccagtggggacagactgggttagcatgccctcacacaactggggggttgttttgcagcaaagtgctgtgaagcaggttgagcctcatgcagtgccagttcctgtatctaaatgtgaaagtggcttgttaaagattaaagggactgcctggtccttctggccccaagatggaatgatctctgccatggcgacagcctctatctcccaggagaggccattttatacagcacatttgtgcttccaaatgttactgtaagcctgcactggctgatactctggcgataagttgacatttgggcactctcaagacatatgagctatatagcatcccatggtttgaatttctgggcaaaattggctcatcaggaagtcaaaagcctctactttcaacctgttcctttgggttttctcctttgttttatttgactattctgttgagtcaaatgaactttaatttttagccataaaaattccattaagccccttgtatcatatccaggtgtgaaaatgtctcagtataacaagactgtgggtgacaggtgaaatccttaatggtagttaggataattgtctctgaaggcttgaagaaaataatggtccaaccaacaaagtgaatacagtttgtattttttgtggttcttgtgggtgagcggacttatgtttaggacctgctcagtgtgactactgttcagcttggaggtctttgaaaaaactttttttcattttactctaaacagtgcttagggaacatagctgtgtcctttttctcaaaacatgatccaaggcccatctgtatcagaattgcttggaaggccgggcgcagtggctcacacctataatcccagcactttgggaggctgagacgggcggatcacttgaggccaggagttcaagaccagcctggccaacatggcgaaactccgtctctactaaaaatacaaaaattagccaggcctggtggtgcatagtaatcccacctacttgagaggctgaggcaggagaatcgcttgaacccggaggtggaggttgcagtgagccgagaaattgtgccactgcactccaacctgggcgacagagcgagactctgtctcaaaaaaaaaaaaaaaaaaggcttggaagagagagatacttattaaaaattcagttttggccaggcatggtgactcacgtctgtaattctagcactttgggaggctgaggcaggtggatcacctgaggtcaggagttcgagaccagcctggccaacatggcaaaactctgtctctacttaaaatacaaaaattagccagacatggtggcatacgcctataatcctagctacttgggaggctgaggaaggagaattgcttgaacccaggaggtggaggttgcagtgagctgagattgcaccattgcactccagcctgtgcgatgagagtgagattccgtctcaaaaaaaaaaaaaaaaaattcagtttctggggcctccctccatgtctgctaattcagagtgtctgagggactgggatgagaaatgttcattttcaataagcacccctgttgattcttaagtacccctagagttaattgttgagtatcataaagtttacttcatttttcatgtttaatttctgtgatttattagatgataaatatttggttgccatcatattgtttttcttaaatactatgttctatagttaaaaaaaaaaaaaggctgtgaggtcactgaacaccaagattagaatttggcaatcattaattatcaacaaggtgagacaggcactgattcctggaaatgtgcatttatccattcaccgacttctcagttagaaaaaggatgtggacacaagtaagattaattttgttaaaaacaagaaatgtgcagtatcatttaggatgctgggggtagggaagtagataaaagggagatgttgagaggaaagagtgtgaagagagagtaaagcagtttgtaagtgatacaaactttaaaattttaactgaattttaaactaccaagtcatatttgaatatatgcttgttgtaaaaaaattcatgatttttggggggtaatttggataaagctaaacatagctatttgatctttattcccattacagtgctctccctgctgtgtgcatcctcccagatcttctgtatgtatttggtaattttctgtggatttggaagactacagaatcctgagaaatggatattttaatttctcttttgaaacctgcttattgtttataatgtcaagatctattgcagaaaagamagtaaatctgggatgtcaatgacatcacatatgtctgttcaaatgaaacaatgggcacatacacatatgcacactcattaaatatctgttgagaccaccctattaaaaaaagcataaatagttttgggtgttaagttacttgagttttaaaataacgtattttctgtttttgttgttttttgttttgagatggagtctccttctgtcgcctgggctggattgcagtggcgcaatctcggctctgcaacctctgtctcctgggttcaagtgattctcctgccccagcctctagagtagctggggttagaggtgtatgccaccatgcctggctaattttaaaataatgtattgaaagaacttagtcagaaagccacagttattatttctcccatagcctcatattctcataattttcatgtaacctcataaatcctcaagtgcctgaaaccactagttcaaacgagtacctttttaagctctaaaatgtaatcctcaacctttccactttaaaaggaagaactaggatggagtgtggctataatttggggcagttggttaaaactgtatcagagtcccaaagaggggaatgataagctgcagcagctctgttcacttgctcaatggtgtttctcttagtcaasttaggagttccatgcctttggccttcaggctgctctttatatagttcgtatctgtctcctgggcatagtactgtctggattttctctttctttttttttttttttttttgagacgaagttttgctctgttgttgcccagrctggagtgcaatggcacaatcttggctgactgcaacctctgcctcccgggttcaagcgattctcctgcctcagcctcccgagtagctgggattacaggcatgtgccaccacacctggctaattttgtatttttagtagagatgggggtttctccatgttggttaggctagtcttgaactcccgacctcaggtgatccrcccacctcggccttccaaagtgctgcaattataggcgtgaaccgctgtgcccggccctcttatttaaagttcgcaaatacagaacaggtcaggagcttttctaatcattttttttttttctgaaggaggttccatatttgtctgtaccttgagagttgtttcatactagaatttgtaacttatcatcaactacagaaattttttttaaagtgtggttgaagagataatggttgtcagctgctataaagatgtgtttatcattcrgaaaggactaattaacatgtactatagggaaacttctttaaacaaagccattttctgaaaggaaaacactgaaggggaggaaataaaacagggaacattttataataccttatcaaagctcagcgtggctatcctactggaataatgtaattaaggagaattaagtgagttggataaataactttttaaaactagccccttgaatagaaaattaagtagtatagtttttaaactcaaattctgtctgcacgtacattttaattaacctaacattattgaatgacaagctgagttggcagctacatccagagttcatgccatgtgagacctaccttaaaggatgaacgaagctgggtgcagaggcctcaaatgccctgctaagaaatagctgatggccttggggaactgtcatacattttaagcaggaaacagaaggatctaataggaactttagtttctctcttgtcaaattaaagcacacaaaaagcaaggacttgatcttttttttttttttttgtataacaccaatgtcaattctagcctgtcagggcaaattcagtaattaatagctgttgatgagccagtcattctagattgattttttaaataagcaggctaataaatgagaattracataaatttagggatgtctcttttcagagcaagtgttaaggtgattttcatagtcttctgtattccctatgcatccagtaggtgtgatggtaaatgatttggctttagcatagagaatgtggcagctgattaaaaaaaaaaaattccagtgcatctatcttaatgagagaacttgagttgtctraagaaatagagaggtcagaggaggcctagtgggaaaaaagaacaatgagcctggttagaactgacaaaaattcaccctaatgatttgactggctaatgatgactgggcaagttccctgagtccactgacccagatgttctaatttgtaaatgcaaagtgacttatttatcagcctcctggggaaatcttcagagctgtgaacctgctatgttcagtaatcttgctggccccagccccagcctgttctcagatgaaattttagaaactggccactggaactttttgggtaagggctctggaggtggccaagttaccagtagtgggggaatgaggtttacctgcccccagtaatcagcacttgatttaaaacaatcagtgagctgcctcttctttcctaggttgcagttgactgcggttggttcaggctgagttgtttgggaagtacaaattttgcccagcgtgagtcagcactgccctgggtaaactccctgctgtgttgcaatcttgcttaccaaagatacatccccaggcggcaccattcacttcacatgaaagccgctgctcttggttcctgagatgatctcatctgaacatggctccagcgacctcagccacaggaactagagacagcttgctttctgtcgtggcaatgttttgaaactggcaaaatcaggtaacctcaaactgttttyttaagtttcattagctagatgaagctgcattagaaactgggaaaatcctgtyttcagaagtgagtcaggttttttttttttttttttttttttttttttgagacggagtttcactcttgttgcccaagctggagtgcaatggtgtgatctcggctcactgcaaccttcacctcccgggttcaagtgattctcctgcctcagcctcccaagtagctgggattatagatgtgcgccaccatgcccggctaattttgtatttttagtagagacagggttttgctgtgttggtcagtctggtttcgaactcccaagctcaggtgatccaccctcctcagcctcccaaagtgctggaattataggcatgagccacggcccccggccagaagttttctttcatttgagttstggatgtggagttaggtccaattaaatcactgattatataaatcttagaaaagtaaaacgttaggtttacagctttatccgtcatttgctcttgtattttgtttttttgtgtgtatcttgtgagaaacactttagtcaaactaagccattgttaaaggaaaagaagtgaaggcatttggttgccttcctaataactaaatattgagttgtggagaacactgtcttatcagtgagtttgttcccatattcctttctgaattaataggaagaacctccctcatctctaattctactaggctactactctatctccctcctgcttttcatcgccaaacttttgagtccttcacctaatcagactatgatatctctaggtagtcgtcaccctccaaattacgtttctgctccttataattccaacaaattgcccacgttctctttcacctcagaccttagcatatgtaagcgttcttttacacaccttccccaagcttaatctggccaactggtttcagcctagaagtcacctcttccaygaagcctcttcttacttaccagggttgagtactcaggagaacctggtatttactccaatcatagtatgtattgagaatcagggtctgctttgctagaattgtatccatggtacgttgcacatagtaggttctcagtaagggtagaatgagcaagagcctgtactgtactttctcaactctgatcctctcatcaactcttttttttttcttctgagaggaatcttgctctgtcacccaggctgcagtgcagtggtgtgatcttagctcactgcaacctctgccttcctggttcaagcgattctcctgccttagcctcctgagttgctgggactacaggtacgtgccaccacgcccagctaatttttgtatttttagtagagacagtgtttcaccatgttggcgaggatggtctcgatctcttgacctcatggtccacctgccttggcctcccaaagtgctgggtttacaggtgtgagccaccgcgcccggccttgttcattctttttatgctcacatctttaaatgtgctaaaccctgttgattttgttggagtactgtttgatgtgtggcttttcttcattcccactgtcattgccttaatttaccagaggtcaaaactggacgtttaaagtcaggctgggcacggtggctcacgcctgtaatcccagcactttgggaggccgaggtgggcagatcacctgaggtcaggagtttgagaccagcctggctaacatggtgaaaccccatctctactaaaaacaaaaaattagctgggcgtggtggcacgtgcctataatcccagttactcaggatgctgaagcaggagaatcacttgaacccaggaggtggaggttgcagtgagcgaggatcacaccactgcactccagcctgagcaacagtgagactccatatcaaaaaaaaaaaagagtttgagaccatcctggccaacatggtgaaaccctgtctgtatttaaaaaaaaaaaaaaaggcacgccacgcatggtggccagtgcctgtggtaccagctacccagcaggctgagaaaagagaattgcttgcacccaggaggtggaggtttcaatgagctgagattgtgccactgaactccagcctaggcacagaagaagactccatcccaaaaatcaatcagtcagcctaagggcttaaaattttgtgtgtgaatacttttaggcaccatcagagagaaggcctgtactcttcaaagattacggataccaccattttctgacatcttacacactgaagacttagcattttacctgcattgcctctaggaatttgagtttgtaactcctagttcagacccttatcaaatggccactcctccataagtctttccttgctcctatcttctccatattgttgcccaagttatctttttaaagtccacatctaatcttttcatttaaggtgccatttgttccctgttttccacttagcttgacttctaaaagctttcacagttggattctttcctacatgttgctgttaaccatctcatctccctctcccctggccatttctctcctctccagcttcactgaacttctcatgttaacattccatggatataccatgtcttttaggactctgccttttcccaatggactctcccttctctaactggcaagatactcatccctcaggacacttagttcatatatgcatcttctctgacttctctgtcttttctgacagacagcactgtctgtctcttccactagactgttgagttctttgactgaacttggtgtccctggactagagcttggcaccatcagagagagtggctgacgtggatctccgggctcaaaccgttattctttgcaatattagaagcttttttgttagatggcatggtttttcattcctatttgatgaacatgagcccatggctgcttattttgtatgtgttacctgccaccatcaagtaatcattcaaagttaatttgaagatttaaagggtttgctgagatctagtcccgcaatatcacgacatttttatggtgttttacaaaattatttccctcatatggttttatttgcgttgggtaggctttatttattatccctattttaccagtgattataaagctagtctgataccaaagcatatatacatttaggtaagactcagagagaaaacatggttcttacactgcattaagcagctggtttgtctcttaatatagtagttaaatatactctatcaggttccacagaaatggtgcctttgctcgataggcaagtgctaacggtcttgccttttacaaggccactttatcatcaaggtaggaggaggaggtactctgaacctgcctgacctatgggaaggccctggttgtggttagagaccttgattgaaattaatggtgtgcgtactccaacctctcaggtttttcttttatacttcaaatatctggaagttgtgaaaacctgctgccctggtggagtatcaaaccaggctggtgagtgaaagcggtcatcccaaaatggagtaagctgagtgttaagggcagaaaaccttttacagttatagtaagtaattaactttttagatcacttcacaacttttggagtgctaaaatgccatatttgggactatgagaaattccattataaaaagctgaaccattagagctaggaaataatctctgttagatattggcatatggtgttcaattttgggtctctcatacttgagaggataattaaaatgattaaaaggttgaaaaacaggtcttatcattataagttttaaaaaggggggaaagattttagcctagagaaagaaaagctaagagataacttcattatcatcttcaaatacaagaatagttttgccagggggatttttattaattattcttcatgaacttcaaagatttaagaggaaatggtcttaaattgaaggaggagcaattttgatgaatacgagaaagaattttttgatcatcaaagtggggaaatgtttgaatgactgcccaagagagtgttgaatttctgactgtttcagttgtctattgtgtgacaaattacccgaagacttttggtggcataacatgacaaccattttattgcctatgattttgtgggttagtaattcaggaaaggaggacatatttttttttgtcccatatgatgctgattgagctggaggatccaagaaggctgcacatgtctgtacctttggagctagctgttggctgggatatcttggttctctgtgagttctctttcttggtctctcatcacttataaacctatatcgagtggccgagcgcagtggctcatgcctgtaatctcagcactttgggaggccgaggtgagtggatcacctgaggtcgggagttccagaccagcctgaccaacatggtgaaaccccgtctctactaaaaatacaaaaattagctgggtatggtggtgggcacctgtaatcccacctacttgggaggccgaggcaggagaattgcttgaacacgggaggcggaggttgcagtgagccaagattgtgccattgcactccaacctgggtgacagagcgagaccgtctcaaaaaaaaaaaaaaaaaaaaattctagctcgagcttcttttacatggtggctgggccataatggaagctgcaggatctcataagacctaggcctggcagtcatacatcatcacttttgccccattctttttgtcagagtaagtcacaattatagcccagatacaagaggaggggacattgacttcacctctaaaggatagagggtaaaaatcacattgcaaaagggcatgcaatgtgattgggattattactaccaactttattttttgaaacagagtctcgctctgtcacccaggctggagtgcagtggcgcaatctcggctcactgcaacctttgcctcccgggttcaagtgattctcttgcctcagcctcctgagtagctgggattacagttgcttgccaccacgcctggctaatttttgtatttttagtagatacggggtttcaccatgttggtcaggctggtcttgaactcctgaccttatgatctgcccgccttggcctcccaaagtgctgggattacaggcgtgagccaccgcacctggcctaccaccaattttagatacaatttaccacactgaccttagagatttttcatgaaagaataatcaatatatgtttattaaatgggtagtttgkgcatatgatttacaaatttggctgcatatagagtcatctgggagctttttacaagcataagctcctaggtaccagaccagtgactcagtgtctcctgggggtgttgtgttggcacataagagacactctatgtcctttctttcaggtaactatcagtaaaatgagtatggtggggggggatagatagatataatatgtaaggcaagatgatatgtacattgagatagatctcatctctcctgcttctaggacttgattgaatcctatctagcatgctcttctttccagtctgcctagtgtaaattatatttcattaaatcagcccatcatcagaacagtgtttcttgatgcctctcatttttttctcatgttttctggcatttttccttcattactttttttttagttcataattcaatatttatatgattgtttgatgtataatagacaaaaatacatctgctttgctttcgagtatctaacatagtgtctgcctcataaaaggcactcagtaagtacttgttgaatgaataagtggttgattgaatgcatgattgaatgaagtgatatttgaatttagctttaaaggtgattggaattttggacaggtagagcaaatgaatgggaaatttattgttctgaagtggaaactggatcatattgctcatgtaatttcagaaaactggagaaactggtttgggaaaatggaagagttggttttatatctagtatgctaagtttgaggtatggaaatttagcaggcatttagaaatgaagcactgatctgaagggtgagattgattccagatattcacttttgggagttacctgactggagaatgtgaaatctgttcctttcacaaatacctggtaagctcctactgtgtgccagacagctatgttatagggaaggtgaactgcagtctgagaaggagccagtcttgtgaaaagagctagggagaatgtttcagccagaaaaggaacccaagtttgtaggccctggggcaataaataatttataatttttgaggaattgaaggaaggtgaccgaaggacagagcaaggtgagtgaagtgggagagctgcatgaggtaaagtggaaaaggcaagcagagcccacatcacatggggactttgtgggctagatagtgagtctagccttcactcaaaagtgtggtggggctgggcatggtggctcacacctgtaatcctagcactttgggaggctgaggcaggtggatcacctgaggtcaggagtttgagaccagcctggtcaacgtggtgaaaccccatctctactaaaaatataaaaaattttagccaggcatggtggcttatgcctgtaatccgtgctactcgggaggctgaggcaggagaattgttggaacccgggaggtggatgttgcagtgagccgaggttgcaccactgtactccagcctgggtaacaaaagtgaaaactctgtctcaaaaaaaaagaaaaagaaaaaaaaaaagggtggtgggacaccattgaaggcttaaaacagaaagtgacaagcaaagattctttttctaaataaaaggttaccctggctactctgtagagaatagagagtcmcaaagaagggaccagtaaggaagtgtttgtctcccttcttgagaaggatcatcgcagatagggcaggatatggcagtggacatagaacgggatagttgcaggatgcatttaaaaagtagaaccaggctgggcatggtggctcacgcctgtaatcccagcactttgggaggctgaagtgggcagatcacctgaggtcaggagtttgagaccagcctgaccaacatggagaaatcccgtctctactaaaaatacaaaattagccgggcgtggtggtgcatgcctgtaatcccagctactcagaaggctgaggcaggagaatcatttgaacccaggaggcggaggttgtggtgagccgagatcatgccactgcattccagcctgggcaacagagcaaaactttgtctcaaaaaaaaaaaaaaaaaaaagtagaagtaaaattcactagagaaggaaaggaagaaggaagagtatggagtacagaaccctagggcctatgtagggggcaaaagaaggaaccagggaaggaaaataagggagcaagagtggtcattgatgtcaaaggtaagtcaggctaccacgcttgcagtgggagccagtgtgggagaaggagtctgtaaggggaattcaagtgtatccagagtaagtgtgctgtctgatgtgtggcaagtcaatacccaagacctgggggcggggtttatttgttgggctgcagaatgaggagatgagagggaactgcaaatccgtcctcctgaggagtttggagctagggtttttaaggattttggagtgrgctggaatgtggagattgttgggtggtcagagagagaaaggtgaagtaatgggacccggagatgaaaaaactgtattatgctgattttatttctctctgagggtcttcaaactggttggcatcagctgttttaccagaatttgggatctgaaaaatatctcaagcaattcttaaaaaaaaagccttatgcttctaatgtcagagatactatctttagaaacaatagggwtgcaaatggtcagtatctagcgctgtgtgactttcagttacaaggaaatgtgtcaaaatccagcctrattaatgttttttttttgtttgtttgtttgtttktttttttttgagatggagttttgctcttgtggcccaggctggagtgcaatggcatgatctcggctcactgcaacctctgcctcctgggttcaagtgattctcctgcctcagcctcctgagtagctagactacaggtgtgtgccaccacacctggctaattttgtatttttagtagagatgggttttcaccgttttggccaggctggtctcaaactcctgacctcaggtgatccgcccaccttggcctcccaaagtgctgggattacaggtgagccatcgcacctggcctaatgcttaattaaagttatatttctgtccatagttcttggtaaccctctgaagacagcttcataatgaagaatttgggtaggttttgggtgcatggggcttcagggagtcatgaaggttgaggacataggaaagaatcacacatttatccatcagaagatcattggtgaccattggccgggcgctgtggctcacgcctgtaatccyagcactttgggaggccgaggcaagtggatcacgaggtcaggagatcgagaccatcttggctaacacggtgaaaccccgtgtctactaaaaatacaaaaaaattggccaggcgtgctggtgggcacccgtagtcccagctactcaggaggctgaggcaggagaatggcgtgaacccgggaggtggagcttgcagtgagccaaaatcgcgccactgcactccagcctgggcaacaaagcaagactcaatctcaaaaaaaaaaaaaaagctgttggatcggtgtttactaagcacctactctaagcctgtcactgtgttagtgttaaggatttgtgtgaatgacctcttttaggtacttcattttacagatgagaaaaatgacgcttagggaattaatcaccttaacaggtcacacagaaagaagactatgagttctgtctgacccaggccccatgctcctaaaccttgcatgacactgctctttggaaagccctatcaggacatcagctagagaggaatgaaaggtttttagagcccagtgatggcttaccccagctgtatgaatttgttagcaacccagttaaataaagtcttctgatttttctatagtaatctggcagtttaggaatggagaggtgggggagggaggggaagataaaagatagagtaagagttcagtaaattagaaaggggattattttgttgttcataagtgtaatgattggattttcatgcacatgtatgagatgtgcctccatcaagccttgttactacaaagtcagtgcattacccatctgatgtgggaaaaataaatcagaaagaggcctcagcttgtgggaatggtggaatgcaatggcttgtgttgttaagcaaaattgtgttttacagtaaatatttattgtggttcttttgatgcaagttatattgggatatggaggaaaatgcaaaaatggataagatggtgtatttgacctctacacggttagagaggaaggtaaagtgcttcactatagtgcttgattgaagggtatgacaggggtggaaggtggagaagtatgggaaagtattatacaagttagcttgtagagcgagggtggcattaggtagggctggccagggtggtgccaatctagcttctcaggatgacccctcaggattttggtcactgtgtcgtcagtctagtcttgggtcacaaaatgtattttgtggagaacctggaaataattagtcttgaagacaggattgtattcagacttgagtgattgagctcagaatggaatgccaatttattattttagaatgaaggattccttttccgttaacgggattctggaatttgttaggataattgcttttcaatatcaagagatctggcaatcaaatttaataatatcaagcttgcttggtgagcatggatttataagatagaatggtttgtgggggagaatatagttacaaaaaagattattgtttcccataatgcctggtattgtattaagtactttgcatacagtagggcatttcattgtcccagtgatcctcctgcaaagtaggtacaattatcttcaatttacaaatgaggaaaccaagctctcttcaagctgataagatgctgaactgagatttgaaccaagtccctctgcccctaagagcccctacccctagctgctactatatgctgtacccatctaagctttgtgaaataaccttgttccactgcagagaagatgttgtgtcacctatctctagtatttcttggctttgggcagttctggagtcaaaatgcccctccctgttttttctagatttttccagatttctttgttaaccagtcttagatgtggtcacattctttgtttaaatacccgtgtattaatatagtcatccaagcctttttgtcctcttcttgcwtttggtttggaagatactctgtctctttggaggaactttacatatctgtgcacattgattttgtgttgattttattatcttaattttatgggttaagtttttgagtttcytccagctcctagtccatcaactccttcctgtccccttcctcttccactagacttaaattcagatactaatgccaatttctgaatactcagtctggctccagtccacctatccaatttagacatggctctctggatcactagctattgccagttactcactgctcctgtatgatcttgatttcctacttgagtacccttgtttctgttgtgcttttggcttggaatgtcattcttcccatgaaggctccctagtctgatccctcactgggagtaatcacttcttcctgagtctcatagcagagaattctcttttatgtctcctttgtggcacattacactttctgccatctattatagttgtttgtgtacctacctatctcctactagaccatggcctcactgagcagatctgtctggttgacctttgtctttctcctagtatctagttcagttccctgcacatagtgggcattcaatatctattggatgaatgaatgaataactgaacagaatttcagrtttttaagtttctactcattgtttattatagattccctcccttttttgcttttcttcttcctttcacatttccttttctttcttttctattaacctgtgttttcccttgcactgactcactgaacttctctttaccacccccttttttttacccagattttgcctcattctctcctcattagcagtcactatgtgggtgtgccacatgctgctggtcagattttctccatccttttgtggcttgagttcccccatgaatcagatgagcagcataggaattgactggtgattacattaacatcttaataaaagaccatgtataaagaacagtacttaaaatttgtcagtatattgctttcaagagggaaattttccaatgcatgtttcaagtgaaagggaaagggaaaaaaaatcttccggtactggggaggtagatcagggcattttattcacagtgtgggatgtgggatgtcaaaggcatcttatttgaccaaagaaataatgcaggaaaccacagaaacttctgctaaccgttaatattgaatcctcaaatttttctacagctggagaaaacattagagatgaatgtagttcaaccttcctgttttccagatgagaaaacagacccaaagaggctaaatgacttgtccattaagctggggtatttgttgcccagtgtttacttctagaactgaatgtggcctgggaaaccaccaaatctttgaaagtagtggaaagttacacttgaagtggaggctttaggtgtctaaaattgaaggcttttgcaatgctgaaaagtagactttgtccagttggtagcaggttggatttgaggcagtgttcacgaaagggctgtttaactgtctcagtcactcccttctgggaatctgttccttctgcatttgaaaaggggccarcgtttaattattaaaacattttcaatttttcttgctctttttcccagccctcatattcgaagttttgtttcaggctttatttccttatctcagcactatttgtgttaagtttttattgcttaagtcagatgtcagtacgaagcatgggaaatccagaaagtgtcttagacactcatgattggtttttggtgcttgttaggtgaatcttttacctgactcatataataatgtactttattgtcactgaaatactgtctagtgaaccagttggcagcagatatgaaaggttacctacttgttgaaggtctagggtacagcggtggaaagagatcagatagcccaaaacaggaagtcaagtgcaaacaggatgtgtttgtctgctgtaactcgtgtgcctgtgttttgaaacttggtgctgttaaaaagtcaagacttctagtatttgagcttggctgaagaagtctccattttgggtttgaaaagaagctaacataactagtcctttacagcccttgcctttacccatatgcatgtctttcttgtagggaccattctttcttcctgggcatggttgtttatcctagtttatactgtactgcatccatatggtttataaaatgaagccactgaattgactgttgatgttacttttggtagatatgggattcagtctgtgtttggctatttttttaaataacaatgggaaattttagcctataattcacaatccttttattttttatttattttttattgttttgagacaatttcactcatgttgcccaggctggagtgcaatggcacgatcttggctcaccacaacctccgcctcccaggttcaagcgattctcctgcctcaacctccagagtagttgggattataggcatgtgccatcacacctggcaaattctgtatttttagtagagacagggtttctacatgttggtcaggctggtctcaacctcctgacctcaggtgatctgcccgcctcggccttccaaagtgctggcatgtgccattgtgcctggcctccatccttttattttaattaattttttttttttttttgtagagcctggggagtggctcatgcctgtaatcccaacagtttgggaagctgaggcgggaggatcgcttgagcccaggagtttgagaccaacctaggcaatatagtgagacctccgtttctacaaaaataaaaatagctgagtatggtggcatgtgcatgtagtcccaactattcaggaggttgaagtgggtggatcacctgagcccaggaggtcaaggcagcaatgagccaagagtgcatcactacagtccagccttgacaccagagtgaggtcttgctatgttgcccaggctgcgagctggtctcaaactcctggcctcaagtgattctcctctcttggcctctcacagtactgggattacaggtgtgagttaccacacctggccaccaccttctattttttaatttttattttttgagactgggtctccctctcacccaggctggagtgcagtggtgcaatcacagttcactgcagccttgatctcccaggctcaagtgatcctcccacctcagccacccagtagctggcattacaggtgtgagccactacaacaggcccattttttttttttttttgagatggagtcttactctgtcacctaggctggagtgcaatggcgtgatctcagctctctgcaacctctgcctccatggctcaagcaattctcctgcctcagcctcctgagtagctgagattacaggtgcccaccaccatgcctggctaatttttgtatttttagtagagacagggtttcgccatgttggccaggctggtctcaaactcctgacctcaggtgatcagtccacctcggcctcccaaagtgctgggattacaggcgtgagctaccacacctggcccattcttttaaataacagtctgcttttgttggtttccagaatttttagcctatcttttgagtgttttctgagtgtggtggtttacaaataactaccgggtgtttgtgaactttttttagtctttgaattcaaactctctttgagtactggaggctgcatctaatgctagctgctgaattgcttcaccccttggcaagtctctggagaagagattaagtaagtaatttgcttggggtcactcagctgataaacaatctcagcagcccctattttctgaacccacctcccatttcccattgcttcctactgtgaaatctgctctattgcattcattagaggactggattggttataggataaccatctgctcgagtcatctcaggatctttgtagattatcacaaccacttgaaccaggtccattctgctggtctcatactataatatgggacaggtaaaggttttgataatgtgtttgtgtgtgtgtgtgtgtgtgcattctgtacccttaccatattgcagagaaaatcatctgtccttccactttgtaattccaggagcaaaagggtaaagtagcagcatatctcagtgtggatggtctagtgactgtgtgtgaaagcagtgagaacaacatgcctttctgctatcagcacaggtgtcttttttcttgactcttatcaaagggtgggaatatgaggcattttgcattttgttgtgggatataggcaaatagtaaaaccttgaagataggctgaacacaggtgttcttggcaaggagagaatatggtgaaaatacaaaggtttttgtgacaccaagagaactagaaatcaccattcatttctgctgcttggcgtagatactgggtagatcacatcctcctggcaggagcagaaaacatttcagaaagtcagcataattttcagattgagatcaaacatcaaaccaagctaaaggtctgtgggaggaagggggtgcttagtctgaattcatcctggatttatcaccaaatcctatctgacttcagtgcagtgcaagcaattacagtgcatcaggtggaggccggaggcatacgttcattctttgaatttggcagagaagggttgaggagctaagggagaaattctaaactggctggactgcagggttgtggggagtaacaaactcattagcaatggggtggaattgggaagagatttaacagcctggggctgcaaggaggataaaccactctgaccacctctgagaagtttttcaagggattatataattaagaactggtggaagaactgtagtcatttaattcttagaggagtggttcaaaaactaaactgaacctgattagaggtattggcatacctaaatttttatttttttaattaattaattaattaattttttgagatggagtctcgctctgtcgcccaggctggagtgcagtggcgtgatctcggctcactgcaagctccgcctccttggttcacaccgttctcctgtctcaacctcccaagcagctgggactacaggtgcacaccgccactcccggctaattttttgtatttttagtagagacggggtttcaccgtgttagccaggatggtcttgatctcctgacctcacgatccgcccacctcggcctcccaaagttctgggattacaggcatgagccaccgtgcccggcccctaaatttttaaaaagcagatagatagaggaatagaactgataaacgtctttttaaagaaccttaatgggctgagtgcagtggttcacgcctataatcccagcactgtggaaggccaaggtgaatggattgcttgaggtcaggagttcgagaccagcctggccaacgtggtgaaaccccgtctctactaaaaatacaaaaattagccgggcatggtggtgggcacctgtaatcccagctacttgggaggctgaggtatgagaatcgcttgagcctgggaggcagaggctgcagtgagccaagatcacgccactgcattccagcctgggtgacagagggagactctgtatttaaaaaaaaaaaaaaaaagctgggcatggtggcttgcgcttgtagtcccagctaatcagaaggctgaggttggaggatcacttgagcccaggaggcagaagttgcagtgagtgagaccatgccactgcactccagtctgggcaacagagggagaccctgtctgaaaactaagtaaaataaaaaagttaagaaccttaatgggcctttctgtgttaaaacaacaacaacaacaacaaaaacaaccttaamaaagtactttctttaaattatttacagccaatttctgttgaacatccattatttgctgggctctgggttaaatgctttgacatgcgttattttaatcctttcaattatsttttcaatgtagcaggttttaattaaaggagttaaataacaccagaattcattctataccatggtacatttggctgcagtaattttcgtgcagtccactttggaaaggtaaattgcataattttgagcctagatagaattcctgtctggaaatgccttcttttcccggtgcattggagtgccagaaaccccttcacctagtccctgccttcatttaaaaaaaaatcctggttacccattagtcagtcattgtgataatatcttgtgaaagcagcttcttcagtagaaggtccagaagagcttatctggtaaatcctctttcctgcaccagagtagtagggggatcagagtctctttattcttgatgagctttgtcatcagtttcgatggaagaaggatcctgctgtaattaaactgcaggtccatttattctgttttcagcgttgttagaagactttactctgaattgctttgtttcctgattgactcaccctttggggcagaatgcctgggttgaaatgaaagcgtaggtttctctgctgcggtgttcaatctgtcatctctcctaaactccacactaagaagcagccatttaattggtcagaccccaggggtgatattttggcacagctccattggttagaattacttttccctgaacttcatagcagatgctgaggtccctctgcagatatttgtcatagaatagttgaaaccagggagtttctgagaacatttataacttgtgattattatgtatgtctttcagttgttaacagttaccgcttaagaaaaagagctcacttattgctagtgggaagtgaaatctctctcctttcccccttattcatattattattttaacagtttatgctccaagaccctctgctctctggttcctgtatcattttgttatgtttctccttccaccttgcttgggctgtgcaagtcgggaagaacaggcaaaggtacacccagacctgggtgtgtctggtagaggtcggtttctttgatttctagcatgtctttattttacatctgcatttgttgttttcatgtttatttgtatttgcagttcccattgcagcaccattccaatccaaaacaacagtgaaggcattgaagccttctgtgtctttttaggaagagatggaagtgaccgtcttgttcctcttccaggctctccttttctggttttgtccttctgtaataacaatttaaaccatttttcttttcttttgtttttcaagtaatcttagcagacaaagaaattctcttcagtctttcgttcaaggtattgctgtggttatgtgtgtttaaaatccttaatttactgatcatcccggaatcataattgtgcagtttctgtcctttttttttttttttttgagacagagtctcactctgtcagccagggtggagtgcagtgtgcaatcttggctcaccgcaacctccgcctcccaggttcaagcgatactcctgcctcagcctcccgagtagctgggactatgggcatatacaccaccacgcccagctaatttttttatttgtagtacagatggggttttgccatgttggccaggctggtctcaaactcctgacctcaggtgatccgccggcttcagcctcccaaagtgctgcgattacaggcgtgagccactgtgcctcgccaattgtgcaattttaagcatgaatttctgtcctttttttttaaaaagcgctctattgctgttatcattagttaataattcaacaaatatgtgttgattacctggcattaaggctgagaataaagctgtgaaatagacctactcttgtttcctgtttcactttccacaccctaaatatggaagaaaaatactttaaaaagaattatataggccgggcatggtggctcatgcctgtaatcctagaactttgggaggctgaggcgggcaaatcacttgaggtcaggagttcaagaccagcctggccaacatagtaaaaccccatctctactaaaaatacaaaaaattagccaggcatggtggcacgtgcctgtaatcccagctactcaggaggctgaagcatgagaattgcttgaacctgggaggtggaggttgcagtgatctgagatcatgctactgcactctagcctggacgacagagtgagactctgtctcaaaaaaagaaaaaaaaaagaattatacaaactgttagccagttgattagatacagtactgctagaatgctctttcccccagaatgtaatcattatgagattcaaggaccttgcctgttgttgttcctcttacgttctccagaggtacaggagattcatgctaaatagtctgataaatcaattatggttataaggaagtgtataagattctatgaggccaggcatggtggctcacacctgtaattccaatcctttgggaagttgaggtgggaggatcacttgagcctgggagatcgaggctgcagtgagctgtgatcgcaccactgtactccagcctgggtgacagagtgagaccctgtctcaaaaaaaaaaaaaatgttatgagagcacagacaggatcaggaaaggtttccctgaggaaataaatgatatgtaagggaggtgaggtggcaacagtgctccaggctgagagaatagctgaatagcttgagggagggagattcctaaagccaaaataaccttggtgtttgaagaactgaaagaataggatagagtaaggagtaaggccctgagcactaaggatttgctttcattattatttactagttacccagtgacaacacttactttattttttttgagatggagtctcgctctgtctcccaggctggactgcagtggtgcagtgtcgagtcactgcaacctccacctcccagataagcgattctcctgcctcagcctccgtgcagctgggattacaggcacctgtcaccatgcctggctaatttttgtatttttagtagagacaaggtttcactgggattacaggcgtgagcctgccgcgcctggctgacaacacttattaaaaggagggtagaccaggtgcgctggctcattgcctgtaatcccagcactttgggaggcccaggtaggattgcttgaggctaggagttcaaagaccagtctgggtaacatagaccctgtctctmcaaaaaaaataaaaataaaaaattagctgggcaaggtggtgggtatttgcagttctagctactcaggatgctgaggtgggacgatcgctcaaggctacagtttgctatgatggtgccaatgcactccaggctgggtgacagagacttgtctcaataaatgaatcaatgaaatagagcattagttgcagttgagacaattaagtcagaaaaatctcaactggagcaaaagtaagaagagaaactgaaatacaccttaaatatcagttaaaggctttatctttagaaggttgggggtctgtatcactggtaccctgaacttgtagaaactagaaatgcagatgacttatgggatgtataaattaaagttctgtagtcccaggaatggtttttctatgtattatactttttacaaggtgcttaaggtactttttattgaatcctacaaaaatcagaccatyttaattctgatttttgtaggattattgtgttaaataagacaacagatgcaaacataacaactaacttggcacattttaggtgttttgtaatgtttttactttgtaatcttctgagaaaggacttcaggaaccccaagttctgaataactcccccaattttccccgtgtctgccatctgaaataatagcacagaagattatgtcatgtctaaagttttgatcctttacattaaagtataacttggggactggaggagagaagaggctctagtccttgtgtctttgatgttactgacatctctgtgtgaaaggaggctctggaagctggtttggagagaggcaaacatttaatcctcatgagcccatgccttattataatgacggctatttactgaatgtctaacactgccctctgctcttgatgtaagattgaaaagtccagtgaagttatgatccccctttatactgagcaccacctctatgtccagcctgtgaggtgtagggaatgtattcctgttactctgaagctcctagtggcagcttactcaagctcattcatttattcagtgttagagccaggatttaaggtcaggtctgactgattttaaagccaaagtaaaacatacttgggaacagctttttttccccccacctttctctccaactgttctgtcttcttaaactttagacctaaaataaaattcttacctaggaaatatgcatttatctgttacccatatccaaaggactgccttggaggatagaaaatgtctattagtattaaaagctttggaaatgttttcctcccctgagttctggcctgtgaaatattccttgtttatgtccagcccatgcaccacttcagcagggctctttatcctaattcaggccttggattytaaagttctaccatatacatgtcttctctatgacttaggtattctgaattcttttttcttttctttttttttttttttttttttgagatggagtctcattctgtcgccaggctggagtgcagtgatgtgatctcagctcactgcaacctctgcctcctgggttcaagcaattatcctgccttagcctcctgagtagctgggactacaggtgcatgccactacgcccagctaattttttgtatttttagcagagatggggtttcaccatgttggctgggctggtctcgaactcctgggcgctcaggtgatccgcctgccttggcctcccaaagtgctgggattacaggtgtgagccactgcgcccggccaccgaattatttattctaaaataaatatctcagaaatagtatcacagagaacatgcttcattgtcccacccccagcatatgagaccagttagtagtatggtttactcagcaggcygcttacttacaaatgcaacagttgtcctattttatgctcattgtgttgtcaccagcattttaaatctttacaagtcagggtgggtacctcaggcaggtttgctggaaaattccagtaaacagtttcaaaggagttcaagttgcttgccagactaacttacttttaaaagtaagcagccttccaagttaagagatgattttaaatttcaggtgagttctcaggacattgtgattttttaattatgctgttggtataaatcagctgtgtcagggcctgtcccaccaagagcgttgggtggtaagaaacccaagctttgggtgaccagagagaggagagagaccttgggctttccagccagtaatgcctatgaaacatgtaggtcattggcattttattttatttatttttttgagatggagtctcgctctgtggcccaggctggagtgcagtggtgtgatcttggctcactgcaacctctgcctcccgggttcaagcgatacttctcccttagcctcctgagtagctgggactacaggcatgtgccaccacaccactaatttttgtgtttttagtagagacggggtttcaccatgttgtctaggctggtcttgaactcctgacctcaactgatccgcctgccttggcctcccagagtgctgggattgtaggagtgagccaccatgcccagccatcattttagaattataatttttagctggatgcggtaaaaaaaatcctttctcagccttcaggtctcatctcaagtatcaccgacatgaggagtcctcccccatttacacacaccagctcggtgtgaagaaccgaaaggtcacactacctttcggttcttcacacaccagcccactatggcttgaagttaacgagtgagaaaagtagcacggcatgaattggagaagtggtcagggtctttaaccatgtaagaagtgattatttttattctaaaatgcaataggagtccattaaagaacttttttttgaagagtttttaaacatttttatgtacaaagmgttaacatgatttctttcattgggtggatgccttggataatccatccaaggaagatcacttctaggaacaagcaacattaaagagctttaagtgtgtgtgttgaggggaggagggcagtgggtgatgccttgtggagaaataggtggatagaggcaagaattaaagctaggaaacccgttaggaggctgttcttttacccaagaagccattctagactctggaaattcggtagagcacaaagtccctgccctcatggggtttctattctagttagggaaagcagttaataaataagcaaataatatcagctaataccaaatgttatggtgaaattagaaaatgacattaaaaggctggkcgtggtagctcacacctgtaatcccagagctttgggagcctgacgcaggaggatccttagagcccaggagttcgagattacagtgagctatgatcaagccactgcactccagcttggagagagaccctatctctctctccctcacacacacacacacacacacacacmccmaaaaaaaaaaaaaaaaaaaaaagacattaaagctgatgtttggatgacaagaaggagctaagcataggaagttctagggagaccaatccaggcagaaggaacaaacaacaaatctaaagggcctaaggagggaaatgtgattaatatatgaaagatgatgttttaacccaccagcaggagcaggggagatgaaggtaggaatttatgcatctttgatttaagaaaagtattttttattttttttttactttttttttttttgagagagagtctcgctctgtcgcccaggttggagtgcagtggcatgatctcagctcactgcaacctctgccttccaggttcaagtgattctcctacctcagcctcccaagtggctgggactataggtgcctgccaccatgcctggctaattttttatatttttagtagagacggggtttcaccatgttggccaggctggtcttgaactcccgacctcaagtgatctgcccgccttggcctcccaaagtgctgggattacaggtgtgagccaccacacccggccaagaaaggtatttaaagcaacctgaggtgtggttggagagggaggcctaagacagcctggacactcacaacatttaagaacagagggaggggtaagaagcagcaaaaaggctttgaggtaggaggaaagccacgggggcagagtgctagaagctaagagatgtttagagggggagagtcgcttgtgtccagcattgctgagagattaagatgaggatagagaagtgtcaattagatctggccacttggaattccttggtgaccttgaagagattaggaatggtggttggctcaagctagattggagaaggtttaagagtgaattagaggttaagaaagtggagtcggccagatgcggtggctcatgcctgtaatcccagcactttgggaggccgaggtgggcagatcacctgtggttgggtgtttgagaccagtctgaccgacatggagaagccgtctctactaaaaatacaaaattagctgggcatggagttgtatgcctgtaatcccagatactcgggaggctgaggcaggagaattgcttgaacccgggaggcagaggttgcagtgaactgagatcgtgccattgcactccagcctgggcaacaagagtgaaattccgtttcaaaaaaaaaaagtggagtcaaatatttggagaaatttgatttagaggagatcacagaaaaagagctttactggggagggggagaatgtggggtcaaaatggggttttattttttatttttttgttattttttacaaattacaaatatttgactaggtgctttaaaaaatctgtcattggctgggcgttgtggctcatgcctataagcccagcactttgggaggccgaggtgggcggatcatgacgttaggagatcaagaccatcctgcccaacatggtgaaacgccgtctctactaaaaatacaaaaattagctgggtgtgatggcacgtgcctgtaatcccagctactcgggaggctgaggcgtgagaatcgcttgaacccagcaggcggaggttgcagtgagccgaggttgcgccactgcactccagcctggcgacagagcgagactgcgtctcaaaaaaaagaaaagaaaaaaatctgtcatatgggctgggtgcaggggcccatgtctgtaatcccagcactttgggaggctgaggcgggtggattgcttgagcccaggagttcgagatcagcctgggcaacttgatgaaaccccatctagacaaaaaaatacaaaaaattaggtgtggtggtgcgcgcctgtagtcccagctactcggcatgctgtggcaggaggatcacgtaagcctgggaggtccaggttacagtgagccatggtcgcaacactgcactccagcctgagcaacagagtgagacaccctatctcaaaacaaaacacaacactcatataaacttttaattcaaatgtaactagagaagtatataaattataagtgtacagttcgatgaatttttacaaagtcaacatatctacrtaatcagcattcagagtaagaaacaatgttaccagaagccccttgggctgccttccatctgtaatcctacctcacaggatgaccactatcctgattttgaacaccatagtttgcctgtttttgaattttatgtaaaacgaatcatttcccatgtattcatttatgcctcctgcttttgctcaacataagattcatctgtactattgcatgtatcagttgtttgttttttctcattgttctgtgaacatatcataattctaccgttgatggacacttcagttgtttccagcttgaggctattacagtagggcttccatggatattcctgtatactgtttgggtgaatgtatttctgttgggtatatgcctggaagcagaattgcaaagccatggaaagagatgtgggtgcgcgtgtatatgcacgcgcgcgcacacacacacaaaatttccaaattggagtaatttacacttccaccagcaatattagagttccagttgctcttttttcctttttttttttttttttttgagacagttttgctctgtcatccaggcaggaatgcaatggtgcgatctgggttcactgcaacctctgcctcccaggttcaagcgattcttctgcctcagcctcctgagtagctgggattataggcatgtgccaccacgcctggctaattttttgtatttttagtagagacggggtttcaccatgttgtccaggctggtctcgaacttctgacctcaggtgatccgtccgacttagcctcccaaagtgctgggattacaggtgtgagccaccatgcccgtctgctccagttgctctttatccttatcaacatttgctagtatctctttttcattttagctattccagtggtggtaacactttgtggtcataatttgtacttccattatgacaaagaagagtttttaacacctgggagattctggagcatacctgtatgatgataggaaagttcctgtagagatggaaagcaaaagctcagaggggatgggccacagggtagacagattgattttttaaattaaatcaggactacatctcaagagggtacgcttcagggtctaagtgaccaaggttcaaagcttggctttgctatcctctagctgtgacctttaacaagttacttaacttctcyraacctttttttctcacctgaaaatgggaagaactaatctaccttgccagaattgtgaggatcacatgagataacactaggtaaaagtacctatctcagtgcctggcaaataagcattcttccagcagagagtggctactttcttctttacttctcaaaatatgtaattacttatgaattattttagagaggcttagcctaagccctgttgatagacttttcacagaatttcctttcaaaaccattgcaattgtctttaattgctttttaatgataatacacaagatgaagctaagcccattctgtactaatgattcataatgtgggatacttttctttatgcactaacaacatagatgcttttaaccattccagaaatacgttagtgacagtaggcgtaccaccctcaataaactggacatgattctgtaaggcttgctttccagcccttttctgatttgtcatgtcagaaaggcatttctttaaggtttgggggcattttatttaggtattttaaaaggatttttgtaaacttttatacaatggtgcaccataagtgtgttaattccaagatgtagctgtctatgcttttgtgtaaagcctgttgttgcagaactaccttggtgcacagagcagttaattaaaatcagaatagattggatgagaaccttgggaatttttttactgccttagttttttggtgtctttggagttacattgcaaaccagcatggcccttctactcctctctccccttcatgggaagacccatgacaaccactgatctgctttaaatcatttgccttgggcaggtgaacaagcggagaagtgttttgaaactacttaggaatctaggacttaataggtagaaatcacattatctaccctcttgcctctaactatgactgtaccaagcccacctggaataggtaatttatcttattctgttattaacactgttattttcctgttcagcagggctaactctcccaagaaatactagcatacttatcaagctgacaaaatcctacatgctagctagccattcttgcctcatatcacaaggttcttccacagggaatagtaaatgtttttattcactactggccctacatctcccatttttctcccttttagggaaagtggaagaggagaccctagcaggcttcaagcaagctctgtaggacagcagttagacactgtttttgaggactaaattgccaagtctgtcttttaagaagagggtgaggggagtttgggaaggaatgttcaagccctgagtgaagatccaataattttctttcaagatcagaaggaggtttgtagataagagagaaaagtttttcatttatcaccttagggagaattctttctrcacctcacaattagttccactttcagtcctttaatagcattatcaaatgccatgtatgtatatctatttagggatgaggaatgaaaaaaatattcccaagagaaaagtattttagcttatatagcgttgttagttacaaactctttccttccgccctctgaaataaccctgaacgtagttgttatttagggttagggctttccagtttggcaggagagtacttctaactgaccacattaggacatgtttcttttttggtatttaaatatctgtcagagtggccgggcatggtgctcatgcctgtaattccagcactttgggaggctgaggcaggtgtatcacctgaggtcaggagttcaagaccagtctggccaacatggtgaaaccccgtctctactaaaaatacaaaattagccaggtgtagtgatgcacacctgtagtcccagctacgcaggaggctgaggcaggagaatcgcttgaaccctggagatggaggttgcagtgagctgagatcttgccgttgcactctagcctgggtgacaagagtgaatctccatctcaaaaaagaaaaaatttatatatatatacatatatatatggagtaaaatatatatatagatataaatatctatagatatagatacagatataggtatataaagagtaaaagcctagtcggctgactttggcaaacctgttctgttagactgagcaggtctaaggtatgttaacactggagaatcttgccactacctgatctttcctgtaataacccccttccccacatatgtatattcctagcataagacttcattctccacctaaacttggagactgtggggtggcagaatggcaattttttttttttttttgagatggagtctcgctctgttgcccaggctggagtgcagtggtgcaatttcagctcactgcaacctccacctcttgggttcaagtgattctcctgcctcagcctcctgagtagctgggactacaggcatgtgccaccatgcccggctaatttttgtatttttagtagagacggggtttcaccatgttagccaggattggtctcactctcctgaccttgtgatccacccacctcagcctcacaaagtgctgggattacaggcctgagccaccgcgcccagccagccttctttttaaaagtagccagatgacttgaataggctgatagctcttctttcagagatgttcagaagaggcacttaaggttagaaccaaagttaagagaataaaaatagtgtggaggaagatgggttctcttgactccagctaaagaagagttttcttctgtcttgtatcaagatgttcaagttgagctatatgcctttcaaggctccaaatcccctcgggacaaagacctagtcgaaatcacttttggtgtttccagtacccacaatatagctggtgcttcgtaagtacattgatttttgctgggcgtggcagctcccacttgtaatcttagcactttgggaggccaaggcaggtggatcacctgaggtcaggagtttgagatgaggctggccaacatggagaaaccccgtctctactaaaaatacaaaaataagctgggtgtggtaactccctgttgtcccagctactcgggaggctgaggcaggagaatcgctttaacatgggaggtggcggttgcagtgagccaagatcgcgccattgtactccagcctgggtgacagagtgagactctgtctcaaggaaaaaaaaaaaaaagtaacgtggatttaaacaatatacaactttccagtttttcctactgattgtgccttaccaggtgggtctgcctattttgtgcaaagtccttttaggaaaaatttacaacctgtagattccttgtgtggaacaaaagtttatttttttcatgtggctaaatctatctcccctttccttttttatttttttaatttttgagacaggaacttgctctgtggtgcctagactagagtgtgctgtggcatgatcatagctcaytacatcctcctggactcaagtgatcctctgtcctcagcctctcacatagctgggactacaggtgcgtgccaccatgcccagctaattattatcattattattattattattttattttttatttttttgagacagagtctcgctctgtcacccagactggagtacagtggtgcgatctcggctcactgcaagctccgcctcccgggttcacgccattctcctgcctcagcctcccgggtagctgggactacaggcgcccgccaccacgtctggctaatttttttgtattttcagtagagacggggtttcactgtgttagccaggatggtctcgatctcctgacctcgtgatccgcccacctcggcctcccagagtgctgggattacaggcttgagccactgtgcctggcctattattattattttttatagagatggagtctcagtgtgttgctcaggttgatcatgaattcctggcctcaagcgattctcctgccttggcctcccaacatgctgggattatagatgtaagccactgtgcccagcccctttcctgtttattttgtactttcacttttctattgctaatactataaatttatatttggttatacctgccttcacctctgccccactgtctggtgaatgaggtgacttttatcctgcccgggaatagacctaccccctaatctgatcacatgatcacttctttttcttatgtatttatttatttatttatttttgagacagagtttcgctcaaaatgcccaggctggagtgcaatggtgtgatcttggctcactgcaacttccacctcccaggttcaagtgattctcttgtctcagcttccccagtagcttggattacaggcgcgtgctaccatacccgggtaattttgtatttttagtagagatggrgtttcaccatgctggccaggctggtctcgaactcctgacctcaggtgatctgcccacctcggcctcccaaagtgctgggattacagccatgagccaccatgcccagccatatcacttctttttctactccagcctttactcctattccaatcatttattgtcagcttcacttcctctacagtctcttaatcttttggggactcctcagcagtttgtgaatatgtctgcatttatcctggtgacactggatcttctttagcaactgcctcctctcttcctttcattttacagtcaagtttcttgaaataataatttatccttggaattgtgtgaattcrtacttctcattcactttccaagctatgattatcagcttctttcttcctaaactgcttaggcaaagagcacacatggacactttcctaaaccttagtccattgggcattttgcattcttcattgtattstgttctctgagacatttgacagcgttgataatttcttcttgaaactaaaaacactcttccagttccccctgctctgagcattcttttttcctcttttctgctgtgggctttcccctgcttgccctatagatgtggttttcccatgccttcttctcttctgacccagaccatctaatcagcctccggccccactctggctttacgtacttccagtgggccatgtgttcccaaacctttatcttcagcccaaacatgtacctgtgtatacatcagcatgtcccatgagtacaaaactcaactcatcatcttaacccgtccctattctccacacacagatacatgcctcctcctgagggcttcatttcagtaagtaattccaccatctattctgttgtgtaattcagagaccctagactttgtcctagactctcttttctctcccccttctctcgtctgctagttcattctgctcattctatcagatctgcacctttttaaaatttccatatttacccatcttgcctctctactgcagcaacttcctgcttccagctggccccttgctgatctgtcccacacactgcttataagtgtgcactctaatatgcaaatgagacaacaaaatgccctaatcgtgtcccattacgtataggatccagtccaggttccttaccagggaataaaaggtttttcttggctctttgtttactacttgtaccctcatctactccctgccttgctccctgacccaaccaagcattttgtagtttctttttctttttttttttttttttgagacggagtctcgctctgtcgcccaggctggagtgcagtggcgcgatctcggctctctgcaagctccgcctcctgggttcacgccattctccttcctcagcctcccgatcagctgggactacaggcgtccaccatcacgcctggctaattttttgtatttttagtagagacggggtttcaccctgttagccaggatggtcttggtctcctgacctcgtgatcctcctgcctcggcctgccaaagtgctgggattacaggcgtgagccaccgcgcccagctgcattttgtagtttctttaatgccatggtgcatattacttgttttctgttgaaaattccttctcttcttgactttctggtaaagtcccagttactcccacatcatgataggatgtgcggcacctcatttgaaaagtcttctctggtcacccctcttcccctgtagagctgatcatttccctctgtgtagcctcccaataatacatggtgcaaacctccgttaaagcactgatcaccctgaaatttcaatatttggtttacatttctagtaccctgactagaccatgagctccttgagggtaggtacttaaccttccttacctagcactggaaacagcaaggcactggtttcagtaaaagttgcatgcatcatgaatgagtagagagtttaacagaagttagtgaattggccaggtgtggtggctcacgcctgtaatcccagcactttgggaggccgtggcaggcggatcacctgaggtcaggagtttgagaccagcctggccaacatggtgaaaccccatctctactaaaaatacaaaaattagccaggcatggtagcaggcgcctgtaatcccagctactcgggaggctgaggcaggaaaatcacttgaacctgggaggcagaggttgcagtgagctgagatcatgccactgcactccagcctgggcgacagaaggagactccatcccaaaaaaaagttagtgaattgcctacaaccttgtcctctttgcaggggacaagcccagaaagccagatggtaattgttgtgaaatctgtaggtttattaggtttattttgtacctttgccttcccagaaaaattgtagttaaaagcattgttataatgtggataacaacaactaatgtttatatagtgctttatagcatacagactgtccagaggagaaaaatgaagtacagaaagtctattacttgttagagggaggtaacacagcccttaagtaagtagagcaggacttaggactgaggccttcttattccagattctatattctttttattattacatactgtctcagatttgtctgtcaacgtgtgatttaaagaattacaaaatttggctgggcatggtggctcacaactgtaatgccagcactttgggaggccaaggcaggtggatcacttgaggtcaggagtttgagaccagcctgggcaatatgacaaaacccagtctctactaaaaatacaaaaattggctgggcatggtggttcacgcctgtaatcccagcactttgggaggctgaggtgggcagatcatgaggtcaggagatttgcccatcctggctaacatggtgaaaccccatctctactaaaaatacaaaaaacacacacaaaaaaatgctcaccatcactggccatcagagaaatgcaaatcaaaaccacaatgagataccatctcacaccagttagaatggcaatcattaaaaagtcaggaaacaacaggtgctggagaggatgtggagaaataggaacacttttacactgttggtgggactgtaaactagttcaaccattgtggaagtcagtgtggcaattcctcagggatctagaactagaaataccatttgacccagccatcccattactgggtatatacccaaaggactataaatcatgctgctataaagacacatgcacacgtatgtttattgcggcactattcacaatagcaaagacttggaaccaacccagatgtccaacaatgatagactggattaagaaaatgtggcacatatacaccatggaatactatgcagccataaaaaatgatgagttcatgtcctttgtagggacatggatgaaattggaaatcatcattctcagtaaactattgcaaggacaaaaaaccaaacaccgcatgttctcgctcataggtgggaattgaacaatgagaacacatggacayaggaaggggaacatcatactctggggactgtcgtggcgttgggggaggggggagggatagcattaggagatatacctaatgctaaataacgagttaatgggtgcagcacaccagcatggcacatatatacatatgtaactaacctgcacgctgtgcacatgtaccctaaaacttaaagtataataataaaaaaaaataaaaaattagccaggtgtggtgggcgcctgtagtcccagctacttgggaggctgaggcaggagaatggtgtgaacccgggaggcggagcttgcagtgagctgagatcatgccactgcactccagcctgggcgacagggcaagactccgtctcaaaaaaaaaaaaaaaaagaaagcaaaaattagctgggcatgatgacagctgcctgtaatcccagctactcaggaagctgaggcaggagaatcacttaaacctgggaggcggcggtttcagtgagccgagatcatgctactccactccagcctgggtgacagagtgagayccctgtctcaaaaaaaaaaaaaaaaaaaactacaaaatatttcagagggctattcctcctctgttgtccccatttctcttggcagcaaagaactcatttactttatcatacacacactctgtgaagaactctttacttcattattccatgtgaactgttaattgcaagtaaaggcagattacttgcaattcttattctaggaacttaagttcctgggaactaagttcctctcctgggaacttagaaccctcagacaggttatattgagtcagagagaaatgtttctgatgtgctgaagattgaacaaatgtgtgattagttaagacttagatattgtatatgattaattcatttgctagttcttgttgagctacctgtctaattgggcactgttagactatcacaatccctgttgtcgtgggggttacaggcaagttacaggccagttggggagacaggtgttaatcagagacccctgcaagggagcgaattatatcacaggtgcagtggaggcagtgttggaaagctaaaaaggacctagagaagtgaagaggcctgaggttatgagctatttgacctaggaagttacttccccttgctggttctcattcttttttcctcgatgaaataacccaggttgaatcagttggcttcttagttccttctagcttatgaaagtgcccttgttaaaacaatgagtcaggagacagcagagcattctattgtgtgaactgattatcaaataataacactaaatgtttcatttattgtctctgtaagcaaagagttcaggctcaaagtatctacatgggctgctttagtctactgagaaaaacatactcatatctcacatcaatgcttggcatttgagtgggccctcttacaattgttaggttattctgacatttgagggattggatccagatcctctttgttttgtgatcgtaaaaatcatcagccctttgtccccagtacctgcatttgatatgtactatgggagtaataaaccaacactttttttttttttgagacaaggtctcactttgtcacccaggctggagtgtagttgtgcagtggcacgatctcggctcactgccatctccgcctctcaggcttaagtgatcctctcacctcagcctcctgagttgctggattacaggtgtgtgccaccacacctggctgatttttgtatttttttgtagagatgggattttgccatgttggccagactggtcttgaactcctgagctcaagcaatcttcccaccttggcttcccaaagtgctgggattataggcgtgagccaccacacctggccaacgcttctttttttttttgagatggagttttgctcttgtcacccaggctggagtgcaatggcacgatctcccgtcactgcaatctctgcctcatgagttcaagcaattctccagcctcagcctcccaagtagctggggttacaggcgcctgccaccccgcccagctaatttttatatttttagtagagacagggtttcaccatgttggctaggctgctgtcgaactcctgacctcaggtgatccacccgccttggcctcccaaagtgctgggattacaggagtgaaccactgcacctggcccaacacttttttttttttttttttttgagacggagtttcactcttgttgtccaggctagagtgcagtggcacgatctggggtcaccacaacctctacttcccgggttcaagccattcttctgcctcagccttccgagtagctgggatttcaggcatgcgccaccacaccctgctaattttgtatttttagtagagatggagtttctccatgttggtcaggctggtctcgaactcccgacctccggtgatccactcgcctcagtctcccaaagtgctgggattacaggcgtgagccactgcgcctggctccgaacacttcttaataaacctacagaggctctgattcagtaaggaagcaaatatttgttgagcttctacatggacaacagtgctagggaacagtactgtacataatgaataaatatcccctgccctggaggaatttatggcttagtagtagaaaataaagagcaagatataactgtgcaagaaagtataataggtgctgtgatagaagtttatctaggattgggggtacaaatgtaagagtagttttactggctggcaggaggggaaatcaatgaatggacaacatagtatagggaaaaggatgttaggtttggagtcagaagacctgggtttgtagaatctcaactctgtatattagctctctatatattggctatatatttgatttctttgagtctgggttgcatcatttatataaagcaatgaacaatagtcttccccagctcagcgccatggctcacgccttaatcccagcactttgggaggccgaagtgggccgatcacaaggtcaggagttcgagactagcctggccaatgtggtgaaatcccatctctactaaaaatacaaaaaagccgggcgtgatggcrggcacctgtaatcccagctacttgggaggctgaggctggagaatcgcttgaacccaggaggcggaggttgtgatgagctgagatcacgccactgcattccagcctgggcaacaagagcaaaactccatctcaaaaagaagaaaaacaaaatctgtttgaaaacacaycctcccctccaccttggtggcatgcgtgcattgagtgtcactgctcacctgtgctctcggacatcaaaaggacagtagaggtrtgtcttaactctgaccttttcccytttcctcccttgcaccagattttatcatgtgggcaacctgctgcaactggttctgcctggatggacagcctgaggaggtcccaccaccccagggagccaggatgcaggcctattccaaccctgggtacagctccttccyttccccaacaggcttggaaccaagctgcaagtcctgtggggctcactttgcaaacacggccaggaaggtgagtgctgacttcttggcctgctctgccactgcagcctatggaccatgggcaagcgccrctgacccctctgaatgcctgcaaccttkcctttccctgtgtgatgctggtgacccagagctgtccctttcacaaaaatgttcaagaagaactaactgagtaaaagcaaaagcaaagcatgtcagcatagatttggagtcagtagacctaaattcagttatcagcgttgctacctactagctatatgatctaacctctcttgagattcagtttccctgttataaaatggggatgattgtagtcctcatctttcagggttgtgggaataaagtgagacaagaaagccatgaaaggtgcctagcacaatgcttagaatgtcgtaggcacttgatgttatttccatcattagccaccatcacaaaggcctgattgcagattaacttgttctttttatcaaaarcaacgttaaggatgcctcaggtacatgaagaccataacaaagactggagcttatttactgtagcagatttcatttgaaatgcttgggagccatgcttcccaaatgaatgagctggaaaaaaaattactggctagataatggtgtctaggtgtgcaccctccctcttccagaggcagtgagttatctgtgatcaagcatgactaggcagaaggtaaaccctcacctggataaagaactcctgcattctgcatttttctgcagaatgagaggtttgcagctcagaataagtgataggatatgatgttaaaatggtgatcatgggaaatttgagaggaaatcatacttttaaaccatctgctatgtgcaaaggactgtttaaggaatttaaatttttttatttcatttaatcctcacaatagctatgatataggttttagaatctcccaaatcccattttacatatgagaaactagggcttagggtttaaaatttaagaagaacattgaatgtgttaaattcctgacaaatagcatgagagatattaaaatactcattcttttcccttgacttcagtagtgctcaagatcacatagttattaaatgacagagccgggattcaaacccaggtccttgattccaaagcccctcccagaagacattcagcatgtcgagtagaagatgacagttacaggcctgggtgcctagaaaagcatggcaatgattaaaataaggtgctttttttcttacttattggaaaatgaattactgaatatctactgtgtatcaggaattgcctgggctagggaggcagagatgaagaaggccattgctgcttaacggggagcttgcagttggacagggaggtgaggacagtgcacaccatacgatgtgacaaaagaaaagtgtgtgtaacaagagcttctggaggggaagaaaaattccagtttggatggtaaaagatggttattggtacaatattttcttgctacaatattttcttgctacaaaagtatgarttaattttgtgcaatttacagtgaattttgtgaatattaagggtgttttcatctatgagaatttttcatttgtaatttcatgcttaagtggatcagcattcttatcttaagggtttggcatttaacacccaggggctttcaaaatgtctttttctagaagtgcttgaattgaaatgattccatggatcctactatctttttcttttccttattcttcattatggtcagtactttctgaatgcttattgggtgcaaagcacagataacattcaggactttatagacagaatataagtaagatgtggcccttgcattccctgagttttcagtcctaaagagaaatggcaggctgtacttttgccacaagccaaataccccatctctrttggtaatacctccctgtggtttagcagcgaccctgacggttttggagggagtctggcacccagcctctttagttggaccagttggaggatgaggttatgcttggagccatggaagtgatattcagatctcagagtgttaagagaggactgggtcttaggtgctggtaaggggaaagaaaaaggtaaccgtgttaccttttctggagcatccactttgtgctaaggttttatatacattctctcatgtaatacttcccatattccagggaatagggtgggagggagtaggagcaagggaagggcagttggcaaacgggagccagcagaaccctgcacacggcatccttgaagggtggtgtcggcctgaggcgccacggccagttctgtgatgctggatatctcagtacaccctgggcatttctgcaggcatgttggttgcctccactaattcatctttcatgctacctggttactgagttgttttgaaccattcggcagaatttatacataagtgtgtcctttgctcattctgcctgcatttgttgacagcccttttttcctttcttcttgttttcttctgccactgcaaactggggttttagcctcaagccctatcctgttcctgtagggtgtgtttcagatgccagcttatttcagagttccctgtgagccagcgggtgcatagaagctaggttgttgtctgcattctgatcttgcatccagcaagccacacacatttgaagaaagaatagagagttgtttggatctggctgattgagcaacgcaggctttataattgtgtcaagctaggtcttgtcagactgcatcgacttaagtaatattccatgtcaggcccacaggtttatggcattgaagcctctttgtttcagtctcagtcatcctaaacagacttcatttcccaatagaaaagctttagatgtgaatgaaccccaaatacctgaaaacatccattttctgcctgcatggctactggtcccagaaccgttacaatgctagtgcagccatgcatccttttaagtccatctctgaacagtattgtttggttataactgtatggagaattagggagcttgatatatgtccctttgcaatgccttctaagtcttaatagccaaaactgggtggtaaatattatttccttttccctttactatgtgaatgatacttagacaaaacttatataactatcttaactatgcagacatttacttcagcccagagtgtctgtgatcttgactatgagaatcttgtctcttgagctttcttttttagcttgaatatctttctatatttcgaaaagatggaccagaaatatttaagttactacttaagtcaacacaggatgaaaagtttttaacttctttaaaggattaatgagggtgccctccaggccaatcccagtgtgctcaggaattacctctcttgttggggatgtgacatgctcttggccagaacagagctcagccggatgtcactgtgctcactcagcctgtggggtgagaggccgaggattgcttcctgtgggctgagtaagccttcctgtgttgtcagcgactgccagactagctgctgccaggcagtaccagcttgcccatcaggcgctcttgttgcctaactgagacactctgtgctttcaggaacgagagtaccctgatgtccagacagcctcccgttgctgtctaaatatttgtcttggatatgcttgtaagcaccactgggttcccagcactctgagtgggccttcctggagtggggagcctgtgtcgatggagcagtgggtggggaatttggagatggaagccaggcccttgactcagaactgctctgtacttgaatggaactgagctatgcagtatggcctggtggaaagaatgtgatcatgggcattagcctccaacagaccttgagtgtgaatacccgctctcctgtttattgcctgaccttgaatacaacagttgatctccctaagcctcggttgctttgtctgtgaatcagggaagaacactaatacctactttgcaatgtcgctttgagaattaaatgacaagctagcatatagaagcacctcaataaattaatattaattgtaacaaccaccaccaccataaccttcatgcagaaataattacagtttaggatttgaatcctggctgtcaccgttaggtaatatttcctagctataataaaacagcttacacttgttgaggactcattttgtgttagatatgctaaatgggttmtctcttaatcttcacaacaaccccatgaggtagatactgttatcacccccattttacagatgtggaaactgagcaccagagaggctaaattacacacccaaggtgatactgcaagaaataagggagggaggcttaataaaaatgcagagctttttgattcttatgctggtagtcttaattaatacctcaggtgcttcaggagtaaataaagtaagcctcaaattaaataataaatgtgaagtgtcctgtacatggatatacacaatacatagtggaggtcttccacccgagtggcttttaatctaaaatctgaaagtggcttgcacccttagatatatgagagagcttagtaaaagtaagagtgactggaggagatcctgctgggcttggcagctctgaagctcccatcgcactctctgtcttgttctctcaatctgacatggtttcctgtgtcttttgctctaagcagcagacctgcttggactgtaagaaaaatttttgcatgacctgttcgagccaagtagggaatgggccccgcctctgccttctctgccaacggtttcgagctacagcctttcagcgagaggagctcatgaagatgaaggtgaaggacttgagggactatctcagcctccatgacatctctaccgaaatgtgccgggagaaagaagagctggtgctcttggtccttggccagcagcctgtaatctcccaggaggacaggactcrtgcctccaccttgtccccagactttcctgagcagcaggccttcctgacccagcctcactccagcatggttccacctacctcacccaacctcccctcttcatctgcacaagccacctctgttcccccagcccaggttcaggagaatcagcaggtaagggcccatttgtagtctctgccagtctgtgccagtttgagggctcattttcattttcctctcctgcctttgttgtgagaatggggtataaggctaagtgtcttgattatgtgaagcctttctgactactggtgcaccaagtgttttctgggtatcagactcatgttttggctttcttcagaggtgatatgcacagtaccaatttttttgtttgttttttgtttttaatacacacatatcctagttagacattttttaaagttcatcattccagaaatattttgagaaaagtaaccattaagccatcaaatttagttctgttccaatttgtctttcaacttaactcctttgttgcagtcttcattggctggattggaaacttagttccttagtaaccatcacaaggaatataggaaagcaaagggctatatggaggcaagggagggtggggaaacagacaaagacactgcttctcttaccagtcactggctggaagcaggagtagttggcacgctgtacttgcatgctgcttcttcattatcctggggggcttggaagtggtaagctaagagcagcacatcaactgaatcatgacccaggtctggggagtatagaaatgagtaataaactgtctctgtcctcaaaaagcccccagaagagggaaggtagacaggtagaccaactaactactggattagagtgaggccagtggacataattgttgtataagaagtgatgatgttgcataagtgccttaagtgactctgttatttatagcagcggcccctaacctttttggcaccaaggactcgttttgtggaagacaatttttccacagactggggtgcgttggttttgggatgaaactattctacccagatcatcaggcattagttagattttcataaggagcatgcatcctagatccctcgcatgcgcagttcacaacagagttcacattcctatgagaatctaatgccaccgctgatctgacaggaggcaaagctcaggcagtaatgcttacttgccagccactcacctcctgctgtgcatccgggttcccaacaagccatggaccagtaccagtctgtggcccaggggttggggacccttgatctatagggcttgggcaatatgggggaattaggaactacaagatccaatttccacatccacttttgtcactgacttcttgatccccttgggcaaatgttgagcctacaacaatgaaatgaggttagtaatcacagaccacttttgatcttgccaggatgttgagagacctgaatgcgtgataccatgtctaaaagagctctgagttacttagagctggtatagtgctagtgctgttggttcccacacatgatgtggatggctgctgccacttgtttatgatcacctcctttgccaggactgggccccctgattcagctcttgacaaccactgaggcataaaggccaatgtgatagcataatttaactgcagtaaaatcatttaactccctttttggcctgaacatgtttttctccgcagctggactttaattctttcctaagctctgactcttggtctgctagacagatttaaactcctgctatatattcttccctttgcttgtgttttttttttttccactctatgtataaggagccaggagaagaacttgaggaattctttttctgtaaagaaccttggctgggcgtggtggttcatgcctggtaatcccagcactttgggaggctgaggcaggcggatcatttgagcccaggcatttgagactagcctggcaacatggcaaaaacctgtctctacaaaaaatacaaaaattagctgggcgtggtggtgggtgcctgtagctactcaagaggctgaggtgggaggatcatttaagcctgggaggtcgaggctgcagtgaaccatgatcatgccaccacactccagcctgggcaacagagtgagatcctgtctcagaaaacaaaaacaaaaaaccaagcaaacttttcaggtagatttttcaatgaaagatgataagcttcctgtcattaaccagaaattyccagattgcacctaaaggtcaccctacatacaagatctaagtgggtacttttcctctgagattttcaagagaccttagtgtctgcttacatcccctgttctggtgagagctgcactttgcaagcaggaaaaacaggcatggaagaattaagtaacttacgcagtactgtctgacaagttcataagtgagctgcacctagaatgtaaatttccttataatacttgctcaaccagagttctctctttcacctttagtgccctagcaatcaatagttgctaggcaaggaagtatatacaataagcacaactgtggacaggtactagttttggatttttatttagccagtgggcaaactggaaagacaagagcatgctttgcagcatgaggtcgtttctctttctaggaaacaggacatctgaaagatagctacttaggaacaggttaggctctgaaggattccagggtaattccaaggtaacactacctgagagaccagtgaggatctacagtaagctaagagaaaacgttgttgatgaagacattgatttggatccatccccatacatgtgtactatgcatttgatcttgccttgatttggcattttgttacttctgcttttcatttccattgcagttggttgcctcttcttgattagctccatattatgaatcctaatgtggggtgagtggctggggtcggtgggtgtctttggtttcccagattgtcccttcactggcatccccagaatctggtggaaaaggcctgtgagctcagacacctctttgctctgagctcacagcaggccctttgcctgcagggagcagtgggcgaagaggatctacttaaggggtttgtggcttaaatggtgatggaattaggaggctaacagttctgcctactctttggccaaacctcctaaaagagtactcaggaggaaccttttgagaagtgagaattctaagcataatgaaattccgtaagcataggcagtgttttatatagtgttaggctaatagattcttagatacattaaaatactctttgactaggtctggacatagcacttaataatagtgtgctcaacatggggagcacatttccagaatgtgagagtagttactaggcagaaaagaaagagactagggtggtgatgatctggaaactttgtcccatcagtgtcagataaggaagccagggagatttagtgtgaaggaggggaaaacatggtataaacagtttgggaaaaacaaaaaacaaacaaacaaaaaccccaggagactatggtctgaggagcagaaccagggatagggatggcaattttggatcagtgtcaagaaaaaccttgatgccagatagagagcagtccagcagtggaatggacacaatgaccttcccttcacctgtggtgctcaagctgagattaaattgatgatgagttgtggctactgccatcctggtgtgtgcagaattaatgcagttttgttctagagggcagctttgtctattgaaatgtatttttgttgtttctctgcttgacaaagttggtatgagagagcaggcttttgtaatgatgctgtaagaggctccggatttctgggcatgatgggagtacattctggacattgtgtgagttgaaaagaggcccatgctatgyagatctctgggacatctctagatgtgatgttacttttctcttcccacaggccaatggccatgtgtctcaggatcaagaggaacccgtctacctggagagcgtggccagagtacctgctgaggatgagacccaggtggggcctctgcttgggtctgtgtcttcacctttcctctttcactggtgttcttcggaacctcttagcagagtcgagtggagagagaataaatgtgtgatgatagtgcttccgaaattatatttttggggtagggtttagtgttagtgttccaggttaactagtgaagcggtcagtgtatttataaggagttgtgaggtcacagtggagacggagaagcctcatggcccattgtatttccagtctcttgactttctaagagctgccggagggcaggcttgtggtcctgctgttaaagtcttgttctttccttgcttctagcacactgtagccattgtcaagggaaggaggtcagacaattagccaggcagggccagtccagagcacagaccagggagctgtggccaaggttgtgtatagaggagtacttgccagggaaatgtgcctcttgtgggcaagcagaagtctccaggggagaagggccagcaccatgctgggtttcatgtgcggccatatttaacctctacaggacccctgtggggtaggactgctctctccccttaatggaggggcaaacgggctcagagtggtaagcaacttgctggatattatttagcattaacagcagaggagtcaagattcaaaattagggtcatatgactcaaaccagcactccttctactatacttctatctagtactatatcacactgattggttggtctgtgtctgtttgctcctgagcacagaatcgtgggtcaggaagagattctagtatattttgcaatgcagagcaccatgccaggtactcatcctgtctctgttcctacccttcatgaggtcagtcaccaaaattatgatgtggtgactgctttggggtccttgragaaagagcttggggaggtaagagctgagcacactgatctcatctttgtcattgcagtctattgactcagaggacagctttgtyccaggccgaagggcctctctgtctgacctgactgacctggaggacattgaaggcctgacagtgcggcagctgaaagagatcttggctcgcaactttgtcaactacaagggctgctgtgagaagtgggagctgatggagagagtgacccggctatacaaggatcagaaaggactccagcacctgggtgaggggctatctgcatggtagctttacagagctcaggagtgtttgctgtcactccaaagcatgatggyattgacctgactcaatttccacacttaagccatggaaggagacaccttacatatttgcaccgtctaataatagctgtcatttgtggttgagtgtcaaaactagattaggcattgcatgtatgtatttattccttagagcaacctatgaaatagacattattagcatcacccctttatctgaaaggtaaaatttaactgaaaattttatggtctaagtccatagcctttctcaccatatgctatcccctccctactcaccaccaccttgtaagttttcttaccttagaataagaatgcttgttctgaagatttgggaggtagaaagtgaatctacatacatggcaggagaagatagctgttccatctgcacttgggctcttccttttgttcatttcccagagcattttacactgtatcattcaggagatgcccaggaaaatatctgggtctgtggttaaatgagtttagggaaaaatacctcatatcttcattactgatttatggtagatttttatattaaaggcagagaagtcctgcagaagagaaatgtgttttggctgttttgaacttagcatttcctgaaattatttcaccacagaatcttctcctttcctcccatccccagttgatttggttcctacagagcaacatactgattccttgcttggtaagagtggttgaagtcaggtttcaggctctcttctaccagtagctcaaattcatcagtgttaggggtcatctgactgactcttcaccygattacagactgaggcctactgacatggagtctgttttccctttgggattgtttcaagagtcttctctcsagtcgtcaggacctggggaacagaacagatgactccacgtgggaactttatccagattctctgactgactgaaacagctagatagttcattctttcttgactttaatgctgacttcaaaatagaaaaggatattgcacatatacagtatccttctacttggcagtttgtgcaaactggtggaataccttttcctaagagtagaccaggctgggtgtgttggcttatgcctgtaatcccagcactctgggaggctgaggcaggtggatcacttgagatcaggagttcaagaccagcataggcaacatggtgaaacaccatctccaccaaaaacaaaaaattagccrggagtggtggcatgtgcctgtagtccccaggtactcaggaggccgaggcaggagaatcgcttgaacccatgagaaagaggttgcagtgagccaagatcatgccactgcactccagcctgggcaasagagtgaggctccatctcaaaaaaataaaaaataaaagtagaccagatgcacgagtaggagctttgtgtgagttctgagcatgtagagcgagtagagggcagatgtccatctaggctcttggcaagcctggttcccagcagggagtggtaagagttcagaaatgatgtcagggcagtaagagactgtrtttgtaccatcatgccttacctattcagacatccttctctttccttttcagtcagtggtgccgaagaccaaarcggtatgtagttgtttctgtttgggaatgggcttaggcccttttgtccttcccctccttcaaccccaatccctttagtaatctaagaattctgagcatttgagsccccagagagagggtgtgtgggaaactcactgagacccagggggcctctcaccatctttagaaattctctctgctcgctgtgcaggaagcagagtggagcatacgtaggggcggactgactgatgtgcatgtccctgggctacctgagctcataagccaacatttgtaaaacactgaaacagaggaggggtggcatgtatcacactcagctcattttttaaaatcttggtgttttcagttctggtctgggtagggagggtctctgtgtacaccttctggggaatcagggtgtttagcagcttctggtactaaccaaaaagaaagggtggtgacctgagacagccctgtttgtacagggctggtaatggttagagctactctggagctaacacatgtgctactctctgggcacaagctatatatctcagctcagctgccactcacttaaagaccaccactgggccctcaggtactcccagaacacactgcagaactcctgaccatctgtggggacattctaaaatatgctatgtgttttcaaaagcctcaagggtatatggttgtgaactcccttccaagagagaacgttctaagagtagtgttggactagcctgcagcattttaaaacttatttcagaagatttcccaaatttatttagtaaaatggccttttgctcagaatgggcaattttatgtctgattacttctaatcagacataaaaaacagttgagcttttctcaattccccaaaaccatttggagttctagacccacctccaccctccaaccccccagcatcaccggtaccaagatcaggctgatctacttggtgcttcctttctttttctgattccctgggagaatgctgacaactgagttaatgtgtttgttgttacttctgagagaatgagtaactgaaaattataaattattcccattcatcttaggtatttgtatagtctccaaacctctgttaggaccaacagcacctcaaaagaggcaaatgggtttcactccctttcacacccagcctacctcctagggggaagtatttcttgactttttaatagtccagaaaagagaaagtatagatgcaataagggagaattcctctatgggttggccaacccccagatggtagaggtgacttctgtgagatcagttcctttttatgggtacctacttcaggctacaatttaagacatrttggagatggctgggcttttgaacattattttttctgtttgggtcagctctactaggatactggtcatgcccactatattctgctagtgacacaagccagttagcatttattgagaaccctgtgcactcagcagttgatactgtctggatagtttctactcttagggcagttaggcagaaggccattctagagcaggagctgtggggccagcctgcctgggtttgaatcctggctcctcgacttagcagctttgtgcccttgggcaagccacttaacttttttgccccagttggcctcatctataaaatgaaaataacaagaggtcctactttatagtttttgtgaggcttcagtgagttaacacatgcaaagctttcaggaccctgcctggcacacggtaagcattcagtaaatgtgggatgttgtcattcccttgggaagatgttcattcatcagacatttagagtacctaccatataactggcattgggggcttcaaagatgaatatctaaccttggagcatggaataaatgctaagcatataattgtaaaaattgattgaatatgttgaattaaagagctcatagtctactctgggagtaagtaggcaaactcaaaattttaatccaatgtgataagcagtcatgggggtataaaaaagttttgtgggggtagaaagagggagcagtaatctctgccaagtttctccaccaggaagtttcctcaggaaacctgggagtagtttgtgagatagcagaggggtcccccatgatccctgactttattaaatggaggatatgtttatagataaagccttgtgatccttaatgaaccattcatcacagttccatttctatctaaacttttctgaaccagttttatctttttagcctgttctgcctcaggggataatgagtccctacgtgccactcacacactcactatattacagccccaacagtctgaaaattatttcttttaagctttgagaactttgccttagttctcatgttctgggatgtgtctgatccacaagtgctgtgtacttttcaaatctttacctgttggaggggatgaagtgtggattaaacaagtaaccagagttggttattgaggaaatgtttcctcggaggagctctatttgagggaagcatgtgcactgagastttgtttacaatgtacctgttatctcccacctccctcccccagtcacccctatacacttaagacattctcctcactcctctgcccctttttttctgccctgtgtgtttgtacagggggagcagtaccatcaggcttggaggagaacctgtgtaagatctgcatggactcacccattgactgtgttcttctggagtgtggccacatggtaacctgtaccaagtgtggcaagcgcatgaatgaatgtcccatctgccggcagtatgtaatccgagctgtgcatgtcttccggtcctgagagcttgcatcggtttcttcagtgccttacagggaaatagcctggggtgtctgggctcagggttggccagcttgcagaggagcaagctagtagaaatattgcagggttcccaaaaccaggtcaagcaagatgccatgtcacccctgagcatgcctgtcttcccaggggtgtacctcttggctggcaaagcccaaggccagtgggaacttgtataaatcacatgggtatgttcttggttcagtgatcttggagtgatgatggtaactgatgaacagagaactttccagaacttgggtcctgtcttcctccctgaacctagacagtttcacccctcctcctgtacccaacccatccccaccccatatgggagatgcttgcccatgtgtttcatcaatcagaagtcctcctccccagcacattcggatttaaatttctggtctctccggctttctgtgctttaactatctttgctaaagtctcttgctacattgcctaaatccatttgtttctttggaccaaaaatgttagtttaccagaccgatagtggtccttaggacagattttagaccagtaaacttatctttggtgagaaatgaaatacaaatgctatagaaaaatttcaaagttgttaaaagccacttcattaaatgctgggattggaagctgttggtctcctgacctgactctgggagccaacaaaacatcaggctcccaaactgctgggaaatttgtttctgtctgcaagggatagtgcgtgcataatccctgctgctgcttctcttgggacctgatttgcaccatccttagtttatgcggaaaggggaagcaatgggtggaggcagtggccttctccttaattttggcttggcttctgatccttttcccaactagaagtcttaagccacttttcgctgaaaatgaaatccctcccttatccatggtagttttaaatttggtttcattgaagaaatagatttaggcaaagagcctgtgctcttctctggccagactgctgttgaagttcctggagagcaaatgttaagacagagcacttaagagctttcaggaggtactgaatgagactggattctgttgtaagccgacagttcaagtctttatttcccaggttggtggggagtgaggagaccctactttcattccctttcctagcccactgatttttgggggcaggtcagggagaaagcatttttttttttttttttgagtctcactctgttgcccaggctggagtgcagtggtacagtcttggcttactgcaacctccacctcccaggttcaagctattctcctgccttagcctccagagtagctgggattataggcgcccaccaccacaccaggctaatttttgtatttttagtagagacggggttttaccatgttcaccaggctggtcttgaactcttgaccttatgatccgcccgcctcagcttcccaaagtgctgggattacaggcgtgagccaccacacccagcaggagaaaccattttctaggctctttaggaaggaccatgcaatgagtaggtgatgtatttgagccctcacagtctttacayccctagaggagctggaggacttaagagtttgctgcagaagcgtggccaagcacaaaacacatgatcaggaaagcagagtgttttcccattaccaatggatgaactatgcaaaccctaaacgccttggcagacacctcccaccccttacccctcccatgcagctgaaaaatctgagactagaaccaatcatgactctggatggcagagggaaacctctaaagggacttattacattggtacagacatatttatgctttcytccatcaccaaccactaaacccctttggaggaatgaaataactgcataaactaktcaactgaacactgggccacttacctcartgttatacaaagtcctggatgatttgattctgaaccacagcctttgcaggagttgggggaatcagatttgctcatgaagacatccctttccacttttgtcatgggcagtaaatactatagtttacaatgcctaccaattagcaaaggatcattcmttcagctactcagttcctctgtaaaacaggtctatgtatgtgcaattcagctaagatctagcagtaacttaagggcagaagctggctctctacttacaacctgctttctctgctgaagccttacctcctcttcagtttccctcctagacacaaatcgaaaataatatactgatagctggttagtaacctcagtaagaattaaaactgaggttgtttactcattttgcctttaaatcttttatccccttttggtgaaggtttccctttaggaaaaaaggtgtcaaacaaccctgattttttttttttttgcatcatttttattacaccaaattaaagttgggagttccaagatcccattccagttaatatttaaccaaggtctaaaatttgattttttttaaatctttgaatcctcccttctgcccctcatggatccttggttttaatgatatggaaacatctaattcttagaattattccgtagcttttgctgattactctgagatttcagttaagacttgtttcaaaagacagatagctgactggttcataatacattggaatagttggatccaaactaataagaataagctgtacaggaactagtgctcaatatacattgtataaatttgtggaaatctcttggatgtgaattgttacttcaagtggcttttattaagattttctcagacttacttggaggttaaagcaaacccaaatgtgtattattttgttacagagctctgctttataaytttgtaataaagtttcaatacagacacctgtcctgtctggtgcgaggatgttagaggttgataggactgacaaaagagcctgacagtggttcatgctataatttccacactttaggaggccaaggtgggaagactgcttgagctcaggagtttgagaccaacctgggcaatgtagtgagaccttgtctctacttaaaaaaacaaacaagggccgggtgcggtggctcacgcctgtaatcccagcactttgggaggctgaggcgggcagatcacgaggtcaggagatcgagaccaccctggctaacacggtgaaaccccgtctctactaaaaatacaaaaaattagccaggcgtggtggcgggtgcctgtagtcccagctactcgggaggctgaggcaggagaatggtgtgaacccgggaggcggagcttgcagtgagccaagattgcgccactgcagtccggcctgggcgaaagagcgagactctgtctcaaaaaacaaaacaaaaaaaaacacaaacaaaaaacccaaaaaaaccaaaaaattagccgtgcatggtggtgcatgtgggtagtcccaactacttggaaggctgaggtgggaggatcacttgagccaggagattgaagctgcagtgagctctgatcgccaccgcactccagccagggtgacagagtgagaccctgtattaaaaaaaaaaaaaaattgacaactgataaaccacaagctaatcctgggatgtgcacatggcctgggattagcctgtggttgggccaagtgaccttggtcaagatgctcagtgttgttgtaactaactaacttgctcaagaccacaaatgtaatatatggaagaggccatggaacaacctagaagagaatgagagctgggtaggtaaaggatgaatcccaagaccaattgggttgaagcaccaagtgagttcagatatttacactgatctagaagagatgggccttaaagaactgaaatctgaggacagttagtatgcccagttaggtcttcaggttaccctgggagatacatggtaccttttggatacagctgtagtacagctggactatggctcagaaaaggttggcccaggctgggcgccatggctcacgcctgtaatcccagcactttgggaggctgaggtgcgtggatgactcgaggccaggagtttgagaccagtctggacaacatggcgaaacgtggtctctactaaaaatacaaaaacttagctgcgagtgatggtgtgtgcctgtttgttaagtcttagccacttgggaggctgaggcatgagaattgcttgtgaacccgggaagcagaggttgcagtgagctgagattgcaccactgcactccagcctgaatgacagagcaagagtctgtttaaaaaaaaaaaaaaggttggcccagcctcgtgacagactgctgtgtgtgcgcaggcttgtacaaacctccctgaccaggcgcccaaggagcagggaaaagactactgagaatgcagcccctgggagaacaagattatgtgtccatctgctgtgactgagaagagaaaggaatcttgccaaaagggcataaaggatcgaggatgagccacaacactttgctcacattgccctagggagctgacctgttcagcacccagtgatgacctctgcttgatgccagccagcagcatgtagaggttcagaagagggaggcctccagcattctgctggagagatttatgatgatgatgttgagggctgcattgaaatacatgaaagaaatacatgaaaggatacaaaatagtatatacagtcagatctcagcagcaaagactggaagaaaatacataaaaaaccactgacattgaaatggcaataacacacactaaggcagagaagggacaagatgatcacctgcagccagcagaggccctttcctgtgagtgtgcactctgggtgtaagcaaccaataagggcaagtggggctgggtccaggttggagaggacagtgcctttggcaggatcctgaggagacagccttgttctgctgccctgtccggttgtttgtttggcctgaggctgaagagagaaatggaaatctatgtaggtcagtactcaaaggaggagcagctttttgtctccatagaggatggaataaaaagtatcttattcctaatactgaagcaaggctgaatggtgcctattcaaaaacaccaaatgtcctgggctagagtcaggaaagtaaacccctcccccgtgctgtccctactcccccaacatacacattttaaacagtaggtggaagccaaagtcaatcagatcaaagttgggggggggcggtggggtggccagggggcgcagtggtccttgatcttataggtccagagcctgttaatttgttcataaggtgagaactgaccctcaagagctggaaggattgggacatggcagccagtttacaaccatatggtgtcctgatgagcctgcactcagagtggagtgttggctggaacatgcacacctgcaactgagggttctaaagtcataggttaggcccttctcccgggtagggtctggacatgcacaccaggagtgacgttcccaactctagataactatgtgctaggctctgggctaagtgctttacataatgttgctcaggacaacaggacaaccctatgatttaggtgcacccattctacttggagggattgaggcttagatgttaacgtaacttgcctaaggttagagccattaagtttcaggagtctgatctgaactccgtctacacctgcactgtccagtgtggtagtcactagtgacatgtgaccatttgaagttgaattaaaataagaacttcagttccttagttgtgccagcttcatttcaattgctcagcagctgtctgtggctagtttggttggatactgcagatttatggatatttccactgctgcaaaaagttctattgaatagcacttgtctacactaaattgtctctcttccttttgttcttcaaataaatcagcctcaggtagcacaggagctgttctttgtaagcaggttgtatggatctgttctcaggtgtggatttttatttttttccctgcagatatggagtatattttctttaagaaattaaaaactaagaagaaaatgccactcaacattgttggtattatcaataggtcagcaggaaaaaaaaaaatactgtgataaacttgtctctctgataccaagaagaaattctagtccgagcttcaatatgcttcctgtttttttcgctaggtatttcttttactgctgctcttcattctttcccacatttcatattggaggattggtacagcctttagaacttcattgacaggagcaaatccagtatccactgatttcttcttaaaggcgctctaacccatcagatagcccggcagtttcattcacatgaatactccagccatgaaaaaactcagtaggacacagacgaatccaatgaatagaagaaaaaaaatcgattgagttttgggatatttggtgcatttgactggtccagcattatgaaacctaaacctcccattgtaaacaggaagctggatgcaaatccttccataatatactgtccatttactttgtaggccaagaaagctactggcctctgatgcccacgttcatcagccaatacttgggggttcaacaatatcatataattattcctccagtcatgaggaagtaagacaccaccaccagagcatacacagtcatggctgatggcatgtgcagccagggtggcttcttcaacttcaggttggaacactcgagcactaagaatgggatatggtacaaagtctccatgttggtggcaacaagggctgttcttggcctcaagccccatgtggatttttattcttaaagaacagtcttgtttccaggttttggggatgcagatcttcctggagccctctatccctccagaggagtggcccaaataacctcccctttcttcataaaggccccattttcctacctgaccctagtcccctcccttcaaactggggatcctcaccatgtaataggagaacacagagaagaaagtaaaaaaattcattttgttttctttcacatgaggtttgttcctggcaaagcgtgtcaggctgaatacaagttccgctaaacagaagcatttccgagggcagtcctttaaatacaactttaaaatgagcctggaagtacaaaggaacaggcaaggatgggagagaaggctttgtggacagagctgccatagcccagcctttactccttaatctctagggaaattattgggggtgtaggtggggaaaggacaaagataactgcaagatattttatttataaaaagggtaactaagctgcttttcaaagaaaacaaaaagatggcaaacccagcacccagctctgaaagatctatttaaaccagcaagacaaactgacttcagctgtggcacccacagcaactaattcctggtccagaagagacagtggagaactggtgggtttgggagaagcaagcccattccccctatactgtgtctatctgcctccagcctgagtccagtccagtagtatggtaaaggagagtatggcctgagggagagggaagacagcaaacctagcagggagctaccagtctccgtttccggatacatgcccaaatccactctggggagacctgctgggccgcagggttcttgtccctgctacccagcacgtgcgtggctgaagtcatatcaaattcctgtaccaggtccccgtcgaatgccacaaagtagcgtctgagacggctgaagtctggtgtggagggtggcaagtaaagccgcaccccagtgaagatgtccagcaatacctgcaaatgcagaggggtcagggtggggtcagacctacactgggtacagatgggtcttcacccaaatgagcacgggacagaatgagggagcctagagttaggacacaagcagagaagtttactggaataccatgcatcaatacccccacccctccagtcactccaaattatacaggactgacacgcccctccatccctgcctaggggaaaaggagagtggacaggcctcgacatctgggacctggagatgggaagagtacatgtgtataagagccacccagtcatggtgggcaggcggagctggctctgactcagtgcccccagactcagtgatgtcccctgagaccaagcagtctactctgtacaacctgctagactgaggggtcaggagtcctgcttactactctcaatgggttcaaggacttcaggctgggaagagagaggggaaaggtttctacaggtctgttggggaccgagttcaggccttgtgctgtgagacttctatgcttactcctggatggcggtggggagcgtgggggcgcaatgacatgggtgtcaatcatatgtttacttctctatctgtcctttgaggcatcagctcccccagagttgagccagtactaaacctagttcttggcatcagaaagtgctcaaaagaggccgggtatggtggctcaggcctgtaatcccagcactttgggagaccaaggcaggcggatcacttgaggtcaggactttgggaccagcctgaccaacatggtgaaatcccgtctctactaaaaatacaaaaattagccgggcatggtggcacatgcctatactcccagctactcgggaggctgaagccggagaatcgcttgaacctgggaggcggaggttgcagtgagcggaggttgcagtgcgctgtgattgcaccacttcactccagcctaggcaacagagcgagacttatctcaaaaaaaaaaagaattgctcaggagatgttgccaaacccaagactgacaagaaaatgtaacagggaaaaggctcctcaggtgggaggagagtcaccaagccagtgccctctccccgactcgctgcttgctggacctgcttccaccctgaccacaaactcaatgctgcattcccacacccagactgggcttttccctttaatgtaaat

SEQ ID NO: 96970 - DNA, 13970 bp, Homo sapiens
atcaaggatagagttactgggctgggcacagtggctcatgactgtaatcccagcactttgggaagctgaggtgggcagatcatgaggtaaggagttcaagaccagcttgatcaacatggtgaaaccgtgtctctactaaaaaaatacaaaaaaattagccgggcatgatggcacattgcctgtaatcccggcctacttgggaggctgaggcagaagaatcgcttgaacctgggaagcggaggttgcagtgagccaagattgcgctattgcactccatcctgggcaacaagagcgaaaactccatcaaaaaaaaaaaggccaggtgtggtggcttactcctgtaatcccagcactttgggacgccaagccgggtagatcacttgaggtcaggagttaagagaccagcctggccaacatggtaaaaccctgtctctactaaaaaaacaaaatattaaaaattagccaggaatggtggcaggtgcctgtagtcccagctacttgggaggctgaggcaggagaatcattcatttgaacccaagaggaggaggttgcagtgagctgagatctggccattgcactccatccagcctaggcaacaagaatgaaactccatctcaaaagaaacaaaagaaagtagagttactaaaagcatgtttactggtgacttttaggttcctgatgaaaagttatgatcaggtgcactcaggaaagttggtgtgtggcatggtgtcctatttgaacgacctgcccagtcagcgcatccagccacagcaggtagcagtctggccaaccatggtggatatcaacagccccgaaagcctaaccgaagcatataaactccgtgcagccaggtgagctctccctcaagagctagaatacgcagcagtggggctggggccctgacagatggcaagaaggcatgagtactgttgatcatttcctcagacctccaatctatgtcttaacagattagtagaaattgctgcaaaaaaccttcaaaaagaagtgattcacagaaaaagcaaggaggtagcttggaacctaacttctgttgaccttgttcgagcaagtgaggtcagtggtagttctctctttttccccttccctgccctcagcatcccgcattttctggtacagaaaccctagtcactgtatattgaatctttttccaaggttctcaaactctggtgttttctttttaatcttaggcacattgccactatgtggtagttaagctcttttcagaaaaactcctcaaaattcaagataaagccattcaagctgtcttaaggagtttatgtctgctgtattctctgtatggaatcagtcagaacgcgggggatttccttcaggtcagtattttctaagtataagtcttttttgttgttgttttaagaaaaataattgttggctgggcacggtggctcatgcctgtaatcccagcactttgggagcccaaggcgggtacggtgatcacttgaggtcaggagttcaagaccagcctggcctggtgaaaccctgtctctactaaaaatacaaaaattagccaggtgcagtggcacatgcctgtaatcccagctactagggaggctgaggcacgagaatcatttgaaccctggaggcagaggttgcagtgagccaagatgaaaccactgcattccagcctgggtgacagagcaatactctgtctcaaaaaaaaaaaaaaagaaaaagaaaaatagccaggcacagtggctcatgcctgtaatcccaacactttggccaaggcgggcagatcacctgaggtcgggagttcgagaccagcctgaccaacatggagaaaccccatctctactaaaaatacaaaattagccaggtgtgctggcgcatgcctgtaattccagctatttgggaggccaagggaggagaattgcttgaacctgggaggcggagattgcggtgagccaagatcacaccattgtactccagcctgggcaacaagagtgaaactcagtctcaaaaaaaaaaaaagaaaaaaataattgtcatccgctttatagctgtatatgcatataattatgtctatctatatacatatatatgttttatttacttattttggtctcttttaggggagcatcatgacagagcctcagattacacaagtaaaccagcgtgtaaaggagttactcactctgattcgctcagatgctgttgctttggttgatgcatttgattttcaggatgtgacacttggctctgtgcttggccgctatgatgggaatgtgtatgaaaacttgtttgagtgggctaagaactccccactgaacaaagcagaggtaaaaatccagtgtctctgcacctttttaaaagtcttcacttaaatattgaagcaggaaaggcctctcgaaggggatttatctgtgaaagctctgaaagtaccatggccacttctgacagtcactttatttgagcaacaggttcagaagggaactgggttgttcccacagtaaccagggtcttaatcaatttcaatttttgataacgaattgaacatttaaaaatatatacaggccgggtgcgttggctcacacctgtaatcccagcactgtgggaggccgagtgggcagatcacctgaggtcaggagttcgagactagcctggctaaaatggcgaaacccaatctctactaaaaatacaaaaaaagcagccaggcagtaatggtgcacggctgtagtcccagctactcgggaattctcctgcctcagcttgaacccaggagaacccaggaggcggaggttgcagtgagccacgttcgtgccattgcactccagcctgggtgacaagagcaaaactctgtctcaaaaaaaaaaaaaaagtatacacacacacacacacacacaaatagaataaaatatacaaaaagagaattccgtagtgctctttggtacaccctttgtctagcagcaatgactatcaactcgtggctagttgtgtttcatctgaaccttcatccccctcctcctggggactattttgaaataaatctaagacatcagggccaggctcagtgatgcacacctgggaggccgaggcaggtggatcacctgaggtcgggagtttgagaccagcctgaccaacatggagaaaccttgtttctactaaaaatacaaaattagccaggcgtggtggcgcatgcctgtaatcccagctacttgggaggctgagacaggagaattgcttgagcctgggaggcggaggttgcggtgagccgagaccatgccattgcactccagcctgggcaacaagagcgaggctccgtttcaaaaaaaaaaaaaaaactaagacatcagataattttatccataaataattcaatgcatagctctaaaagataaggactcttcagaaacaaccacaggctgggcacagtggctcacgcctgtaatcctagcactttgggaggctgaggtgggtggatcacttgaattgaggagttctagaccagcctggccaacatggtaaacccccatctctacaaaaaaatacaaatagcagccaggtgtcatggcacacacctgtagttctagcaactcgggaggctaaggtgggaagatcgctggagtctgggaggcagaggctgtagtgagccaagattgtgccactgcactccagcctgagcaacagagcaggactcagtctcaaaaaaaaaacaaaaacaaaaacaaaaaacagtatactatttaacatggcaaactctttattagtagttcttctctctcctttccccacaggtccacgaatcttacaagcacctgaagtcactgcagtccaagctctgaagtgtcacaaggacaagtttaatctgcttcagaaagcgcctgtgtgcaactcaaattttgtggaatctttttcgaattcaaatagctatagagcaaatgataaattgacccctttttataaatggagggaaaaaatgaacagatttcagagattaaatgaaaaaaagcagatgttttaagtgcaattaacactgaaagagacctgttaaaccattcagaaaaagcttaagaaatgcgatatgacttccttttgtaatgctgctgatcccagtagactatgacttttgataattagcagaatttaactactgagtagttgattattttcacattttaattgctaatcactggctatataagtgtttttaagcaaaggtatttttgaagtggtgtagaacccttccaagctttcctgctcagtgttctaccagacttaccctggggcctggcttaaaagcaggattgaagaaaagggactgggggaaggaaacttattggaaaacttgatgcgaatgagtttctgcttggcacagtctctgcctgcttgctctcctttgctgatggattgcatttatcaaactattcatgctagcatttttccaacgagggaacttattccgcacgggcctactgtaggaccattgtctcgtgtaattaggaattttccatttgaaggattgctaaattgtcacagtagtaggaagtatagggaaacctctcagctgtggcactgttgtagctttggagtgcagagtgtaactctgggacaatcagatttcacatattctgtcatcttggcataagccattaaaagcttggagattactgtatttggcattaaaaaaaaatgtcacttaggtcagcactcccagacgtagcacagaaaaaccctttgacacaaaccatgtgttctgatttttggttcagaaaatattgaaactgtgagttgttttttttttaacaactgggaaaaaacaaaaacaaaaaactatagttagaaaaatggaagttccataggttctatttcttactctatgtatggctttgttttcagtctatttctaggagctttctctgaatcgctaattgtcctttcagttgaaatctaatttatacaatcattctatacttaaaggttaaatacatcttaattaattttttcttaaagtcaatgtaagtcactttgttttgtttttttttaatctacgccatatgcctcatgaaaccagctgttctagaatcagtcctgagaatatggcttaattccatggaaacataactcctatcttgggacctgacataatatctatctatcctggggaactggtaatatgagacttataggttacagcagaaatgctacatgttgacaaaagccttaatcgttccactgggagaactaattgataattgtgttaagattgaagattaaccctgtgttaatctcacttgagtctatcctgacagtagttcagattctggaaaatgataaactgacctgctagatgtagaattgtttcaaaattagtgttgaaataccttgttcacagatgaatatctgggcaggatctgagggtgtttggaatgacaccccccaatccagttgcatagatgggatgtctttgcaggtttgaggagatcatcgacctgcagagccccctttgacccagtacctcacgttttatttaaaatctaaatctggggccaggcgtggtggctcacgcctgtaatccaagcactttgggaggccgaagcgggtggatcacctgaggtcaggagtttgagaccatcctggccaacatggtgaaaccccgtctctactgaaaaaaatacaaaaattagctgggcatggtggtagcacgcgcctgtagtcccagctactcgggaggctgaggcaggataatcgcttgaacttggcgggtagaggttgcagtgagccaagatggtgccactacactgcagcctgggtggctgagcgagactccgtctcaaaaaaaaaatctaaatctgacatttgatgctatttttattaatattggaatgttctgtcttgaactttattcaatataatcaagaataaagatagagtaaacgtcactgatttgtactattaagagagaaaaaatatgccacacaactaaacataggtttaaattatgaagaaatttagaatagaggtttattagatttagggaacactaagaacaaaaaaggaaggagtgatacctgcctgagtggacagctgtaaatcagctgtaattactgcagttgtaccaatagttgtgagtggctccagtcactttaggagtccttggaagtacttggtacacatttgttggctgtaccttaaaggaagtggcaagtccagtttgttctctctaccacactagactgccactgacaagtttgggtctgttggattcaaaattttgtaagccattttcacaagtacaaagatacattttaaccttgtcttctccaaaattactgagtaggaattttatttttatctttttgagacagggtatcactgtcacccagactggagtgcagtggtgggatcttggcttactgtgacctctgcctcccgggttcaaatggtcctccctcctcagtctcctgagtagctgggacgacaggcacgtgccaccatgcccagctaatttgttctattttttctgtagagacggggttttgccatgttgcccaggctggtctcagactcctgggctcaagcgatcatttcgcctcagcctcccaaagtgctgagattataggtgtgagccacagcatctggcccagagtgaggagaattaatgagattttttgtgtgtgttagataatattgatttaagcctttttttaaaaagtactctcaaccaaatacaaaattgaaaatgtgaggtttaatagaaatgtgttggctatttgcaatggattttcttcttgcccaagtgtttggagttctactttatgctctgtatttaaaaattagtgacctcaaagcagagttgatgacacaggctttggggccctcatgttcttgtctttagaacatatcactactaagtatcagcttatcttcagaacattacaacattcaccgtgttcatatgctttctgagaagtcaccacttgtaatttcagatcacatacacctgaaggcattttatagttcctaaagttaacatgttagatcttttttttccaccccatgagggtctcactctcacccaggctggaatgcagtggtgtgattgtagcacactttggccaccaactcctgggctcaagtgatcctcctgctttggcctcctctgagaagctgggattactggtgcacaccaccacacctggctaattttttatttttttttatttttggaaatagggtatggctatgttgccttgggcccgtcatgaactcctagcctcaggtgaccctcccacctcaggcctcccaaagggttgggattacaggagtgagctactgcactgggccaacatgttaatttttttttttttttttttgagatggagtctcccaggcgggaatgcaatggtgcgatctcgacttcactgcaatcttcacctcccgggttcgagcgattctcccacctcagcctcctgagtagctgggattacaggcacctgccatcacgctcggctaatttttgtattttgagcagagatggagtttcaccatgttggccaggtgatctgcactcccactccccccacacttcccaaagtgctgggattacaggcataagccacaagccacctcacccagccaacatgttacatcttaattcttggattttcttcactgcagggctttgggtggagaaataaaactcttcaaatgcatratcttggagatccctgtgaatcaataattctttagacaactgcggctcaaaatccctcctttcccttttccgagttattccatccatcttattagaaaggaagtgaattaggtgtaggtggtctgtaacacctgcacatctttttatacgtgtagagggtatgcctgggatatataggttgtcttcaagcagtagctgctactacagctagagagaggaggagtgccaggaaactgatgacctgagaccaagagtcttgttgatgttctgacttagataaaggttttgatcattttcatgaaataatgcagggaagtcatttctgctgtttctttactactccattcttggaggattagaacaagtcacactgtaattgactaaaacgactttttattttaaaatattgatggtggggttttgcttttttttttttttttttttttgagacgttgtcttgctctttcacccagggtagagtgcagtggcgaaatcttggctcactgcaacctctgcctcccgggttcaagcaattctctgcctcagcctcctgagaagctgggattacagcgcctgccaccatgcctgtctagtttttttgtatttttagtagagacaggggtttcaccaagttggccaggctggtcttgaactcctgacctcgtgatccacccacctcggcctcccaaagtgctgggattacaggcgtgagccaccgtgccgggccagtgtttttaactgtccacacttactaaattttccagtacttcttcctatggttcatgatagtaaacacagaaacatataaggaacattattagagttaccagatgttagctgttgcatatgtgcacattcctagattcaagggtgtttttgccttaaatttaagtgggtcattggttgtcttgggaagatcatggaaaattcgggattttttagaattctgaaccaaaatatgttttgagtgtttcttagtaaatgtgtgatcttccaccttccacattcagactgcggactacacttcataaatgcctttttatttccagttatggattcaactaaatgactgccttgggagcacataattactttgctacctttttccccctttgctgttgtggctcgagtttggttctcacctgagaagatgcattgagcatatgttgttacccagccctggcttaatggtgtcctgtggggtaggggtgggaggacgaggggcacggggccagagcatgtgaatggatcatggttggacagctgtgacctgccagcactgcgggtaagcaaaactacaaaccgttctttcctctgtgacattgaataaaccttaataaaattcataattagcacatactagaaaaaatgtgacttaatctttttgtggggcgacagtattgggtttcattctggctatacagctttgattggatcattaaacaggtcagtcacttccctcaagctttggggtgtggaataaacaccggtgaatttgtggattcacccgtcaacctcccaatatcaacacatttctcacgcctccgcgtcggccacgtgtcagccctcagaagtgggcaggaggaacttttaagcttcccggcagttcccaagagggcctttgagcctggcgccctcttcccggagaggcgttggggcagctcctagcaacgtgcccgccgccggcagaagcccggccccgccaactgccgcgcgcggctccctgggagctgtagttcttcatggcgtccccacctcctctgtgagggcgggtgagtcgaccgccgactgcgactcccaggatgcctcgcgcccgcctttccgcgggaggccagacggctgagggtgccggcagcggctggaagcgggaggccagtcctggccgggctgggcgacccgaatggagccagggccggcgctggtcccagcggccgcacctccgggggcacggcgcgtaacaggaggcttccggggctgagagcgttacaggctgcgctccggggccagataggccgggcgctcagaagggtgacgcattgaggggcgcggagtctcgggacggaggggcgactccggctaggggtcttgcttaggggtggtctcgggatctgtaaaacgcctggcatggagtcggctgaatacatgtggggacggggttactctgtagccctttggccttggcaaaccaagcctagaaaatccccatagtctgagaagcccgtacaggatcgataggagatgccagaagttccttgatgtgttatgggacacatttggacttgtaggtcgtgaagtcgccattgcagagaaaaagaaacaaggccgggcacggtggctcacgcctgtaatcccgacactttgggaggccaaggcgggaggatcacttgaggccaggcgtctgggacgaccctgggcaacatagggagacccccgtctctacaaaaaaaattttaaaatttgccgcacatggtggcgtgtgcctgtggtcccagctgctagggaggctgacattggaggatcgcctgagcccaaggaggtcgaggctgcagtaagctatgagagctgtgatcgtgccactgcactccagcctgggcaacagagcgagaccctgtctggaaaaaaaaaaaagaaagaaggccaggcgtggtggctcacacctgtaatcctagcactttgggaggccgagacgggcagatcacgaggtcaggagttcgagacctcctggccaacagtgaaaccccgtctctactaaaaatacaaaaattaaccgggcatggtggcatgtgcctgtattcccagctactcgggaggctgaggcaggagattcgcttgaacccgggaggctgaggttgtggtgagccaagatcgcaccactgcactccatcctgggcaacagagcaagactccgtctaaaaaaagaaaaaaaagaaaacacatgtattcagggtgggctctgtaggtaagcccagataacccttgcattccaataacaggacaggccaatacttgggacataaagaggacccctctgactcctttcttccaggacatcctgtaggtgggttttggtaaagtggaggagggggagggagacagctaattccgaggaaaatgttctcaatgggtcagatttactgcctatgtaaagggaaatatttccactgtcagtgaaaatcgtgttgctggacgtggtggctcacacctgtaatcccagcactttggaagaccaacgcaggaggattgcttgagccccagagttcaataccaacctgagtaacacagtgagaccccgtctcgaaaaaaaaaattttaaaaagaaaaagaatatcaaagagtaaccagagttcatacctgcttttgtgctaaatgctgcctagaaagtagtcatgggtgttgcctgggaaagggtttcagccttggtgccaggcacccacctcctttctgaaatgagtacttgccacttgctgcatcggctttcagggtaagggatgatggccactgcccttttttcaagtaatctcaaagcctcagaaagcccattaagttatccagagcacgttttttttttttttttttttttggagacagagtctcgcatgttgcccaggctggagtgcagtggggcgatctcggctcactgcaaccttctcctcctaggttcaacctagtctcctgcctcagcctcctgagtagctgagattacaggcatatgccaccatgcccagctaatttttgtatttttagtagaaatggggtttcaccatgttggtcaggctggtcttgaactcctgacctcaaatgatctgcccacctcagcctcccaaagtgctgggataacaggtgtgagccaccgcgcccagcctgagagtactttgctcctcttctgaagtgcatcccctataaggaatttttaatttatggaaatgggctttacctcttgaatgggcaaagtgagagaactttgataacccttggattcatgctgttaaacctacatctttttttttttttgagatggagtcttgctctgttgcccaggctagaatgcatagcatgatctcagctcactgcaacctccgtctagcgggttcaagcgattctcctgcctcagcctgccaagtagctgggattacaggtgcctgccaccacacccagctaattttttgtattttttagtagaggtggggttttaccatgttggccaagctggtcacgaacccctgacctcaggtagtccacctgcctcggcctcccaaagagttttgggattacaggcatgagccatcgcgcccggtctcttttttttttttttttttttttgagatggagtctcactctgttgcctaggttggagtgcagtggcgcggtcttggctcactgcagcttccacctccccggttcaaacgagtctcttgcctcagcctcctgctgcgggattacagatgtacaccaccacacccagctaatttttgtttttagtagagacagggtttcaccatgttggccaggctggtcttgaattcctgacctcaggtgatccccccgccttggcctctgaaagtgctgggattaacaggcgtgagccatggcgcccagccaaagctacatcatttttaagcaaccactttaattttcttcattagggagtatgagcctgatgtgggcagaatccagatgagctggccagtgctgtgaaggagctgagagcacccccgagagccgtgagatggtaggcagagttcagagtaagatgcatggaaagcgaacatgcctcccatcctgcatccccaaagatcttgactgcatgcaacactctgggggctgggcggcaaggaccaggatggagaccctggagaagagtgacaggaggtggcattgataccaaactttcgacgaccaaggtttcttctgagactctgagtgtccagctggaagcgtttttaagtgtctgtcactggtattgaggagtcaggggcacggaatagaagacatttccggtcacatgacatctcggctgggagggtttgcatgtcgtgtctgggaaaggagtgacctgcccgcccattggcacccatcgctggttagcagggctgtttccacgctctgaatgagtccgttctcagaaactataggaacacataaaggacttacatctctaaatgccattggtgctcttgcctctggttacttggcaaaaggcaacgcaattcattctgcattgccaatttccacctgtgttcactgtttggttttcttgatgtgatttgtttttcccattttaggcaccaaaaaccaagaaaggatgtaaaggtgagtggagagatggaacattactcttaagccaaatatatatctttttcccctttggtcctggaacaatgagatgtgtttatttaaatgtttttgggccgggcacggtggctcacacctgtaatcccagcgctttgggaggccgaggtgggtggatcatgaggtcaggagatcgagaccatcctggctaacacgatgaaaccccgtctctgctaaaaatacaaaaaattagccgggcgtggtggcgggtgcctgtagtcccagctactcgggaggctgaggcaggagaatggtgtgaacacaggaggcggagcttgcagtgagccgagatctcaccactgcactccagcctgggcaacagagtgagactccgtctcaaaaaaaaaaaaaatgtttttgatcagtcttgctgttcttcccattattccgtaggcagccttggtcttccttatgttgcctcactggtcctcagagaagttcagacgtaaataagatatgaggttttggaaaaaatcctcctccttgggctctgtatccagaaatatgtggttgggattcagggtgggaaagctggtgtggggaaacgaattcgatattcatacttaggttcccccacatgcctccatcagaaagtggccattgatgaggacatccagaccagttctggggggtcttagatggaagggtacaaggagcctacttgtctgaaagtagcctccatgtgcctagaaatcttgggcactcttcccagcgagctgcactgggctgtgttcagggtctggaagactgatctttggccagtgtgtcatggtaggcaggtagaatataggttctgctgaaaatctgcaccatcatcctttcagatagttgtgtttttttgtttttttttttaagacggagtcttgctctgttgcccggggtagagtgcaatggcgtgatctcaggtcactgcaacctctgcctccca

SEQ ID NO: 96971 - DNA, 43182 bp, Homo sapiens
gtgtcatggcacacacctgtagttctagcaactcgggaggctaaggtgggaagatcgctggagtctgggaggcagaggctgtagtgagccaagattgtgccactgcactccagcctgagcaacagagcaggactcagtctcaaaaaaaaaacaaaaacaaaaacaaaaaacagtatactatttaacatggcaaactctttattagtagttcttctctctcctttccccacaggtccacgaatcttacaagcacctgaagtcactgcagtccaagctctgaagtgtcacaaggacaagtttaatctgcttcagaaagcgcctgtgtgcaactcaaattttgtggaatctttttcgaattcaaatagctatagagcaaatgataaattgacccctttttataaatggagggaaaaaatgaacagatttcagagattaaatgaaaaaaagcagatgttttaagtgcaattaacactgaaagagacctgttaaaccattcagaaaaagcttaagaaatgcgatatgacttccttttgtaatgctgctgatcccagtagactatgacttttgataattagcagaatttaactactgagtagttgattattttcacattttaattgctaatcactggctatataagtgtttttaagcaaaggtatttttgaagtggtgtagaacccttccaagctttcctgctcagtgttctaccagacttaccctggggcctggcttaaaagcaggattgaagaaaagggactgggggaaggaaacttattggaaaacttgatgcgaatgagtttctgcttggcacagtctctgcctgcttgctctcctttgctgatggattgcatttatcaaactattcatgctagcatttttccaacgagggaacttattccgcacgggcctactgtaggaccattgtctcgtgtaattaggaattttccatttgaaggattgctaaattgtcacagtagtaggaagtatagggaaacctctcagctgtggcactgttgtagctttggagtgcagagtgtaactctgggacaatcagatttcacatattctgtcatcttggcataagccattaaaagcttggagattactgtatttggcattaaaaaaaaatgtcacttaggtcagcactcccagacgtagcacagaaaaaccctttgacacaaaccatgtgttctgatttttggttcagaaaatattgaaactgtgagttgttttttttttaacaactgggaaaaaacaaaaacaaaaaactatagttagaaaaatggaagttccataggttctatttcttactctatgtatggctttgttttcagtctatttctaggagctttctctgaatcgctaattgtcctttcagttgaaatctaatttatacaatcattctatacttaaaggttaaatacatcttaattaattttttcttaaagtcaatgtaagtcactttgttttgtttttttttaatctacgccatatgcctcatgaaaccagctgttctagaatcagtcctgagaatatggcttaattccatggaaacataactcctatcttgggacctgacataatatctatctatcctggggaactggtaatatgagacttataggttacagcagaaatgctacatgttgacaaaagccttaatcgttccactgggagaactaattgataattgtgttaagattgaagattaaccctgtgttaatctcacttgagtctatcctgacagtagttcagattctggaaaatgataaactgacctgctagatgtagaattgtttcaaaattagtgttgaaataccttgttcacagatgaatatctgggcaggatctgagggtgtttggaatgacaccccccaatccagttgcatagatgggatgtctttgcaggtttgaggagatcatcgacctgcagagccccctttgacccagtacctcacgttttatttaaaatctaaatctggggccaggcgtggtggctcacgcctgtaatccaagcactttgggaggccgaagcgggtggatcacctgaggtcaggagtttgagaccatcctggccaacatggtgaaaccccgtctctactgaaaaaaatacaaaaattagctgggcatggtggtagcacgcgcctgtagtcccagctactcgggaggctgaggcaggataatcgcttgaacttggcgggtagaggttgcagtgagccaagatggtgccactacactgcagcctgggtggctgagcgagactccgtctcaaaaaaaaaatctaaatctgacatttgatgctatttttattaatattggaatgttctgtcttgaactttattcaatataatcaagaataaagatagagtaaacgtcactgatttgtactattaagagagaaaaaatatgccacacaactaaacataggtttaaattatgaagaaatttagaatagaggtttattagatttagggaacactaagaacaaaaaaggaaggagtgatacctgcctgagtggacagctgtaaatcagctgtaattactgcagttgtaccaatagttgtgagtggctccagtcactttaggagtccttggaagtacttggtacacatttgttggctgtaccttaaaggaagtggcaagtccagtttgttctctctaccacactagactgccactgacaagtttgggtctgttggattcaaaattttgtaagccattttcacaagtacaaagatacattttaaccttgtcttctccaaaattactgagtaggaattttatttttatctttttgagacagggtatcactgtcacccagactggagtgcagtggtgggatcttggcttactgtgacctctgcctcccgggttcaaatggtcctccctcctcagtctcctgagtagctgggacgacaggcacgtgccaccatgcccagctaatttgttctattttttctgtagagacggggttttgccatgttgcccaggctggtctcagactcctgggctcaagcgatcatttcgcctcagcctcccaaagtgctgagattataggtgtgagccacagcatctggcccagagtgaggagaattaatgagattttttgtgtgtgttagataatattgatttaagcctttttttaaaaagtactctcaaccaaatacaaaattgaaaatgtgaggtttaatagaaatgtgttggctatttgcaatggattttcttcttgcccaagtgtttggagttctactttatgctctgtatttaaaaattagtgacctcaaagcagagttgatgacacaggctttggggccctcatgttcttgtctttagaacatatcactactaagtatcagcttatcttcagaacattacaacattcaccgtgttcatatgctttctgagaagtcaccacttgtaatttcagatcacatacacctgaaggcattttatagttcctaaagttaacatgttagatcttttttttccaccccatgagggtctcactctcacccaggctggaatgcagtggtgtgattgtagcacactttggccaccaactcctgggctcaagtgatcctcctgctttggcctcctctgagaagctgggattactggtgcacaccaccacacctggctaattttttatttttttttatttttggaaatagggtatggctatgttgccttgggcccgtcatgaactcctagcctcaggtgaccctcccacctcaggcctcccaaagggttgggattacaggagtgagctactgcactgggccaacatgttaatttttttttttttttttttgagatggagtctcccaggcgggaatgcaatggtgcgatctcgacttcactgcaatcttcacctcccgggttcgagcgattctcccacctcagcctcctgagtagctgggattacaggcacctgccatcacgctcggctaatttttgtattttgagcagagatggagtttcaccatgttggccaggtgatctgcactcccactccccccacacttcccaaagtgctgggattacaggcataagccacaagccacctcacccagccaacatgttacatcttaattcttggattttcttcactgcagggctttgggtggagaaataaaactcttcaaatgcatgatcttggagatccctgtgaatcaataattctttagacaactgcggctcaaaatccctcctttcccttttccgagttattccatccatcttattagaaaggaagtgaattaggtgtaggtggtctgtaacacctgcacatctttttatacgtgtagagggtatgcctgggatatataggttgtcttcaagcagtagctgctactacagctagagagaggaggagtgccaggaaactgatgacctgagaccaagagtcttgttgatgttctgacttagataaaggttttgatcattttcatgaaataatgcagggaagtcatttctgctgtttctttactactccattcttggaggattagaacaagtcacactgtaattgactaaaacgactttttattttaaaatattgatggtggggttttgcttttttttttttttttttttttgagacgttgtcttgctctttcacccagggtagagtgcagtggcgaaatcttggctcactgcaacctctgcctcccgggttcaagcaattctctgcctcagcctcctgagaagctgggattacagcgcctgccaccatgcctgtctagtttttttgtatttttagtagagacaggggtttcaccaagttggccaggctggtcttgaactcctgacctcgtgatccacccacctcggcctcccaaagtgctgggattacaggcgtgagccaccgtgccgggccagtgtttttaactgtccacacttactaaattttccagtacttcttcctatggttcatgatagtaaacacagaaacatataaggaacattattagagttaccagatgttagctgttgcatatgtgcacattcctagattcaagggtgtttttgccttaaatttaagtgggtcattggttgtcttgggaagatcatggaaaattcgggattttttagaattctgaaccaaaatatgttttgagtgtttcttagtaaatgtgtgatcttccaccttccacattcagactgcggactacacttcataaatgcctttttatttccagttatggattcaactaaatgactgccttgggagcacataattactttgctacctttttccccctttgctgttgtggctcgagtttggttctcacctgagaagatgcattgagcatatgttgttacccagccctggcttaatggtgtcctgtggggtaggggtgggaggacgaggggcacggggccagagcatgtgaatggatcatggttggacagctgtgacctgccagcactgcgggtaagcaaaactacaaaccgttctttcctctgtgacattgaataaaccttaataaaattcataattagcacatactagaaaaaatgtgacttaatctttttgtggggcgacagtattgggtttcattctggctatacagctttgattggatcattaaacaggtcagtcacttccctcaagctttggggtgtggaataaacaccggtgaatttgtggattcacccgtcaacctcccaatatcaacacatttctcacgcctccgcgtcggccacgtgtcagccctcagaagtgggcaggaggaacttttaagcttcccggcagttcccaagagggcctttgagcctggcgccctcttcccggagaggcgttggggcagctcctagcaacgtgcccgccgccggcagaagcccggccccgccaactgccgcgcgcggctccctgggagctgtagttcttcatggcgtccccacctcctctgtgagggcgggtgagtcgaccgccgactgcgactcccaggatgcctcgcgcccgcctttccgcgggaggccagacggctgagggtgccggcagcggctggaagcgggaggccagtcctggccgggctgggcgacccgaatggagccagggccggcgctggtcccagcggccgcacctccgggggcacggcgcgtaacrggaggcttccggggctgagagcgttacaggctgcgctccggggccagataggccgggcgctcagaagggtgacgcattgaggggcgcggagtctcgggacggaggggcgactccggctaggggtcttgcttaggggtggtctcgggatctgtaaaacgcctggcatggagtcggctgaatacatgtggggacggggttactctgtagccctttggccttggcaaaccaagcctagaaaatccccatagtctgagaagcccgtacaggatcgataggagatgccagaagttccttgatgtgttatgggacacatttggacttgtaggtcgtgaagtcgccattgsagagaaaaagaaacaaggccgggcacggtggctcacgcctgtaatcccgacactttgggaggccaaggcgggaggatcacttraggccaggcgtctgggacgaccctgggcaacatagggagacccccgtctctacaaaaaaaattttaaaatttgccgcacatggtggcgtgtgcctgtggtcccagctgctagggaggctgacattggaggatcgcctgagcccaaggaggtcgaggctgcagtaagctatgagagctgtgatcgtgccactgcactccagcctgggcaacagagcgagaccctgtctggaaaaaaaaaaaagaaagaaggccaggcgtggtggctcacacctgtaatcctagcactttgggaggccgagacgggcagatcacgaggtcaggagttcgagacctcctggccaacagtgaaaccccgtctctactaaaaatacaaaaattaaccgggcatggtggcatgtgcctgtattcccagctactcgggaggctgaggcaggagattcgcttgaacccgggaggctgaggttgtggtgagccaagatcgcaccactgcactccatcctgggcaacagagcaagactccgtctaaaaaaagaaaaaaaagaaaacacatgtattcagggtgggctctgtaggtaagcccagataacccttgcattccaataacaggacaggccaatacttgggacataaagaggacccctctgactcctttcttccaggacatcctgtaggtgggttttggtaaagtggaggagggggagggagacagctaattccgaggaaaatgttctcaatgggtcagatttactgcctatgtaaagggaaatatttccactgtcagtgaaaatcgtgttgctggacgtggtggctcacacctgtaatcccagcactttggaagaccaacgcaggaggattgcttgagccccagagttcaataccaacctgagtaacacagtgagaccccgtctcgaaaaaaaaaattttaaaaagaaaaagaatatcaaagagtaaccagagttcatacctgcttttgtgctaaatgctgcctagaaagtagtcatgggtgttgcctgggaaagggtttcagccttggtgccaggcacccacctcctttctgaaatgagtacttgccacttgctgcatcggctttcagggtaagggatgatggccactgcccttttttcaagtaatctcaaagcctcagaaagcccattaagttatccagagcacgttttttttttttttttttttttggagacagagtctcgcatgttgcccaggctggagtgcagtggggcgatctcggctcactgcaaccttctcctcctaggttcaacctagtctcctgcctcagcctcctgagtagctgagattacaggcatatgccaccatgcccagctaatttttgtatttttagtagaaatggggtttcaccatgttggtcaggctggtcttgaactcctgacctcaaatgatctgcccacctcagcctcccaaagtgctgggataacaggtgtgagccaccgcgcccagcctgagagtactttgctcctcttctgaagtgcatcccctataaggaatttttaatttatggaaatgggctttacctcttgaatgggcaaagtgagagaactttgataacccttggattcatgctgttaaacctacatctttttttttttttgagatggagtcttgctctgttgcccaggctagaatgcatagcatgatctcagctcactgcaacctccgtctagcgggttcaagcgattctcctgcctcagcctgccaagtagctgggattacaggtgcctgccaccacacccagctaattttttgtattttttagtagaggtggggttttaccatgttggccaagctggtcacgaacccctgacctcaggtagtccacctgcctcggcctcccaaagagttttgggattacaggcatgagccatcgcgcccggtctcttttttttttttttttttttttgagatggagtctcactctgttgcctaggttggagtgcagtggcgcggtcttggctcactgcagcttccacctccccggttcaaacgagtctcttgcctcagcctcctgctgcgggattacagatgtacaccaccacacccagctaatttttgtttttagtagagacagggtttcaccatgttggccaggctggtcttgaattcctgacctcaggtgatccccccgccttggcctctgaaagtgctgggattaacaggcgtgagccatggcgcccagccaaagctacatcatttttaagcaaccactttaattttcttcattagggagtatgagcctgatgtgggcagaatccagatgagctggccagtgctgtgaaggagctgagagcacccccgagagccgtgagatggtaggcagagttcagagtaagatgcatggaaagcgaacatgcctcccatcctgcatccccaaagatcttgactgcatgcaacactctgggggctgggyggcaaggaccaggatggagaccctggagaagagtgacaggaggtggcattgataccaaactttcgacgaccaaggtttcttctgagactctgagtgtccagctggaagcgtttttaagtgtctgtcactggtattgaggagtcaggggcacggaatagaagacatttccggtcacatgacatctcggctgggagggtttgcatgtcgtgtctgggaaaggagtgacctgcccgcccattggcacccatcgctggttagcagggctgtttccacgctctgaatgagtccgttctcagaaactataggaacacataaaggacttacatctctaaatgccattggtgctcttgcctctggttacttggcaaaaggcaacgcaattcattctgcattgccaatttccacctgtgttcactgtttggttttcttgatgtgatttgtttttcccattttaggcaccaaaaaccaagaaaggatgtaaaggtgagtggagagatggaacattactcttaagccaaatatatatctttttcccctttggtcctggaacaatgagatgtgtttatttaaatgtttttgggccgggcacggtggctcacacctgtaatcccagcgctttgggaggccgaggtgggtggatcatgaggtcaggagatcgagaccatcctggctaacacgatgaaaccccgtctctgctaaaaatacaaaaaattagccgggcgtggtggcgggtgcctgtagtcccagctactcgggaggctgaggcaggagaatggtgtgaacacaggaggcggagcttgcagtgagccgagatctcaccactgcactccagcctgggcaacagagtgagactccgtctcaaaaaaaaaaaaaatgtttttgatcagtcttgctgttcttcccattattccgtaggcagccttggtcttccttatgttgcctcactggtcctcagagaagttcagacgtaaataagatatgaggttttggaaaaaatcctcctccttgggctctgtatccagaaatatgtggttgggattcagggtgggaaagctggtgtggggaaacgaattcgatattcatacttaggttcccccacatgcctccatcagaaagtggccattgatgaggacatccagaccagttctggggggtcttagatggaagggtacaaggagcctacttgtctgaaagtagcctccatgtgcctagaaatcttgggcactcttcccagcgagctgcactgggctgtgttcagggtctggaagactgatctttggccagtgtgtcatggtaggcaggtagaatataggttctgctgaaaatctgcaccatcatcctttcagatagttgtgtttttttgtttttttttttaagacggagtcttgctctgttgcccggggtagagtgcaatggcgtgatctcaggtcactgcaacctctgcctcccagtttcaagcaattcttctgcctcagcctcyccagtaattgggattacaggcatgtgtcaccatgcccggctaatttttgttttggttttgtttgtttgtttgtttttgagacggcgtcttgctctgtcacccaggctggaatgcagtggcgcgatctcggctcactgcaacctctgcctcccaggttcaagcaattctcctgcctcatcctctccagtagctgggattacaagcatgcgccaccaggcccagctaattttggggggggtctttttgttgttttttgagacggcgtatcgctctgtcgcccaggctggagtgcagtggtgcgatctcggctcactacaaactctgccacccgggttcaagtgattcttctgcctcagcctcccgagtacctgggactacaggcacatgccaccacacctggctaattttttgtatttttagtagagacagggtttcactgtgttagccaggctggtctcgaactcctgacttcaggtgatccacccgccttggcctcccaaagtgctgggattgcaggtgtgagccaccgcgcccagccattttttttgtatttttagtaaagacagggttttgccatgttggtcaggctggtctcgaactcctgacttcaggtgatccacccgcctcggcctcccaaagtgctgggattgcaggtgtgagccactgcgcccagcctgagatagttatttaaatttctgcctcggggtatttcaacaaggctttgtgacttgttgccagaaacttgtaaaacatctcgtggccaatgaaaggagagctaagcctaagtcccaacatctgaaaggtctgacgccttctggcgagtctcaagccttgatgtttataagggccactcttctttcctcctgaagtcatgacagtcccttttctgttccaggctccattgatgattttcttggtgaccttctaggggatgatagtaagtgtgccttgcccagaatcccctaatttgggctgctgctgttgcttttttttcttactatgttgcccaggctggtcccaagcttctggactgaaatgatcctcccgcctcctaaaccaaagtgctgggattacaggcataagccactacacccggccttttttaaaaattgagatatatgcgcctgtaatcccagcactctgggaggaggaggagggccaatcacaaggtcaggagttcaagaccagcctgaccaacatggcgaaaccccatctctactaaaaatacaaaaaaaaattagctgggcatagtggcgggcgcctgtaatcccacctacttggaaagctgaggcaggagaatcacttgaacccaggaggcggaggttgcagtgagccaacgttgcaccactgcgctccagcctgtgcgacagagcgagactccgtctcaaaaaaaaaaaaaaaatgagatgtaatttatatagcataaagtccactcctgtaaagtgtacaactcagtggtttttgaatattcaaaagttgtacaaccatcaacattacctaattccggaacattttccatcaccccttaaagaaaccccatgcccattagtagtcaatttcattctctcctccctccaaccttaggcaagcacttattatttactctctgtctctatggatttgcctattgtggacactttacataaaatggaatcacacagcatcttacctttttttttttttttttttgagacagagtttcactcttgttgcccaggctggagtgcaatggcgcaatctcggctcaccgcaacctccacctcccaggttcaagcaattctcctgcctcagcctcctgagtagctgggattacaggcgctcgccaccacgcccagctaattttgtatttttagtagagatgggggtttctccacgttggtcagtctggtctcgaactcccaacctcaggtgatccacccatcttggcctcccaaagtgctgggattacaggtattgagccaccgcgcccggccagcatcttacctttacatctagctttttttttttttttttgagacagagtctcactgtgtcacccaggctggagtgcagtggcaccatctcggctctgcctctgcctcctgagttcaagcgattctcgtgcctcagcttcccaagtagctggggttacaggcatgcaccaccacaaccagctactttttgtatttttagtagagatgggttttcgccatgttggccaggctgatcttgaactcctggcctcaaacacctgcctcagcctcccaaagtgttgggattacaggcatgagctaccatgcctagcacacgtagcttctctgatgtagcataatattttccaagtttatccacactgtggcatgaatcagtactttaacttttttatggctagataatgttccattgtgtagataaatcacattttgtttaatcccttcatcagttgatggatatctgagatatttccacatttcggctgttatgaataatgctgttatgaacgttcgtgtactagtttttgggcggacatgtgttttcagttcatttggaattcctggaccatatggtaactgtatgtttaactttttgaggagactgcttttccacagcagctgtgccattttacatcccaccaacagtgtaagatggctctagttcctctacatccttgctaatacttgttttccttctttttgatgattgccatcctagagggtgtaaagtgggtatctcattgtagttttgatgtgcatttccctaatgactaatgatgttcagcatcttttcatgtgtttattggccacgtgtatatctttggagaaatgtctgttcagatcctttgcccctttttaattgggttacttgtctttttatcgttgagttaaaagagttccttgtagattctggatgctaatccatattatttgtgttcgtgttggtctattaaggaacctggcttcatggtcatgtaaagctcaccagggacagagagacttaggtttcccctacatggccccagagaacccacaaagctcctgtcacccaggctggagtgcagtggcgcaatttcagctcactgcaatctccgtctcccggttcaagcrattctcctgcctcagcctactgagtagctgggatggattacaggcacccaccaccacgcctggctaatgtattccagcccatgtattccagcctacagttttgggctgtggaaaagcaattgttcctcatgcatttccttggggtgcattgagttgggttgggttgggttgggctcttcatttggtatttggcatttagggttgacttcctccttggaaatgtaccaccctctctcccattcaggttttccaaggggtgacattgggacctgcctatttggccagatttcttcctcctaatacagagacagcttgggaagggagcttgccagcctttgcatcttgactccaggtacctttagttaaatgacacgttttctcttttctttttttccagtgacactacctgagaagcctgttaaactagcttcacataccagagacaccacaggtgtatctcagatgttcccttcttcaaaggcgagaacaaagtaagggcagggtccgactgggtatccatgacctacttcagtctaaatgctctctgcccctccaccccccactttctacttcacatttgctcgccattttttttttttttttttttagagaatatttgttgccgaggctggagtgcagtggcaccatctcggctcactgcaacctccaccaccccggttcaagcaattctcctgtctcagcctcccaagtagctgggactacaggtgcccaccaccacacctggctaatttttgtatttttagtagagacaaggtttcaccatattggtcaggctggtctcaaactgacctcaggtgatccgcccacctcggcctcccaaagtgctgggattacaggcgtgaggcaccatgcccggcccacccggctaattttggtatttttagtgaagacaattttaccacattgcccaggctggtcttgaactcctgggctgaagcgatccactcagtctcccaaagtgctgggattacaggtgtgagtcactcgcacctggccgtgctcacttctaatgtcagttaatttccacccacttccctcagctcctggttttgtttatttatttatttatttttattttctctctttttttgagatggagtctcactctgtcacccaggctggagtgcagtggtgcgatcggctcactctaacctctgcctcccaggttccagcagttctcctgcctcagcctcccacgcagttgggattacaggcacacaccaccacgtctggctactttgttattagtggagatggggtttcaccatgttgaccaggctggtctcgaactcctgatctcaggtgatctgcccaccttggcctcccaaagtgctgttattacaggcgtgcgccaccgcgcctggccagctcctggttttattgaaggagcctggggaagttaaagagaactgcacaaaaggtcagcagtcctggcttctatcctctatctgttacttatgatatgaccttgggcagtttctgaacttctctgagccctcattttcttatcctcagaattaaaggattggcctagatcagtgattttcaaattgtgtttgttcttctaagataagaatgaataccccacagatgagagatagggaggaattttctgagccctcctccctcttgtgatctggagcagttgtttttcttacttttttttttttactttattttttgagacagagtcttgctctgtcgcccaggctggagtgcagtggcgcaatgtcagctcattgcagcctccacctcccggttcaagtgattctcctgcctcagcctcctgagtagctgggattacaggtgcccgccaccacgcctggctaatttttgtatttttagtagagatggggtttcaccatgttggccaggttggtcccaaactcctgacctcaagtgatccacctgcctcggcctcccaaagtgctgggattacaggcatgagcccccacacccagccctatggtttttaacaatttgtttttgaagcagttctactgctaacaaagttgaaaatcactgcatcaggtggcctgtgacattccttttagcacctctgttctccggagagacctatccgagattccttgggctttctaagctactcctcccctttttagagtcatccagtgccctgggatgcaggtaggggctgacgcctcccctttgcaggtccctcctgggtgatgatgtcttcagcaccatggcaggcctggaagaagctgatgctgaggtgagcctggctgtttccctccacctccctacttatccccagaaacactgagatgggtgttgtggccaaggggctgcccacggaagggtttagaagtccctgcaaagtcactttgttctttttgtttgttttttgagatggagtctccctctgttgctcaggctagagtgcagtggtgtgatctcggctcactgcaacctctgcctcccggggtcaagcaattctcctgcctcagcctcccaagtagctgggcttacaggtgcctgccaccatgactggctaatttttgttgttgttgtttttgttttgagatggagtctccctctgtcgcccaggctggaatgcagtagtgcgatcttggctcactgcaatctccgcctcctggttcaagcgattctcctgcctcagcctcttgagtagctgggattacaggcacccaccaccacgcctggctgatttttgtatttttagtagagatggggtttcaccctgttggtcaggctggtctcaaactcctaacctcttgatccacccacatcggcctctcaaagtactgtgattacaggctgacccaccgtgcccagccaaagaaaataatttttgtatttttagtaggtaattttgtatttttagtagagacggggtttcaccacattggccaggctggcctcaaactcctgacctcaagtgatctacccgcctcggcctcccaaagtgctgggattacaggcgtgagccactgtaaataatgcccaagggctgccgagtggacccaaagcagaatcctctttcctgtagtaagatgagtggaaaggagagctccctgaaactgctagagtcttagatgttgctcctttccccttataaactccatagctgtccattggcatgrgtgggaagtagcagaatttcagtcctggatggaagagttctctatggttggaaggagtaggaatggcagtgctctctgagtctctaaaaccaggcaggtttggcttcaaacaactgccaagcccaagcaaggggaacaaagccaccctcctktgtaagctccattggccaagctctgctcctgccgygccgtctgccctaacagaagcaaggggccaggaccctgagttttaytgggccttgactaatgtgcctcctcatctgtgtcctcaccctcattgtggacttaggtttcagktatctcagaggcagacccacaggctctgctccaggccatgaaggtaaggaaacagcttgcacgattcttagaactgggggtgggtggggtggggtcatgatattttgtaccaaagcttcattctccttctaatttctccctttacaacctgtgtttctgagcccttcctcgtgcaagcatggaactcgtctgtgagccgttggcctccttgcctttctgagtatcaaccagtgttcctggtatatagagagtggagagtgccacaggcctctggggaaacggggccagctctactcggaggcccacctagctgggtcccctcacctccacctagaagacagagggggagactctttcctctaatgcttgttcttaatctttctccatatttctctccacatcccctgccaagcccccttcaatactgctgtcttctcatcagatcaagcccagcgccaatctttgcaatggatttttaaggcacagattctgaataatttgtaaggacataatctctagcttggcctaagacaccttgttctccctctccttccagccagcagcaccttcctgtctgacccttggggttttgtgtcccttttagttaacccattttgccacagtccctaggacaaagccgcgtttttggttacagccctgtggggctcttgtttttgttgtgtatttttgttttttgggtttttttttagagacaccatcgcattctrtcacccaggctggagtgcagtggtgtgatctcattgcaaccttaaactcctggccttargcgattctcttaccttggcctcccaaaatactgtaattacaggcatgaggcaccacacccggtccagattcagcttctttaatctcatcttgaaatctttctcctcaaaggccaggcacctgtratcccagaactttgggaggccgaggcagtaggctcgcttgagcctrggagttggaggctgcartgagctatgatcacaccactgcactacagcctgggtggtgacagagtgagactctgtcttcaaaaaaaaaaaaaaagtctggcatggtggcttactcctgtaatgccagcactttgggaggccatggcaggtggatcacttgagctcagaagttggaggctgcaatgagctatgatcgcaccacttcactccagcctgggtgacagagtgagactctgtctttattttattttatttttaatttatttttatttttttgagacggagtcttgctctgttgcctaggctggagtgcagtggcatgatctcggctcactgcaacctccacctcccaggttcaagcgattctcctacctcagcctcccaagtagctgggattacaggcgtgcaccaccacacccaactaatttttgtattttttgtagagacagggtttcatcatgttggccaggatggtctcgatttcttgacctggtgatccacctgcctcggcccaaagtgctgggattctaggcatgagccaccgcgcccggccaatatcctgtctaaaaaaagaaaaaaaagaaagcttttttcccgagaccagccacctaggatccctgggcataacccacaagtcctctgactcaatttttggtgctgactttgagtctctcatcccagaaccatgagctggactccattccacctccccctgcttacctttagttccattttctttcttcactcactgtttttctcaacagttttctcattttcctttgttttctcacaattctacacctggggtgccaacagcccatctctctcaggtggaagtcctcagccccttatcagacatagtcctctgccctccctccctggttttctaggacctggacggcatggatgctgatatcttaggtctgaagaaatctaattcagcccctagcaaaaaagctgcaaaggaccctgggaaaggagagstgcccaaccaccccaagcctgcaggtgggtcagtagccagtgagaaaggtgcatgggagacggctcctcgcatctgctagggagactttgaggaygtggaagatgctagtaggaarcgttcatgtccttgggttttctctgcacaggatggagaggccaaggagcatttgtgcgtgtgtgtgtttgagtgtgtgtggtggggtaaggggacagcttgagtttcctcccttcctcgagctgttccaggccctctgggtccaacatgggcagctcctggagaagctgtgtgagttaaaatggagaactctatggcagcctgtgcctctcctgaacccatgtctctggagtgactcatgatgaggaagcagaggtagctcctacctcgtttccctgccagaagcccatggcagaactggagactcctcccttggctgtgcccatggccatgagcccccagcttcccaggaagaagtgcaccccatcccaggggccccagtccatgatatgggaggaggactttggccaggagagactcaggcccatgaccttgtcttctgcttcctgcagggggtgccattcccaccaagaagtcacttccgtctcccagcagctctgggcatcagaacaggaggttttcctctgaaggtaccataggctcctgtcatgcctctgggacactctggtttgggagtggagcagcctaggcatgcttgctggcccgaggcccagctgctgcctatgtcacatgggtgccactggtttacttcctcgtgaattcatgtcgggaccagctatattgtattggctgagatattagggaacttatttgcaaagaccttaaagccaggcatcaaactgaagatcttcccaagtataggaaggagcccctttcccgtcatgaatgtgtggatattttacttctcttctgatgcttgagggacatttccagaaggccatgcagcctgcagagtcagaggccccaccggcaagcctgaggcaggccccgtaggtccagggccgccctccaactccctctctccttgcccggcctgtctttttgtggagtccccgttgccccaggccccaccctccagatgccagggggcttgtttatgtactggagcagctagaagccttgactcgagcgctgctccccagttcaggcttgcttttcctcaactaagtgctgcagtctgacctgtgctttcccttctgctgtgagacttggaagacccattgrgaggacttctctcctatgatgaaggaggaatcaccaagcagccgcctgtgacacagagtaaaacagcttctgacaagagccccagcacagtgagagatcaaggtagggtggagtgggctcatttcccatcctggaggaagagtttattggcaacaagctaaccagcctttctggtgcagaaccagaggcctctcccaggtggggaccagaggtctaaggtccagtacaaagagatcatcagcctttaggaataggaaggtaggacgtgtgagtctgggagtaggctggaggaattgggtcccgtggacagaccaggcaggtctaaagcctgtcgtcctacccaaaggtgcagagaaaccacccccaaccccattcagatatcacagttgagggcaagaaggctgcaggcattgggccttgttttgtctttcaggtccctctattcctctaactcctggggacacccccatccgaaaaaaagaagaattgttgtttgatgatggggatgacatcatggccaccttggggtttggagacagccccaaagcagagaagaggcagataggagaccagtaaggatccctgagtaggccaggctgctgcctcaggttcagggaaaagctggtggacgggtactgtgggattcccgagagcccctcatacctacacgttcctgccgtgtgtcccgtcctgcagggaagggcctcgccctgctcgctccacgctggatgagctgctgggtcgaggcatggccaccaaactcctggcccgcccgggcaccggggagcacagggagttcaagctagacaagaagtaccagaggccacagggtaaggaggcttgcgggggccgcaacaggacgggagggaggcctctagatcaggctttcatcacaacctataatgagaaatcagcctcacatcctgatacacacatgtgattatacacgtctatagmtgagacaaaataatacttaccgtgaaataatacttaccgtgaccactgttcrtgctcagttgtctatgattgagatgctgtttgatttggaaacacactggctgtgacacattaagctggtttctcagccctctcatgggtagcagctcgcatttgaaaagcactgctctggacatgtttctcaaagcatcagcccacaagctgtctgctgagaatcattcttgtgacacatgccgctcgctggacctgacctcgagggatcctggggcagggtctggctactgcaaggccactgcatcttcctggccagtgcctgaggtgctcccttcacagcagcttccctctgcttgtcttacacaacaagctaccaaattcagcttttgttagaattttgcagccgcaaatgarcttggttcccctactccagatcacggtcacaggctccttaattcacagacagtgaagatatgtggggtgacgaggacttcacctttggagcctatcagcccactgtggtctcctctgagggccggcagtcccgccggcagtctgtcaggtaagtggggcctgcaggaggcttggcctcttgagacaggtcggccactgggaagacaggcccctgcagctgtcccctgtcccacccgagagtctcatgtgggaggccacagggtacaaggccctcagctctgcaggtgctgaaggaagcrggagatggcctggtcccgccagcccagacagagtggaggagatggccccagtgggaacccccatcccagacgctgctcaggttcgccagtgccccacccagcctcagaaggaaaggggcaggtgggcctgcctccacctaaagcccctgaaatcataaaaggctgtgatgtcgctcggtctccccaaggaacatacttcctgatgggtagcaagaccactggcatctgcggtggcttcttagaccccgcttcccaggaactctgctgtcgaacctgccgtgacaattctgacagcgtgatcctctcagtttacaaaaaaaaaaattaaatcagtgataggattttctgagtttggagttcttttgccagtatatattttaaactttgtattttgaagtaatttcaaacttcaaaagtcggctgggtatggtggctcatgcctgtaatctcagcagtttgggagaccaaggcaggtggatcacctgaggtcaggagttcaagaccagcctggccaacatggtgaaaccccgtctctgctgaaaatacaaaaattagctgggcgtggtggtgggcgcctgtgattccagctactcgggaggctgaggcaggagaatagcttgaatcctagaggcggaagttgtggtgagctgagattgcaccactcactgcactccagcctgggcaatagagcgagactccgtctcaaaaaaaaacttcagaagttgtaagaacagcaccaggagcccctctcatcctttcccaggttcagcagttgttcccatttgccaggttggcttcttcatcctctttctatctgaatagctctaagcacatcggcattacttcccatacccagtacgttcttaaccctgggaacctgctgccactggtcagtgacagatgaaggccacggccgaacaaatgaagtaactgttgttggaaaacctggaaaccacttgatccaacttattattattttttttagacagagtctcactctgtcgcccaggctggagtgcagtggcatgatctcggcttaccacaacctctgcctcccgggttcaagcaattctcatgcctcagcctcccaagtagctgggattacaggcgcccaccaccacacctgactaatttttttgtgtttttagtagagatggggtttcacatgttggccaggctggtcttgaactcctggccttaagcgatctgcccaccctggcctcccaaagatctgggattacagacatgagccaccgtgctcggcctgatttttctttagacctgtgtgcccatggctgtcatttgatcctgttcctgttctctgtgggtagaactgtccctggttcatgtgatggaagtcaaggtctctgtacttcgtggtgttctacagacagcacgtggcctgccacctgagccggtccaggagccactgctcactgggcctcagctgactgtgcagggtccctgggcatcgtgacgcccagctgcaggctgctagggggccactgggactggctgtttcccctgcctgacaccctcctttctgtcttgaagtaggttcttcgcagacagtggcgcagaccccaagggagaaccaggctccaaacagagccctccaatggcttccagccccatccagcccaggaagggaggagctgactggttgggcctcaaggacgaggacttggacctgttccctgcctcacccaccagagaggcccatcgggaaagttcagtgyctgtcacgccctcagtrcctcctcctgcgagccagcactccacrccagctgggctgcccccctccagggcaaagccaccaactgaaggtgcagggtcccctgccaaagccagccaggcttccaagctgcgagcctccaaggaggagaaagaggactggctgagccatgccctgtctcggaagaagtcccaaggcctggccagagagcagcatgctgggacctctgagggcctgcatttggcggggacagcggkccatcccccttctggcaggtactgacttaggctgctgtggctagtagggggaggactggctggggacttgaggagcccctttgccccttcacctgttgcagcctcagtcagcagttggggaacaaggcagggygccgtggccacagaggccgcttcttggctttgctactctgccttttaggcactgcagagagagcctctggctcccaggcttgccccagggacatacccaagaaggagggctgttgacattcatgccctgaccgccatggggacaggtgctaacttgatcgaggagaagacagagggtccctgaggtggcagacacaccgctgccctgtcacagcgccctcaggctggaagccccggcatccaaacagccggtgcttctgccgactccactgaagcgagtatggcgtgtgtgagctgagatgtccctgtgctctttgagagtgttagaggagacatagtggccgagaggcgcctcttggagaagcccttatccgtggggcaggatagcgagtgacctctgaaggcaggaaggcacaaggggccagcaggctgggggagtccagaggaagtggtgagatgtgctgtggccagagcccaggggagtgaactgggcaatttgtgacagcccagggacatcaccctgtcctggggttgatgacaggagggcagttttgactttgacctgaggccgaggggaaagctcaggccaaaacagaaaagagcctgtctcttcactgacccgtgagccgagaaagaggtggaaataatgggaaagggagccagccagatttggtagactgagcagaatcctaatctagagctgagccaagttaagtggactggaacagggctctgaacttgaacttgactccagtgtctataacatttccgttgtcactgcttggacagtgtccattcactgcaccactgtggacattgaggcaggaagggggtactggaagggaagagatgcccagaaatcccaggagctcagacgtgggaggagaaygccccaagacgggatggtggaagcaggaggaaggggggccacgagcttcacgtgtgaagcccgtcctgggccctgtcttcatccagcctgacctgggccttctgtcaccttcaccttgaacgctgcctttcctcagccaacctctcaccagcacacaagggcttgagcacgcagctgctggagggagttctrgaacaactgcacgagaaagaccgtgtgtcaggcctggtgtctcggggtaggcctgggctgcgggctgagtgggaatgagagcatggtgggcagcacaggcctctgtcctgagagagggacacagaggctgttcaccctgcccctgccccgtccccgtgtcccacacagaggctgcccaccctgctccgtccctgtgccctacacagaggctgcccaccctgccccatccccgtgtcccacctagaggctgcccaccctgccccgtccccgtgtcccagcagaggctgcccaccctgccccatccccgtgtcccacgtagaggctgcccaccctgccccgtccccatgtcccacctagaggctgcccaccctgccccgtccccgtgtcccacacagaggctgctcaccatgccccatccctgtgtcctcaggtcccctgtgactcagaaccatgccgcctcagcactccctacaggttccccaaagaggggaacagcccctggagacctctcagccactggtttgttttttgtttgctgcttcatttgggagtttaaccctgggtgaggaagaggtgctttgagcttcctttggggtccctgggacatgagttacaccagcccctcctggacactcgcaggcccagwgccctgggcctcctgttcatttctctgttgttgatgtttcagagcctgccacgtgtttcccgagcacccagaaacccacagagccttccgtgcccgtccaggtaggggtgtgggcagacaggtctagctcagggcctagggagcaattctccatgcccaggggcaatacccacagtttgacctgacgacctgccaggaaaaatgtgtcaaacataccaaatgtgacgtcagccagctccccgggcaccccccactagaacttgcctgaatttctagcctcgctgctcctgggcagagctgggtgttaatttgcctacatcagtggggagtttaaggaggcagccaggccggggagctgggatgctgcagtcagaaagcagggccgcagggtcctgttctgtcaagaaagcctcctccacccttgccatcctcccaccacacctctgcctctgtttcccatgtgtggcagtcacctgtgacacctgggcctgggaggtgtgccccccccccccccaggagtgtgtccctgggagatggtgggtaggggacagctcgtgggaaccagattagtgtcaacatgtgggcttcaggcctgacaggaaaagccagcatcagcttttgtcatagcgaagactctgctggggttcagccatttgtctgggaagccggagaccatgctggggaggaagctgttccggagggtggagggagacatgctcctgaccagatctgcaaggggaggtacactggggactgcttagccgcagtgactgttactttccaaggccttggccccatctgcagccacagatcagatgcagggaggtccagtgagcagtgggccaggaggtagctgatctcagctgggcccctgtcccctccctaactagaaacacctctcttcctctcctccagcccctgctcccagagtccctggcccggagcctgctgccgagcacagaataccagaagcagctcctggcagcacaggtgcaacttcagwgcagccccgctgagctccaggccgagctgctgcatagccaggcccggctggcagagctggaggcccaggtgaggggcagcggggccgttggtgctggtggcagggttgcgacaggaggggacactgagagtggctggaagcttccccaggagggaggaagggctgttggcacagggcagcgtggagtacagccacctcccctccctggttgctggccctcctgctgtctcccaggtgcggaagctggagctagaacgggcccagcatgagctgctgctggggagtctgcagcagcagcaccaggcagacctggagctcatcgagagtgcacacaggtaccctggcgctggccccagctctgccttggatctcacactgaccccaaaggccacccagtgtgcctggagaggcctttaggcggcagccctctgccttccttgcgccatggctgggtgttctgttggcagaagccgcatcaaggtgctagaaacatcgtaccagcaacgggaggagcggctccggagagagaacgaagagctgtcagctcggtatctgtcgcagtgccaggargccgaacaggcccgtgctgagcttacggcccagcaccagcggcgcttggcggccatagcgcaggagaaggaccaggaaatggagcggctccgggagctgcagcggtgaggcccagggacaggcagctggggagcaggcttgcaaggagtagccggaagagagccatccccacgagacccttcgctgtggctcagcagcctttggacaggggttgggtccttccctcccagtccagtgagtgaggactgagggctgagcacactgacccatcacacccatgggtgggggtgccacctgctcttacagaggcaggagggggtacccacaggctgttcaggcatggcatggcagcagcaagccgcctagggtctaactaagcacagggtcatccactcgcctgctcatgcagtagaggctagaaacaagatccacctgggaaaggcttgcgctgttgtgcctgccatgtttatagggttgcctttctagaagagaaggaaactaagaaaagttacctaagggagtcagaggtcgatgaaggcagaggcagccttttaagactgctcagggccgggtgcagtggctcacacctgtaatcccagcactttgggaggccgaggtgggaggatcacttgaggccaggagtttgagaccagtctgggcaacacagtgagacctcatctctaaaaacaatttttaaataagctggcatgacagctactcctgtagttccagctacttgggaaactgaggcaggaggataccttcagcccaagagatcagggctgcaatgagctatgatgccactgcactccagcctggaccacagaacaaaaccctgtctctaaaaacatttaaaaaacaaaacacttgggaggccaaggcaggaggattgcttgaggctaggagttcaagaccagcctgggcaacatagtgagacctcatctctaggaaaaaaaaaaaaaaaaagaaagmctgcttggggccgggcgtggtggctcacacctgtaatcccagtgctttgggaggccaaggtgggtagattgcctgagctcagaagttcgagaccagcctgggcaacacggtggaaaccccatctctactaaaatataaaaaattaggcgtggtgagcgcctatagtcccagccactcgggaggctgaggcaggagaattgcttgaacccaggaggcagaggttgcagtgagccgagatcatgccactgaactccagcctgggcgacagagtgagagactctgggtgacagagcaaaactccatctccaaaaaaagaaaagctgaataatgggaggaatgcccatcttagtgcgtgtagcattgaggcaccatgacagataagacagaggagctggggaaactgaggcagtgcccggcggaggagaggcctgggagcaagggctgcacggaaacacacccttccacaaggagttaccgcatcagggtgatccagctcagagtgaccgccttcccctcccgcctcccctcagggcgtccatcctagacatgcgcagagaccacgaggagcagctgcagcggctaaagctgctgaaggaccgagaggtcgatgcggccaccagtgccacctcccacacgcggtatgtgcgctgccccaaccatgcccgcctgacgttgggggccggaaggtccccgagaccgtcaggagggggtgacccagtcttcttccaggtccctgaatagcatcatccaccagatggagaagttctccagcagcctgcacgagttgtcctcccgcgtggaggcctcgcacctcaccacctcccaggagcgggagctggggatccggcagcgtgacgagcagctgcggggtacgccctcccctctcagccaccccggctcctggtgggaaggggagcagctgctgagcaccctgtgggttgcccscagcactgcaggagcggctgggccagcagcagcgggacatggaggaggagcggagccggcaacaggaggtcatcgggaagatggaggcacggctgaatgagcagagccggctgctggagcaggtgaggcccgtcctcctggccctcctgcccctcctgccayggggcctcttctccagggcacccgcaagtgtagcggcactcccctgacctcacttcctcaggaggtcaaggccccacctgccgcttcctgcctctacatctccctgccctggccaggctctcagcactgcccacctgagcatgcaggggccgcctggccaggcccccaccacgccctgtccgctcctcagcaccgcaagcccctcggccaccttggctgccctccgcagtctagcccccgcaaccatcagctgcacttcccacttcctgacactcgaatctgtcacattagctgaggcctgacattgggacagatgctcttgcccattaaatgtcatcctagcctcttcagctctcacagagacatttgaattccctagatacctttcatatataagcacatgctttatttaaataatgatgaccttagccaggcacagtggcctgtgcctataatcccagctacttggggggctgaggcagcaggatcacttaaggcccagaatttgagaccagcctagcgagaccataaataaatttttttatgccaggcaagttggctcatgcctgtaattccagcacttcaggagtccaaggctggaggatcacttgaggtcaggagttcgagaccagcctggccaacatggtgaaactaaaaataaagaaataagaaactagccaggcgtggtggcgcacgcctgtaatcccagctactagagaggctgaggtgggagaatcgcttgaatctaggacacagaggctgcagtgagtggagatcataacatggcacaccagtctggttaacagagcgagactctgtctcaaaaaaataaataataaaaacatttaaattttgttttaattaactgggtgtggtggtgcacacctgcagtccctgcctttgctcacatccttttccttacctgtggaaatctttctaggctgaattcaatggtaatgaatctttcgatgctaccacctccacaaagccttccttgtcctcccacctatctttttgtcctcagctagtagttatcatcttctaaggttttacaaagcactgttattttttagagacagggtcttgctctgttgcccaggctggagtgcagtggtgtgatcatagctcactgcagcctgacctccttggcttaagccatcctcctgcctcagcttcctgagtagctgggactacaggcgcaaaccaccacacccagctaattgtgtattttttactgagatgtgggtctygccatgttgcccaggctggtcttgaactcctgggctcaagcaatctgcccacttaggcctcccaacattttgagagtacaggtgggagccaccatgcctggccaaaaaaaaaaattttttttagagatggggtctcactgtcactcaggctggagtgcagtggcaagatctcagcccactgcagcttgaacctcctgggctcaagcaatcttcccacctcagctgccaagtagctgggatcacaggtgcatgccactatacccagctaattttttgtattttttgtagaaacgggggtttgccatgttgcccaggctgatctcaaactcctgagctcagacaagctgcccactttggcctcccaaagtgcagggattacaggcgtgagccaccatgcccagccaaaaacttttttttttttttttttttttttgagtcagagtctcgctctgtcacccaggctgtagtgtagtggcgcaatctcagctcactgcaaacttcgcctcctgggttcaagggattctcctgcctcagcctcctgagctactgggattacaggcaactgccaccacgcccagctaatttttgtatttttagtagagatgggtttcaccacgttggccaggctggtcttgaactcctgacctcaggtgatccacccgtctcagcctcccaaagtgctgggattatagggctgagccactgtgcccggcccaaaaaaatgtttttaaagaagaaaataaaaatatcccactagtcagagatgtccactgctgacctgatatctatcctgtagccatgtcaacgtagatagagatgcttttatgttgtgaagcattttgattcgcctcttcatttggtaactgtgttaagcatctgcctggggtcaggcacagtgaagctctcgccttgtgctgtgtgtggctgggcccacagcacagcattaagccaccctgtgcttagcctgcttggctgatgggtgaggacaggcagagtgcgtagctggcgattcagcggcagggatgttgctgctctttggccctcccaagctgctagccttggtgctgttggagacctgagggttgggagggcacctgctgggtccttctcttgggcagaatcgtgcgggctgggccctggcagtgcctcccaggcacccctcattttgtgcctctttgggaaggacgtgtcagtggcatagtgtgggagacactggtgggttcatgcagcttctcagggagtggccaggygtgatcctcagggcgggaaccacgctctcagtcctgccctgggccctacaggaacgctggcgggtgactgccgagcagtccaaggcggagtccatgcagcgcgccctagaggagcaaagraaggtcacggcccagcagatggccatggaaagggcggagctggaacgggccaaggtgagtcaagccaccgcactcagcccctgcccctgccattatgcccagggacactcaccccgtgccttcacccccacatcccagagcgccttgctggaggagcagaagtctgtcatgctcaagtgcggggaggagcggcggcgcctggctgccgagtgggcggagttctccgcgcagcaaaagctgagtaaggagcgggccgagcgcgaggccgagcgggcattgcaggtggacacccagcgggagggcaccctcatcagcctggccaaggtagggcccagagcctccggacagtggagggcccagggttgcctgcgcccctccatctggacacatccgcttccagtcttaggaaaggagagtgtagcactaatgtcacaagagcatagggattaaaacagtaatcgcatcatcatgctaacatcttcctcgtattgtcccaggtgcattatacacattttatttgatcctcatgttcccatgactttggtcatttagaaatgaggaaaccgaacttcagagttgagcctgccacagtcacgtggcttgtgagggcagcactccggcttggccccaggcttctctggctctccctggaagcccctggctccaccacctcctcccaggggcagggtgggcagaggggaccctagagtcctgcacagagtgcagcgcaattcctgggaggagaatgcagcagggyctccgctgtctccaggagcaggctgagctgaagatcagggccagcgagctccgggccgaggagaagcagctggcagcggagagagcagccctggagcaggagcggcaggagctgcggctggagaaggagaggatcaacgccaccgccctgcgtgtcaagctccgcgccgaggaggtggagagcatgagcaaggtgctgctcgggcacatgggcgtgggcgcatctgagcccaggcagccctgacccaggcggcytccctgcaggtggcctccgagaagtacgaggagggggagcgggcattgcgcgaggcccagcaggtgcaggcagagcagcaggcccggttgcaggcggtgcagcaacagcaggarcggctgcggaagcaggagcagcacatgcaccaggcaaggctccctgagtgtatggygcccctgcccccggcacccccarcctcccacctcacagctgagtccttctttctgggggaacggggacaggagcatctgagtctggcccagcagaggctgcaactggaccgcgcacgacaggacctgccctctagcctcgtgggtctgttccccagggcccagggccctgcagcctccagccagagtggtgagtggctccagaaggaagggccggcggctcaggactgggcaggggcagtgctaggagtgggcaggccctcctccagccgctccagttaaggcggccagctgggttttatagtcgccttatttcttttttacacaaataatgtgtgttaattttagataaatcagaaatagaggaacactattatgaaaaatgtcacctttttgtaactctggactcaggaaaaaaaaaggaaataaaaaaagtcattgtcaggctgggcgtggtggctcacgcctataatctcagcactttcggcagccgaggcaggcggatcatctgaggtcaggagttcaagaccagcctggccaacataatgaaaccccgtctctgctaaaaatacaaaattagccgggtgtggtggcaggtgcccgtaatcccagctactcaggaggctgaggcaggagagtcactcgaacccgagaagtggaggttgcagtaagccgagattgtgccactgcactccagcctaggggacagagcaagactccgtttaaaaaaaaaaaaaaaaaaaaaaagtcaccctcaacgccactcctgagtcttgagagaaccacttttcacttttaacattttggtgcataatgttccactctggtactttttttttcttttcttttttgagatggagtttcactcttgtcacccaggctggagtgcagtggcatgatctcggcttagtgcaacctccacctcctgagttcacgcgattctcttacctcagcctcccaagtagctgcgattacaggcatgtgctaccatgcctggctaattctgtatttttagcagagatagggttttgccatgttggccgggctggtcttgaactcctgacctcaggtgatccacccgccttggcctcccaaagtgctgggattacaggcatgagccaacgcgcccagcctggtacatgtttttaaaaacaaaattaggattgtatgtgtttttcaataactttactttttttactcagtaatgtacacgtggaacaggttttcagatcagtcattaaacatttagtcaattcccaatcagcacagttttccactgtgaggctgctctgtgctgagtgatttgttgtcttaaagagaaagactacccagtggacatcttcctacatatgtgtttgtacctttgcctgattatttcactggaataaattcctataaatggtctttccaggtaggagcaggtatgcatttgccagaggcttctgagagttagtgccattgcaccctgagtatatggccagggtccacccactggcgsggggagcagctctgcaggaacaagctgtgaccgcccggtatttccaccaacactttggtccctgacttcctccttggccttttcagccctcatgcctcctgctcccaccacccgttggtgcagccagccgccaactggcctggaccccagccccttgcacctccatgccaggctggcactgctgaggcacatggcagagcaggtgagtctctcctggccttggggatccttgtgttcacgagtccttccagctcagggcagaggcagggaggagcacatggtagccctggggaggggtgaccccagctcctggggagtaaaactgcagtttgcttagtgagccaatgctcagacttccacactaggccaggttctgtgcaaagcaatttgcatatgtcatctcagttaaacctcatgataacctatagcaataatgataacaggctgggcacagtggctcacacctgtaatcccaacactttgggaggttgaagcaggaggatcacttgagcccaggagtttgagaccagcctgggcaatatgttgagacaccgtctctacaaaatgaaaaactaaaaaaagaggaccaggtgcgtggctcacacctgtaatcccagcactttgggaggctatggtgggaggattacttgagcccaggagttcgtggccagcttgggcaacatagtgagacctcgtctccacaaaaaaatagctgagcgtggtggcatacacctgtactcccagctactccggaggctgaggtaagaggatcacttaagcccgggaggtcgaggctgcagtgagccacaacggtgccactgcactccaggcaacagagcgagactctgtctcaaaaaaataaatattaaaaatttaaaaattagctgggcatggtggggcatatctatagtcccagctacttgggaggctgaggtgggaggattgcttgagcccagctggtcgaggctacaggtgtgttcacaccactgcacttcagcttgggtgacagagcaaggcacttgtctcaaactaaacaaaacaaaactataatgataacagttgtcattatggagcatttcctgtgtgccaacctcaatgccgaaggctttgtttatattttacttatttatttatatttagaaatggggtctcacgatgttgcctcggctggtctcaaagtcctgggctcaagtgatcctacccccttggcctgcggattagctaggattacaggcatgagccactgtgcctggcctgctttgtgtattttttaagcttttaccctcacacagccctgcaaggaagggctacaaggaatgtttacagacaaggaaactgaggcttagagacatgaagtcatgtgctcgtaagttccacagcaaacaagtaaccttgccaggattgagactgtggtctgtctcactccatacctgggctctttcatggcccctgctgactcccagagccaggcagagtcagggacgatgtggggaggggcctcagtgacggctggctcagctagcatccagggctccacctcyctctcagctcagggaaggtgaccgcccatccaaacctgccttgcaggaccgtgacttcttggagaatgaacagttcttcctggagaccctgaagaaagggtcctacaatttgacatctcattcagcctgagtgggaccccagccgattccccaacagagggttcggaccccagaactgtcctgttcctccggctgcctccatggaggcagtgcctggggaggattctgagatgcttgaggcctgatgacagctcttccgtggacagggtgcaagtgcatcctttccaaatgtgccagcccggggcagcccctgcctctggggctctgtggtgtaggctatcttaccatggctttggctgccctgccccaaagccattggcttggatctgagggtctgagttggcagcaaggacccccagctctcactgggctctgtgggctccccctgggctctgtgggctccccctgctccacaggtagactgttgtgggctctttttgcctgggcctcttctgaggcaggagctttcttgagggatgccacaaacagccttccctactccctgccagagcagttccctccctgatgagctggagaagggccctctggcctcctgacagtacagggagggcaccagctagatcctcccttgtggtgtgagatgttcctggaactcagccaggccctcctcctcctgggcttgcccagagcmcccaccctattcccagcattgcccgaaggaccaaccagtttgggtgaacagtggcctcctcagcttcctccccatctgggtgccccaccggcggcggagggagctgtggcgatggtggggtgtggggagggacgaggagggaagcctctgtgctgctcacctgcccaaagcccagctcagcgggtacgcagtggaggcgacaaggaaccaatcacaactacagaggtttctctgatcctcctccactcccgctgcttcaacttgactaagcttaaaaaaactgcttttgccatggctcatcggagtttatacttatttcttagaaaatgtttcctgttatttgctggacaagtcccaaagaacaggcagatgttcttattaaaagatcagcctataagattggtcaggaccaggcgcctctggccacgtgcctctcccctccagcacctgcggtctgcggtggcacctggcagctggaccacagccaggagaagggtactattagccctgcttcaaacatgcagaaactgaggcccggggagattaaataacctgcctgaaatgacagtgagtagctgcgcctggatttgagttctgctctggccaatccccaagctccacgctgtcagccaccccgctctcctacctcccagaggagcaggctacactcctggtaggtgctggtgtgggaggaagatcttttcaggcgcttctggggctggtaccaacactgaggagggaagtatcacatgccccattggaagccttggttaagtctcaaatttgattctccacaaaagagactcaaccagtcctgaggcagacctgtgcaaagagctgggggggtctaaggatgggcacgtcggcccaggggcagctggtatctaggcagccacctgcaggacctgcaggtgatcaagcacatacatcggggagggcggtgctgggagacccacagggggagagcatggccttcaagacagagtagggagaagaggttagaatgagagggctttgcatatcttgttaaagacgtgcaacttttcagggcaaatttgtctgagggcaaattttcaggtcttcactagaagattttaaacaaggttgaaccatatttgtattttagaaaacccattggccaggcacggtggttcacgcctgtagtcctaacactttgggaggccaaggtgggtggatcacttgaaatcaggagttcaaaaccagcctggccaacatggtgaaactctgtttctactaaaaatacaaaaaaactagctgggcatggtggtgtgtgcctgtaatcccagctacttaggaggctgaggcaggaggatcgcttgaacccgggaggcacaggttgcagagagccgagattgcaccactgcactccagcctaggcgagagagcaagactccgtctcaaaaaaaaaacaacaacaaaagaaaacccattgtgtctgcagggtggggaccggaccagagggggcaagagtgggacagaggatgtgtgggaaggcagctggcaatggtgcaggggagggactgtgggcaagactaccgggcatggcagggagggcccacagaaaagtggccctcgggcctagtgccagtcatggaggatcagaaaggaagacgtgttgaggacgcccaggttcctggcttgggtgactgggtggtgtcacagatgagtatacagtgccggggggacagccaagcagagacattccacaggcactcagttataatggcactttactcagtgtaagcactcagcattcctgtcaccgccatgagggtgtggcaggcatcctaattatccccttcagccttctcccaggccacagacactggagagggctgagtacagaaatgagtgttgtgtagctgcagctctttttttccttcaaaattgtaaacaagatcataacccaagtgcttcattcagttccttttagagagagaaatattgcggccgggcgcggtggctcacgtctgtaatcccagcattttggcaggccaaggtgggtggattacctgaggtcaggagttcgagaccagcctgaccaacgtggtgaaaccccgtctctactgaaaatacaaaaattagccgggcgtggtggcgtgtggcctgtagtcccagctacttgggaggctgaggcaggagaatcgcttgaacccaggagggagaggttgcagtgagccgagattgtgtcactgcccttcagcctgggtgacagagtgagattttgtctaaaaaaaaaaaaaaagaaaaaaaagaaaaagaaatattggtggaatgtaatgggtaaaacatactggtgcaggtgccgggcgcagtggctcacgcctgtaatcccagcactttgggaggccgaggcgggcggatcacgaggtcaggagatcgagaccatcctggctaacacggtgaaaccccgtctctactaaaaatacaaaaaattagccgggcgtggtggcgggcgcctgtagtcccagctacttgggaggctgaggcaggaaaatggcatgaacctgggaagcggagcttgcagtgagccgagatcaggccactacactccagcctgggcgacagagcaagactctgtctcaaaaaaaaaaaaaaaaaaaaaaaaaaaatactggtgcagtggtacacacctgtagctgctatcaggaggccaaggtgggaggatggcttgagcccaggagttcaagaccagcctgggcaacatagtgagacccccatatatttttttaaaatggtagagccactgcttctagtttcaagatattcatcgttatttgcttcaagttggtacacgtgggaatccacgtgaagcctctctcaaactgttaatatccaagcaagcgccaatcagggttctaggacagcaagaggacaagaatggaggaatgcaccgccacctgggtggccagcagcttccacgccaactgccaaggccccatacatcttcatctggagagggctgggagggtcgtggggtagagcgggtgggtttagaggctgaagaaaatgattcagaaacaaaaggacaaggtggccgggtgcagtggctcacacctgtaatcccagcactttgggaggccgaggtgggtgggtcacctgaggtcagtagtttgagaccagcttggccaatatggtgaaaccaagtctctactaaaaatacaaaaaattagccaggcgtggtggtgcatgcctgtaatcccagctactcgggaggctgaggcaggagaatcacttgaacctgggaggcggaagttgcagtgagtcgaggtcgtgcccctacactccagcctgggcgacagaaactccatctcaaaaaaaaaaaaaaaaaggacaaggtaaaacagccacgatgtaaacacacaatccagttatgctcctgtactgcataactgcagtatggaatgtcacaataagcaactccttacgagcaggactgggtgtgactgccccacgtattcccctccacacttagcatgtagcaggtgcacactgctgggtggattagaaatgactgtgaaaggtttagctgtttggctgctgtttatgaaaaccagtggaaggtgtggccacttcctgctggatggagagaccctcattccattctcattccatctcaaagtgattgtgagggtcaagcttctgctggtgccagagccactggcctggtcaccaccagccctggcctgggatgtcagagcaggcttcctggagagacccctctcctggggctgggtggtggccaggccaaggtggggcagtgaggaggtgagaggcagaagacacagcgtatacaaaggccccgtggcctggaggcaaagtgcgatggaaaagtcttgccttttagggcaggagggccagggctggggcaaaggagggtcccagattccccaggctaccaagttttgccatggtagaactggatcacaagggcaagcctgagtcctgccagaaacattcacatctgcacttaaccaggtcacttctgcctttgtgtggataatgagaagttggagatagttgagctaacacacaaaccactgcgagcgctttccagagggtaatcttttcatcctgacagctgtcaggtaagcactagtgttaacctgctttttcccaaatgaggaaaccacaaggaagacagtaaggtcacgatctggtttttttttggggggggggaggggcattttgagacggtgtctcactctggcaccgaggtggtggcgcaatctcgtctcactgcagcttctgcctcccgggttcaagttaattcttgtgccatagcctcctgagtagctgggattacaggcgcctgccaccacgcccggctaatttttgtatcattagtagagatacaaaaatttttgtatctttagggttttgccatgttcgtagggctggtctcaaactaattacctcagatgatccgcccacctcggcctcccaaagtgctgggattacaggtatgagccaccgcgcccagccacaatctgggtttttattactattattttattattattattattattgaaatagagttttcacttttgtcgcccatgctggagtgcagtggcgcgatctcggctcactgcagcctccgcctctgcctcccaggttcaagcgagtctcctccctcagcctcccgagtagctgggattacaggcgtatgccacgcccggctaatttttgtattttgagtagagacgggttttcaccgtgttggccaggatggtctcgatctcctgacttcgtgatccacccgccttggcctcccaaagtgctgggattcccggcgtgagccaccgcgcccagccctcaatctgggttttaaacccaagcagagtccggaatcggagctcgcaccccttctcccaaccaggcctgcgtccctggggaaatcaggacgcagcgtccaggggttggaggagggccccggcggccgaccccggtctgtgccgccccctggtggccagccatgggcgagcatatgactgctctcggctccgccccgccgtccaacgggcacttccggagccgggcgtctacagaccgcggccaccttccacctgcgcccgaggcagacggtgcaggggcctccgggacaggcgtctgaggcctgctccgcagcgcgggcccgggggcgggcctaggggcggggcctgctgtggtgcgctcaggcaccgcgctggccacctgtgcccgggtcctagtggcggccgcagtgtcgcaggccggagggaagatggcggcgccctggtggcgagccgcgctgtgcgagtgtcggagatggcggggcttcagcacctcgggtgaggggtgggcagctctgcgggggggggggggggggctgtcgcccgagctgtggggcgccggccttacgtcttctctctgcccgcagccgtcctgggccgccggacacccccgctggggccgatgcccaacagtgacatcgacttgagcaacctggagcggctggagaagtaccggagcttcgaccgctaccggcgccgagcagagcaggaggcgcaggccccgcactggtggcggacctaccgagagtatttcggggagaagacaggtgcggggcgactggagcaggggctgcagccaccgcccggggaactcgggacccgccggcgttttccccgggcgctgggcgagccttgccggcgcccttgtggatgctggggacgctgggagggcctgcctgcagacctgtgtgcgctatcggcagcttaatcaccccaggatttttcacaccttctgcacctcattcttggaaaattcgctccccctactattagagttccagctcctaaaatatttgctcctaaaatcttgaccacctgactttccggattgggatgccgttctgtgcgcctcaaatactctgtaggtaactctggccacactgcattctgactgtgcgctgcctctccccagattgtaagcgccctgttgacagggatcctgcttgtcttgccctccattggatccttgcacccgaacagtgcaaggatgtacatgtgcaatactttgctgaatgaaattaaaggcctgggcagggtgactcaaaaaagaacccaacctggccgggcgcggtggctcacgcctgtaatcccagcactttgggaggcctaggcgggcggatcacctgaggtcgggagttcgagaccagcctgaccaacatggagaaaccccgtgtctgctaaaaatacaaaattaactgggcgtggtgtcgcatgcctgtaatcccagctactcgggaggcct

SEQ ID NO: 96972 - DNA, 17822 bp, Homo sapiens
ggtttgacggggaatgggatattagggtagttgcagagtatttcccagaaaatacttattatttggaaagacaaaaatggtgacattacagtggaggaaattggcagacagcaccttgaccaggtgatcaaggttaatagcatcagtggtgggaaaggctgacatcatgagcctcccagtgtgacacactgagaagaacagagcataatgtttttgtgggccgggcatggtggctcacgtctgtaatcccagcactttgggaggctgaggcaggagaatcgcttgagcccagaagttcaagaccagcctgggcaacacaatgagaccctgtctcaaaaaaaaaaaaaaaaaagaaatcaattttttgtgtgtgtggtgttcttgccaagaatttataagtctaggccaggcgtggcggctcatagtgtaatcccagcactttgggaggccgaagtgggcagatcacttgaagccaagagttcaagaccagcctgaccaacatggcaaaaccccatttctaccaaaaaatacaaaaattagctgggcgtggtggtgcacacctgtagttccagctactcaggatgctgaggcccaagaattgcttgaacccgggcagcagagattgtagtgagccgagatcacaccactgcactccagcctgggtgacagtgcaagactctgtctcaatcaatcaatcaatgtataaatatagacctgaggaaacaccagacagacccacattgatgggcatcctatagaattaaagacttctaccctttaaatttgtcaaggtcatgaaagaccgggtaaaagtgaagaaatgttccagattaaaacagattaaagagacttaatttaaaaatgtaataaatgatcctaaatttggatcctggataaaaacaaaaaggaggaccaggcacagtggctcacgcctttaatcccagcactttgggaggccgaggtgggtagatcatgttgggagttcgagaccagcctgaccaacaaggagaaaccccatctctactaaaaatacaaaattagcgcatgcctgtaatcccagctacttgggaggctgaggcagtagaattgcttgaactcgcaaggcggaggttgcggtgagcggagattgcaccattgcactccagcctgggcaacaagagcaaaactacgtctcaaaaaaaaaaaaaaaaaaaacgaggccaggcgcggtggctcatgcctgtgatctcagcgctttgggaggctgaggcaggtggatcacaaggtcaggagttcaagaccagcctggccaacacggtgaaacctcatctgtactaaaaatacaaaaattagctaggggtggtagtaggagcctgtaattccagctacttaggagactgaggcagagaattgcttgatcccaggaggtggaggttgcagtgagccgagattgtgccactgcactccagcctgggcaacagagcaaggctccgtgtcaaaaaaaagaaaagaaaaaggaggtatttcacagttggtgaaatttgaatggggtctggattaatgatgtatcaggttaatttcctgattgggacagttgcacaaagcttatagaaaactgtgcttgtttgagggaagtacacactgcatgatttaggggtgaaatgacatcatgtctgcaacttgctatcatgttgatcagaaaaagaataatgatgtaaaccaaaaataaaattctgagtcccccaaccatgttgggccattccatgttaacctgaaaaactagtatgggccatgatgggaaagggggagctggacatgccttgttataccctcctcccttttgcaattactgatataacagactctttaagtctgataagaaacatttacagtgtattctctgtgaagttggctacctggatgcttcacttgaatgataaaatcttggtctccacaaccccttatctcaaccagacattcctttctattgattccaagtctctagacaataatttaacgctttttttttctttttttgagatggagttttgctctttttgcccaggctggagtccaatggctcgatgtcagctcacggcaaactctgcctcctgggttcaagcaattctcttgtctcagcctctctagtagctggggttacaggtatgtgccaccatgtccagctaatttttgtatttttagttgagatggggtttcaccatgttggccaggctggtctcaaactcctggcctcaggtgatccacccgcctcggcctcccaaagtgctgggattagaggtgtgagccaccacagccagccaataatttaactctttcaaccaattgccaatcagaaaacctttgcatctacacaatacctggaagcccccatcttccagttgtcctgcctttccagaccaaaccaacgtacatcttacatgtattgattgatgtcttatgtctccctaaaatgtataaaatcaagttgtagtcagaccactttgggcacatgttctcaggatctcttgaggggtgtgtcacaggccattggtcactcatatttggctctgaataaatctcttcaaatattttagagtttgactcttttcactgacaatgataatgggcataaacacagataaatattaacaatttcagaatctcgccgggcgcggtggctcacacctgtaatcccagcactttgggaggctgaggcgggcatatcacaaggtcaggagatcaagaccatctggggtaacacagtgaaaccttgtctctactaaaaatacaaaaaattagccaggcgtggtagagggcgcctgtagtcccagctactcgggaggctgaggcaagagaatggcgtgaacctgggaggcagagcttgcagtgagccgagatcgcaccacgacactccagcctgggtgacagagcgagactccgtctcaaaaaaaaaaaaaaaaaaaatttcagaatctgccccacccgccaaccatgtcgggcattccatgttaacctgaaacacatggaatgtttaaggagataagaaagttttggcccggcactgtgactcacacctgtaatcccagcactttgggaggctgaggcagaaggatcgtttgagctcaggagtttgagaccagcctgggcaacatggccaaaccttgtccctacaaaaaaaaaaaaaaaaaaaaaaaaaaaaaaaaaagaattagctaagcttggtggtgtgtagctgtagtcccagctacttgggaggctgaggtgggaggatcactcaagcctgggagtttgaggctgcagtgagccgtgtttgcgccactgcattccagcctgggagacagagctagaccctgtctcaaaaacaaaacgaaacaaaaactttattagagagagttctttgtattcatcttgcaatttttctgtttgaagttatttcaaaataattttttaaaatacgactaagaagtctttcagaaagaagagtgcctctcagcctacaaacatgctcaaatctctctcactctaaacaaagcaaaactaaaaacaaacaaaataatgaagccagttgtcacttactgttgccacttcctccctgctgggcatcatgatgcagaggaaacaccactgggccaggtgtcaggaagcctctgtttgagtctggctctgccactccctaactttgtgactttggcaaaaacatttctttttctgagcctcagtttcctcatttataagatggaaacaatggtatctcccttatggagatgctgtgggggccaagggagagaaggaatatataggcaggttataaactctaacgtattctacaaatatgaattgcaagtgatccctcactgtaactcctggtgataaaagagtattgccttcacactgtgataaaatccatcctcttcttggagctcagcctaccctctgaaggactgtacccagctgatcacagccttagtcccttgatactttctgcctttcctgaccttctcaaccctgtctggcccctctgcctggctgtgcaggacaggtgctcacttggttctgttcctggttcttttcctcttatctacttactctttctgggtgtctcatctactcccatcacttgggggcctccagtattacgctgatgacatccccactcacactttcatccttggtttctcctctcagctattccacctccacccaggcattcccacaggcacttcaaagtcgccttgggcaaaactaaataattcccttcttaacttgcttctcttcctatgttatcttccttactgaaaataccaccttcccgctaaatacttaggctagaaacctatgagtcagttattattatttgcttactgaagcatctactatgtgcctgtgcctgtgcctgctgccaccctaagtatcatgagttcttgatttcctttattccttgaaagagccctcatagcggtggatcctactgtattccatcttatagagctggattctcaggttcagagagcttaaataattttaggcccaaggttgcatagctaataaatggtgaaactgggatttgataataggcttgtctgactccaaaatcccttttcataatcacatactacatgacttaatcctggattccccaatataattgctcattgattcttgataattttatcactgaaatgtaagagacttttcactgctgttaccttgctcagacactcatatatatttagatatatgtatataggtgttattttctaattataaacgtgatatatattggctgtaagaaaatacattacatacctaaatagtgaaagttcctcaaccccaacttctacagttaaccaacattaacaggtatacattcctcaattttttctatgtatttgctagtatattatgcttttaaaaatcagatcacataatcttgaaatttacttttttttttttttcttttttttgagacggagtcccgctctgtcgaccaggctggagtgcagtggcgcgatctcggctcactgcgacctccacctcccgggttcaagcgattctcctgcctcagcctcccgagtagctgggactacaggcgcgtgccatcacgccggctaatttttttttttttttttgtatttttagtagagacggggtttcatcgtattagccaggatgggaaatttacttttcttatttcgtgtatcagcacatacaaacctacctgtttttatgtcttttttaaaatgaggtaaaatatacacgttttatacaaaattcaaaaggcacaagagggtataatcataaaaaaataggtcgccatccacccttgttctctagatgctcatcagcaaatgactcttaccaatttcctagatagccttctggggcgcctcatttcttttccaagctgcttaacatcccactgtatggatacaccaattcatcaggacacttagattgtttaaattctgtgtcaatctcattaattacttacaactcaacttttcttagcaatatggtgttccgcattgtacagctgcaccgtaattcatttattcatttccctacttatgaaaattgaagtttaaatacctaaactgcatctgctcttagggcactcgtgctgtttaaccatttcggccattttgtcatcaatatagtttatgtattcctccacccaactgtgagttcctcaaggacaggggcggtgttcatattcatctttgcatcctcttagactagcttcccgcacttggtctagtgtatacattcaccaaacttgtgttcaataattgactcatccgcgctgagttctgaaagctagcgtggggaggcggagccaggggaaagccctgcccatttgggctgtcccgacctcagagggaccggaacgttcgttggaaggatcctcgtttctcagggacgattttggacgcgaagcgtgccccgcacaaggatggttgccatgaaccggaagtaactggttgttttgctggctccagtttttccgcggggcggaaaaggcgtgtctgcgtgtgtcccaaccatttctagtcccctttcctcgcaggacctcatgagtaagctgtggcggcgtgggagcacctctggggctatggaggcccctgagccgggtaagcgcgaatagatcaagcaatttaggtcgtgttagaaaagaagtcccgttcttgctcctcggagagtccagggtacttcggccacaggtggcaaggagaaaggcggtgctgttgttatggtaacagcgagtactgcgggaagggtgggatccagtaggggcttaggttattcagggcttcccctgccaccctccggccaaacactgtygacaggctttccttccacaggagaagccctggagttgagcctggcgggtgcccatggccatggagtgcacaagaaaaaacacaagaagcacaagaagaaacacaagaagaaacaccatcaggaagaagacgccgggcccacgcagccgtcccctgccaagcctcagctcaaactcaaaatcaagcttgggggacaagtcctggggaccaagaggtgaggccaagagggtcatagttttataaggggaactttaggagcagagatagtagttagaagccgactgggctttctagaagaccgaatggacactgtgacttcagggtccagatttaggcagcaagagtctaagagggtggggaaagttgggtgtagctacggagtaggaggaggagacgcttgctcattttaaagagtagtgttgcttctctgcagtgttcctaccttcactgtgatcccagaggggcctcgctcaccctctccccttatggttgtggataatgaagaggaacctatggaaggagtcccccttgagcagtaccgtgcctggctgggtgaggatctggaggtggggaaactgggtttcttattatacccgcctaaagaaagaaggttggttctgaaatgggttaggattttccatgtcccagtattaactcagccaaattagggtgccccatctgaacaattctgtttttctttctccaacttccttcccagatgaagacagtaatctctctccctctccacttcgggacctatcaggagggttagggggtcaggaggaagaggaggaacagaggkggctggatgccctggagaagggggagctggatgacaatggagacctcaagaaggagatcaatgagcggctgcttactgctcgacaggtatgttggttcattgtttattcactcaccaaatgtatacagtattgagaactctccacgacccacgcactttgcgtggcattggggatatcgatagtagagaaaagacaaagtttctgttctcctggagctagtattctastgtgtgtgttggggggctgggaagtaaataagtaaataatttcaaaaagctatatggtttatgacaaaaagaaaagggtgatgaaatagaaagtggcgtaaacaaacagatagaaatgatggaagagagacattagggtagttagagaaggcttctttgaagagataacatttgcaataccagaagagcttttgagcagagaccagcaggcgcacagaccttgagactggaacatgtctagcaaaggagaagaaaaagtggacaagccactgaagggctgtacgcagagaagtgacatacttggtttacatttcaatagattactttggcatctttgtagagaatgaatcttcgtggagacaagagatagaagtatggagaacaactaggaagctgttgaagtaatcagctgagaggcagtggttgctttaaccaagacgaaagtggtggagatggagaaaatcagatgaattatggctatattttggaagtagatacttgtggggaggggaatggagagaaaatatatcaaggctaagcctgggattttggcttgagcagttatccacctgatactctctattgagataagattaaaaataacaacagacctctgggaaagctggtacagttttggtgcacaggtcaggcaggtaacattactgatgcttctccccttgagagataaggacctaaagctaaatgtcaggagatctgggaggaggcagtatttatgaagaggaacctatggaaggtgtcctggagagggtgctcattaattaatatcccgcctccgaaggcctgcactgctcaagaccctgccttccatgtcccttctttcccctcccccgatctggccgacctcgcctctccatcttcctccattttcagacagcaccccgtctctgtctctccctagcgagctctgctccagaaggcgcggagtcaaccttcccctatgctgccgctgcctgtagctgagggctgcccacctcccgccctcacagaggagatgctgctgaagcgcgaggagcgggcgcggaagcggcggctccaggcggcgcggcgggcagaagagcacaagaaccagactatcgagcgcctcaccaagactgcggcgaccagtgggcggggaggccgggggggcgcacggggcgagcggcggggagggcgggctgcggctccggcccccatggtgcgctactgcagcggagcacagggttccaccctttccttcccacctggsgtccccgcccccacggcagtgtctcagcggccatccccctcaggcccgccgccgcgctgctctgtccccggctgtccccatccgcgccgctacgcttgctcccgcamaggccaggcactctgtagtyttcagtgctaccgcatcaacctgcagatgcggctgggggggcccgagggtcctggatccccccttttggctacgtaaggcccttaacccggactytgcgccccgtcccatgcccgctcttgagtatcttccccaccctattaaattacatccggtgcttcggcttgtacagaactgggggagtgggatgttgtgggcagaccagtctccggtatacacgtattttgcccctgtcggagcttgcgtcgatgcctggggcttggaaaccaccgcaaaaaaccaggctgcaaaccagcggaccgacttttgggactccgcctcttccagccgggattacctggcgtgcttcggcctttggcgtcattccgaaaacataccgcaagccaatcagcggcaaccttgctcttcggggcggctgttcgttggttgatatgccagagcctgttctgttgtctgtattggctattgccgctgtcagtcagggccgtgggtcgaaccttcacctactctttgtctgtacaagctcttgktgtctgggtgagcggcggaggcgctgctgtggattggtcacagggagaaacctctgatctgttcctattggcccgtccgtcaagggacgatgatgattggtarggcagagcaatctgagtcctagttggtggagttctgcccrgatggaagctccggccgcggagtgatggtggcctcagcgaagatgggccgggcagggaccatggcggtggcagcagaggtggcaggggcggggcggctggcggtagaggaggctgtggtcctcagggggctgtaggtggaggtatggctcgggccagcagcrggaacggcagcgaggaggcmtggggggcacttcgggcgccgcaacagcaggtatcccaatagctccaaaacctatcacgacagccatttgtctctttcccctttccttgtcccttccttttgggggtgggggaggaactcacggagccaaaggtactgtgaagttcctaaacatgtctcttccactctttgtctaaactttgtaacgtagatgcagctgactttgcctgtagcctcatagaacccatcccatggctgcagtggaagcttgcggtggctctccagtgaccagaggcatagtgaggtcccagggaggctccctctgtcttgcaacagttatttgtgatctttttctatgtgcctattgtcacaacagagtccggcagcgtcttctcttgagggagcaatttggagaagagctggaacccagactcgcgccctggatgccatcctttatcatccacagcaatcccatctggttgggagcactgctctgggtctcacactgcccctcctctatcctagggagcctgaggcccaggggtggaaagatccagttgcgggtggggggtagtgaaccgygcaggataatgaaagcaacttgctttggaaatgacctaccgctacccgttgtctgagactgagattatctcagactgtcttctggcttctgccaaaacactcccttaacagaaagcaccgaggggatgggggtaggggggttggggagagtgaggcttgagtgtgaaggaagtctcatatatgcagagctgaaatctccctctttgtatgtccacacttttgtcttgttctctagactgattcttgctattccaaatcctcttccacgttgacagcccttcagatatttcaacactcctctcagcatcctccacttcccccatctctccaagctgaacttggttcacagggtgggattgtgtatgtgcatgcaggaggtgggggtggacagtgccctgggctggaatcccccttagttctaagtgcctccttgcccgcagcttcgagagctgtgcccaggagtgaacaaccagccctacctctgtgagagtggtcactgctgcggggagactggctgctgcacctactactatgagctctggtgtaagtctccaagagggctatttccaggtccctgtgtccaccctcccttggacctcagaatttcggccttcagggccccttctctgcatgaaagatgmctgagttgctccctccttgcctcttgcagggttctggctgctctggactgtcctcatcctctttagctgctgttgcgccttccgccaccgacgagctaaactcaggctgcaacaacagcagcggcagcgtgaaatcaacttgttggcctatcatggggcatgccatggggctggtcctttccctaccggttcactgcttgaccttcgtgagtgacttgatgccctgggtcagctaccagtggccctccccaaaccagaaccccaaatcgtctcacattcccttttccacacatttcaaagtatttttccctaatataaaaactagcaccctatacctggttgtcttcaaccaatcatgccaattttctcccctgcaggcttcctcagcaccttcaagcccccagcctacgaggatgtggttcaccgcccaggcacaccaccccccccttatactgtggccccaggccgccccttgactgcttccagtgaacaaacctgctgttcctcctcatccagctgccctgcccactttgaaggaacaaatgtggaaggtgtttcctcccaccagagtgcccccccymatcaggagggtgagcccggggcaggggtgwcccctgcctccacacccccctcctgccgctatcgccgtttaactggcgactccggtattgagctctgcccttgtcctgcctccggtgagggtgagccagtcaaggaggtgagggttagtkccaccctgccagatctggaggactactccccgtgtgcactacccccagagtctgtaccgcagatctttcccatggggctrtcttccagtgaaggggacatcccataagtagttttgagagggtggatgggttacttgcccaccagaaacagccctagtcccaactccttgcgttcytttggccccyccctgcctacctagaatctgcctgaaagggctgkagaggggcagtattgggggactgtgctagctttacccccgcaggacatacacaggagcctttgatctcattaaagagatgtgaaccagctacttgtggatttgggtggactaaagctcaactcactgcattgcacttgacctgactgggtttgaaggggacaggttatggccacttgaccccaccttccctgaggacagcagacagtgctgaggcctggactgacctaaggcctcttggtgaggcaaatctggcaaaagcaatagagttcaaaatgttttttccaatttatttagaaaaatagactctggattcacattcaccccagggctatgtgggatgacagcaaggagacacctgagatgaaatgaggaaggtttgaattactggtatccaaggggctgggggcaaaagccagaagcctttgtcccttcagagccagagtggcatgagtgtcttggctcccctcctctccctcccttcagtagtcttcagccatggccagtaagacaaggctggtccagccgtggaaagggcggcagcccatgcctcgcccatcgcggtcactgtactgctcccaaagaaagcctgtagcctggtactggcgccatacattgcctaccacgttggcacggagctcaccgtggagtttggcagcccgagcctggtgaggaccctccagatgcccatagtggtggagtgctcccaaagccaggtagttgacattgagccacacagcaccccgccagtaggggggatcatgctctgaattgcgctggccataaaaggagctggaggctgcaagggagcgtaaaccaaaggggctccagagatggcggctgtcggctagaatgtccagcaggggcccaaggcgggatgaggtggggtccagcagtcgcagcagcaagggaaaaagactgacatagccaagagcatctacatactgcagttgaggttggggccgacccaccacccgaacgagcccctgagggggcctgggcttcagctgtactgcttttgtgtggttcccaaagtctgcaaagactcctagctctggggcccagtgcagctcatccaggctctctgctgcctccagtgaggcagccagtgggcccagctcagcagctacctcagcctcacccagatgctctgccagccgcgtcagcacacgggcacccagtgccacccaacatcgcaggtccaggtgccgctcggttactgaagggtgtgaagcccgggggtagtcatccagcccagagggtagggtcttggggttcagtaaggttggtaaggcagggtcccgtccccgccagcggtaagatagtggcagtgggcctgcctggctctgatggagccaggaaaaccaggcatgcaggcggggcaaggcctttcggaggaaagccaagtcgtcagggtcaccaacctctagcatatgggctacaggcaaaagtagggttggggggttggcgtggactgctcgttgtactaggaattctggaggcacccgggctcgggcctcatcccccagtatctgctccctcccaatccagccatcagcatttagcagccccagccagtggccaagggcttcccgggtgagggagggatcccaccgctgaaccaccagctggtgaaagccttcatcccaaaggaagcctcgtgggaagaatgaccgggagggcactgctgtaaaaagaggtacgggtggaaagagggctgggtccaccttctgctcagacccttccaccccgatgtctggcaataccagcccttgtccgtagaagtagccaattccaccaaggaggccgctgagggcagcctgacccaaaacctgctcgccagagctcaggcccttctccttcagctggaaggtcttctcaaagcgctctctaaagccttcagcatggctctccagggcctgggtcagtagactgcctgccagtcttggcagggcttgatttcctcctgcctgggcactgcctgattcaaacacaaactctatggaaatgggaattttcagggtcacctgctgtatcaagaactgcccctgcccttgcccacttggacctctgtcctcccacttcagggatcctggcaagccgaggtagcgttcagggggggcccctgggggccgatgctgaaaccagctatttaggcgactctttaccatctctgtcagcaggggcagtcctgggttggaggtccagaagacattgtagcttgaaggggagaagataaataggaaatattattcaagagaaggcagtgggcattataaagagaaatacaaagtgttcaggagtcaggttgggaggtctcaggcaggggacatggagactggtgaaaatgggaataaccaccccttccatcccccaacattcttttcccccagttacctgccatacttgggggctgtatcccctggactggttggtggcaaaagtgtaaagcggaagtcaccaagttcactggtgtgcccactgataaacttcaactgccccttggccccaacctctggtagtaggacttccttgccatctgtcaccacatagaagaacagggagaccaaagggagggcagaagtacctgagtcctgagtgaccaacgaggacagaaaagaacagtgttagattggcattctctcttgaattccctcttgagaatcagccttagtgagggaaaggaacagtaggcaggggtaatgtaaacaacatacgtctggcagtaatgagggtcactgagggtaaccaggtacacccaagcgggatgagataaagagccttgcactgggtgccctgggagataacagtatacttttgtactatgtcctacactaagaactctacacagttgatttcatttaattctttttttttttttttttttttgaggcggagtctcgctctgtcgcccaggctggagtgcagtggcgcgatctcagctcactgcaagctccgcctcccaggttcacgccattctcctgcctcagcctcccgagtagctgcgacaataggcgcccgccaccacgcccagctaattttttgtatttttagtagagaccgggtttcaccgtgttagccaggatggtctccatctcctgacctcatgatccgcccgcctcagcctcccaaagtgctgggattacaggcgtgagccaccgcgcctggcttttttttttttcttgagatggagttttgctcttgttgcccaggctggagtgcaatggcacgatctcggctcagcgcaacctccacctccctggttcaagcaattctcctgcctcagcctcccaagtagcttggatcacaggcatgcgccaccacgcccggctaattttatattttcagtagagacggtgtttctccattttggtcaggctggtctggaactcctgacctcaggtgatccgccagcctcggcctcccaaagtactgggattacaggcgtgagccaccgcgcccagcctctttttcatttaattcttacagtcctgtgagttaagtgctattattatctacattgtacattttacaagcaaggaaatcaaggcttagagatggtaaatagaaatggttatacaggcagttgtttaaggcaggatttaagccaggcagccagagcccacttcatgctgcatttgctggcagcaagggaaggatggagggggtctgggctgagaaaagggtgtcctgaggccctgacctgaggctctacagtcactctccagctccagtcccctccgtgctgacccccaggcctcttgacgaactcagtggtgagccttaaggccccatcctggatgtgttggcgcccgaaggagaggccgtcgtggaactcccagccatagggacccacaccgtccccctgctcacacgtgtgcctgagcttaggagtccccggggtggtgccctgctgcgcccacatcagtcctgggggtagaatggccacgtaagtcaaagagcaggggacctgtccctccgggtctccgggtcatccctcttcataactctcctgatccattccttcccacccttgctctcgcttcaagctggggcgcccagattaggagtccgcctgcctgcccgccctggggcccggttaccggtgaggaggggcttcgggctgcgggtcttcatgccgaagtagacgtgagggcggtaggttccccagaagaggtccggggccacggcggggctggaggagtcggcaggcaacacaggaggcgcggagtgcagcgtgaccgcccgccgcgcacggtaccacgccagcacccagcgccccgacatacccagggccaaagacaggaccacgacggccagagccactcctccagccgtgctacgcggcccgccgccccggccgtcccgtcgcccggggcctccccgagccgccctctcggctgtccgcactccctctgccggcactgcgcggcgccgccgctcgccccgagccatcctggcactgaggtccgcgtcacaagagctcggagaggcggcagtggagcccgggtcctgcctcacctctccggctcccgcctctcgccctggcgaccaccgtccggttagcgacacctgccagccagcgcctgcgcctccgcctccgcctcccgccggaagtcccgccccgccacgttaggttaagtcccagagtccggaaccgctgcctgcggcttgacacagggttggtacgtagcgtctgtcctgggcgttggtccaccgggattgcgtttatctggcgaccccatggagttcacaggctcggaaaaaccaatctaacgttgggctgaggcatgagaatcgtttgaacccgggaggcggaggttgcagtgagccgagattgtgccactgcactccagcctgggcgacagagcgagacttcgtctcaaaaaaaaaaaaaaaagactgatgtggccaggcaccgaggcgcacatctgtaatcccagcactttgggaggccgaggcaggtggatcaccagacatgaggagttggagaccagcctggtcaacttggtgaaaccccatctctactaaaaatacaaaaattagccgggtgtggtggtgggtgcctgtaatcccagctattcgggaggctgaggcaggagaattgcttgaacctgggaggcggaggttgcagtgagccgatattgcgccattgcactccagcttgggcaacaagagtgaaactgtttcaaaaaaaaagaaagagagagagagagagagatggagggagggagggagggacggagggagagagagagagagagagagagactgatgctttatgcaacacgaccacttatatttcactataatctgactggtggccccactctccactagtggtagactttttgcttatgaaatcatctgaccaaacccaatggttagtcctgtttttgtctttcttgctaccgttgcatttgtcgacatccttattgtagcacttattacatacctgtttcatttttcatctttgtatcacagtactaatcaattataggcataaggcagatgctaaatatttataaattcaacacatgtttattgtacaccctatatcgcattatgcaaggtgctggggactcagagaaaatggccccaacctcaagttcacagtctagaagcacaatgccagcactcaatgcatgttgaaccatacccattttttttttttttttttttttgagacggagtctcgctctgtcaccaggctggagtgcaatggcatgatctcggctcactgcaacctctgcctccagggttcaagtgattctcctgcctcagcctcacgagtagctgggattacaggtgcccaccaccacgcccagctaatttttgtatttttagtagagatggagtttcaccaggtttgccaggctggtctcgaactcctgacctcaggtgatccacccacctcggcctcccaaagtgctgggattacaggcgtgagccaccgcgcctggccagaccacccccatttttacagatgaggagagtagttaagactgacccaaaataacagccagttaattatggagctggggaactcaaatccaggttgttcttttgactttagaataaggcctcttagggc

SEQ ID NO: 96973 - DNA, 46156 bp, Homo sapiens
tgaggtggcaggattgcttgaggctaggagtttgagccagtctgaagaacattggaagaccagccccccatcccatcccactcctccccactgcctctacaaaacatttaaaaattagctggtcatgttgctgtgcacctgtggtcccatctacttgggaggctgattactcccctgccatcgcttgagccccgggagtggaggctgcaatgagctatggttacaccacaggctgaaaaaaacataaatgcattcaaatgcagatatcaaaatattaaagatgcaatttatgacattaacatgtgcttcttcaccctcaggtttattaaggtatgattgacaaaattgtatatatttatggtgtacagcatgatgttttgatatctgtatgtattgtgaaatgaccaagtcaagctaatttaaatataattatctcacgtacttattattattattttgagacagagtctcgctctgttgcccagactggagtgcagtgccgcaatcttggctcactacaacctccccctgccgggttcaagcaattctcctgccacagcctcctgagtagctgggattacaggcatgcgccaccatgctaggctaatttttgtatttttaatagagatggggtttcaccatgttggtcaggctggtctcaaactcctgaccttgtgatccgcctgcctcggcctcccaaagggctgggattacaggcatgagccaccgcacccggcctactttttaaaaaatttttattttagattcaagtagtacatgtgtatgtttgttacatgggaattaaatgtgtaatggtgaggactgggcttctagtgtacacatcaccaaaatattgaacattgtacccagtaggtaatttttcaccccttcctcctctcccactctccctcctttggagtccccagagtctatttgccccatctttatgtccatgtgtgccatttgtttagcttccccttgtaagtgagaacatgcactatttgatattctgcttctgtgttggttcacttaggataatggccttcagctgcatccatgttgctgcaaatgacattattttgttctttattgtgactgtgtagtattccatggtgtatcgccaccacattttctttatccaatcaactgttggtggacacttaggttggttccatgtctttgctattgcacataatgctgtgacaaacatatgtgtgcaggtgtcttttttatacaatgatttcttttcctttggatagatatacagtagtgggatagctagattgaatggtagttcccttcttagttcttggagatatctccatactgtttttttgtagaggttgtactaatttacatcctcaccaacagtgatatacttaccatttttgtgtggtgagaacatttaagatctactctcttagcaattttcaagtatataatacattattatttactatagtcaccatgctgtacaatagatctccagaactgattcatcctcaccgaaactttgtacatgttgaccaacatctttctatttctcccaccccagtccctagtagtcactattctactctctgcttctaccagctcaaattttcaagattctacacataagtgagatcatgcagtatttatctttctgtgcctggcttatttcacttagtgtaatatcctctaggtttgtccatgttgtcacaaatgaaaggatttccttctttttttaaagctgaatagtattctgttgtgcatacataccacattttctttatccattcatccactggtggacacttagttgattccatatcttggttaatgtgaagaatgctgcaatgaatttgagagcgaaggtatgccttcaacgtattgatttcagttcctttggatatatacctggaatagggattgctagatcatatggtaattctgtttttaacttttttaggaaccacttactgtttttcataatggctgtactaatttacattcccactaacagtatgcaagggtttccttttctctataccctcaccaacacttgttatctttcctgtttttgaaagtagccatcctaacaagtacgaggtgatacctcattgtggttttgatttgcctttctgtgatgattagcgatggtggacattatttttttatatccctgttggccacttgtttgttgtcttttgaaaatatttattcagatcctttgctcatttttaattgttttttttacatttattttaattttttttagctttaattttcatgggtacatagtaggtatatatatttgtggggcacatgggatgttttgatacaggcatgcaatgtgtaataatcacatcatggagaatggggtatccatcccctcaagcattaaacctttgtgttacaaatattcccattatactcttttagttatttttacttatacaattaaattattattaactatagtcagcatgttttgctatcaaatactaggtcttattcattcattcaagctattttaattgagttatttgttttctttctagtgagttgtttgagttccttacatattttggatattaaccccttatcagatatactgtttgcaaatattttctcccattctgtagattgtctctctttgttgattatttcctttgctgtgcagaagctttttagtttagtgcaattctatttgtctagttttgcttatgcttttggggtcatatccaaaaatttattgtctagaccaatgtcaagaagcttttaaattatgttttcttctagtagttttgcagtttcaggccttatgtttaagtatttaatccattttgagttttttttaatatagtataagataagggtccagtttcattcttctgcatgtggatatccagttttcccaacaccattaatttttttaactttctttctttctttctttctttctttctttctttctttctttctttctttcttctttcttctttccttctttcccttttttatgaatagagatggggtctcactatattgccaaggctggtctcaaactcctgggctcaagtaatccacctgcctcgggctcccaaagtgctgggattacaggcatgagcaccatgcctggcccccaaaatcatttattgaagagactgctgtttccccattggtacctttgttaaatatcaattgaccataaatgtgtagatttatttctggactcttattctgtttccttagtctatatgtcttttttatgccattaccatgctgttttggttactatctctctgcagtataatttgaaatcgggtaacataattcctccagttttgttctttttgttcaggatggctttggctattctgtgccttttgtggttccatgtgtatgttagtattttttattattattgctgtgaaaaatgtccttggaattttgatagggattgtattggctctatagatcactttgggtagcatggacattttaacaatattgtgtgttcttttttattaacctagcaaatagcacgatctagagcaggtctataatcatcacaatttttaaatagtgatgagcataactgatcttatgagatatttgcaacagctataatgtgatatgaaaatatttttgatatatgttggtgagaaagttgcagacactgataataagactgtaatttgttgactacattcaattagaaatgaataaaaataaaggtttaatttttcccatcaaagtccaaagagcacccctaaattctattcacagaacctcaggggaggaaatcttgtaccagagagtccattaattagtataaaggatgtaagaaataatatttcattggtgaaatgaattctgttaaaaatatgtgcaatggctagaaattttgtccatgtatgaaggtacatgcttgcatgaataaaagataaaaatctggcaagccagcccaacagttcagcatgttctggaatggcatctaggcctcagactttgtgtgatcctataaagagccagcttgccagatgtccctagtgataataaatgttattttcagccactacatgttgggggtaatttgtaacacagcaataaataaataaaataaataaatagtatcacgtaatagaagattttcctgttccaaccagaagataggttgatcctgttaccataatattaggccaactatttcatgtggattttttatgtaaaggacttgctggagttcctaaagatcagagcatgtattaggttggtgcaaaagtaactgcagttttcgtcattgcttttaatggcaaaaaccgcaattacttttgcaccaacctatacttgacccactttacaaggaaagactgtgtgactgttttggtccctgattgctaataactgtatgtgtcatagaattcagtctgacaattactttcattttaatattctacctagtaaggaggttgtaggagaggtgacttatggccctcgcctacctctaatattcagacgcttcttaaatctaccaaaaacaacgagtttaggtccatttgcaaagccctaggtaatctgacttttatctacctctctgaacttacctctccccacctaccctcacttctgtccagcaactctggttgtattcatttgctgggatgccatagcaaagtatcacaaattgagtggtttaaataccagaaatgtgttgcctcatacttctggaggcagggtttgttccttatcagggtctcactctgtcgcccaagctggagtgcagtggcacaatcatggctcactgcagtctcgacctcctggggtcaggtgatcctcccacctcagcctcccaggtagctgggaccacaggcatgcatcaccacgcccagctaatttttgtattttttgtagagatggggtttcaccatgttgcccaggctggtcccaaactcctgggctcaagctatccactcacgtcagcctctcacattgccgggattataggtgtgagccaccacatctgcctgggtttgttccttttgggggctgtgaggaagaatctgttccatgcctgtctcctatcttctggtggtttgctggctatctttggcattccttggcttatagaagcatcaccctgatctctaccttcatctttatatggtgttctccccatgtgcatgtttgcattcaaacattccccctgtttttagccaggcacagtgcctcacatctgtaatcatggctactcgcaaggctgacgcaggaagattgcttgaggctaggagttcgagaccagtctggatgatctaggaagaccctgtctctgaaaaaatttaaaaaaataaataaataaataagtaaaaaaaacttgccccctttttataaggacacagtcatattggattaggagcctaccctactccagtatgacctcatcttaactaattacatctataaggtacctattttcttttttctttttctttttcttttttttttttttttgagatagagtcttgctctgtcacccaggctgtagtgcagtggtgcgatctcagctcactgcagcctccacctcccgggttcaagcaattcctgtgtctcagccttcctagtagctgggactacaggcacgcaccaccatgcccggctaatttttgtatttttagtagagatggggtttcaccatgttggccatgactggtctcgaactcctgacctcacttgatcagcccacctcaacctcccatagtgctaggatcacaggcatgagccactgcacccagccagttccctattttcaaataaggtcatattctagggcactagaggttatgtcttcaacatatgaatttttggggagacacaattcaacatataactcttgccttcttgctgttcctctagcacactaagctgattttcatttcaggtcctttgtacatggcaagtctttctgtctagaaccctaaagaagcctggctgttcccgtctcagcatacacatgttatctcatatgccaccttctcaaaaaggacttccctgatcactctatttaaaatagcctctccagatacgtttgtcagcttgctcctttctgcctgtggatgccaacaaagaagcatcattaaagtctctcttctcccttccgtcgtgtctaagtcagagtctcctaaagagcccgaatagctgaggaagctcttcattggagagttgaggtttgaaacaaccgacgagagcctgaggagccattttgagcgatggggaatgctcacagactgtgcggtaatgagagatccaaacaccaagcgctccaggggctttgggtttgttacatacgccactgtggaggaggtggatgcagccacgaatgcaaggccacacaaggtggatggaaaagttgtggaaccaaggagaactgtctcaagagaagattatcaaagatcaggtgcccacttaactgtgaaaaagatatttgttggtggcattaaagaaaacactgaaaaacatcagctaagagattattttgaacagcatggaaaaatggaagtgattgaaatcatgactgaggcagtggcaagaaaaggggmtttgcctttgtaacctttgacgaccatgactccatggataagattgtcattccgaaataccatactgtgaatggccacaactgtgaagttaggaaagccctgtcaaagcaagagatggctagtgcttcttccagccaaagaggtcaaagtggttctggaaactttggtggtggttgtggaggtggtttctgtgggaatgacaactttggtcatggaggaaacgtcagtggtcgtggtggctttggtggcagccatggtggtggtggatatggtggcagtggggatggctataatggatttggtaatgatggargcaatttggaggtggtggaagctacaatgattttggcaattacaacagtcagtcttcaaattttggacccgtgaagggaggaaactttggggcagaagctctggcccctatggtggcggaggccaatactttgccaaaccaccaaaccacagtggctatggtggttccagtagcagcagtagctatggcagtggcagaagatgttaattaggaaacagagcttagcaggagaggagagccagagaagtgacagggaagctgcagtttacaacagattcgtgaactcagccaagcacagtggtgacagggcctagctgctacaaagaagacatattttagacaaatattcatgtgtatgggcaaaaaacttgaggactgtatttgtgactaattgtataacaggttattttagtttctgttctgtggaaagtgtaaagcatttcaacaaagggttttaatgtagatttttttccttgcacccatgttgttgattgctaaatgtaatagtctgatcgtgacgctgaataaatgtctttttttttttaatgtgctgtgtaaagttagtctactctgaagccatcttggtaaatttccccagcagtgtgaagttggaattccttcagggtgatgccaggttctatttggaatttacatacaacctgcttgggtggagaagccattgtcttcagaaaccttggtgtaattgaattgatagttactgttgtgacctgaagttcaccattaaaagggactacccaagcaaaatcatggaattattggttataaaaatgattgttggyacatcctatgcaatatatctaaattgaataatggtaccagataaaattatagatgggaatgaagcttgtgtatcatccattatcatgtgtaatcaataaacaatttaattctcttgaatgaaatgacaactctatggatttgggaatggcagagatttggactttccttacccactacccctgattatgttgaatgcttctatcacaattcaagttcaaagctctgccaggaatagaaactagctgctggctaatgctgctccataaacccacagatttgaagtgtttgggcggccttttaaaaatgaccatatcagaaagcattttaatgagcataaagataggcttccattaaaggagaaaaataaaatagcctctctacctcacacacatcattccctactccctttcctgtttcagttttcttcatagcactcattactacctgaaatacttttattttcagttgtttttatctgtccctcccaccagaatataagttccttgaggacaagaaacttgtttgtcttacttacttctgtatcattagctcctaacataatgcctgttcaaaattaaatatttaataaatgttgaatgaacattgaatgaacactcactttgttctccaattgagtctctaaaaaatccagtagaatcaagtttccactgagaaaatacagcttatttcaaactcctaaagacattcattttccccctttgaaataaactacacctatctaagagaccaattataaaacaataaaatactcctctctcccacagttgccttttttctctcttcttgtactaccaggaaactacttaatggtagcaaaaatcagagtgaagagaggttagttccaagacagaaacacattgtcaatctttactcaaagattgtccatcacctgctctctctccagcctarctagctcttttcaggcccgataggcacacattaatgggcctggctggaccacctatgagacagaaaagggtgatcccttccattagattaacaggctcagaaaagactagggaactaagctgactccttttttttttttttttttttttttgaggcggagtctggctctgtcacccaggcctaagtgcagtggtgcgatctcagctcattgcaacttccacctcccaggttcaagcaattctcgagcctcagcctcccgagtagctgggactacagggactacaggtattaaccacgtctggctaatttttgtatttttagtagagacagggtttcaccatgttagccaggctgatcatgaactcctgacctcaggtcagccacccgccttgacctccccaaagtgctggaattataggcgtgagccactgcacacagcctaagctgatttcctcttcttcttttttttttttttttgagacggagtcttgttctgtcacgcaggctggagtgcaatggcataatctcggcttactgcaacctccaccccctgggttcaagcrattctcctgcctcagcctcctgagtagctgagatcacaggcgtgccaccaccatgcccagctaatttttatatttttagtagaggcggggtttcaccatgttggccaggcaggtcttgaactcctgacctcgtgatccgcccacctcggcctcccaaagtgctgggattacaggtgtgagccaccccacccagccctaaactgacttctagctgagatttctgaatgtaagagctttaagtcagagcaatggctgttttgttcctcagaggtttttcaaaagagaattgtccacttcgagttctgacctgcctgaaaattgagtggtgaacctaatgacctcctgcctgctgcctcccagctcttatatgacttatgacaattactaagacaaattgatatctaaacaaagtctcttggggattttttgattattgtttgctttcatatcttctgaatgatcaaaagaggactctaacaggaacctttgatgtttatccaagtaaattcaggtttttcctgcaataacgaaagtaagcttgtttgtggtttgtgaagatttaagcaaaggaggagagaaaagttgatttttaaaaactgtttcttaaaagacaaatctttaaatgaacacaagaaagaatttaatttaacaattttctgagatcaggttccaacttttttctatttaatctttttccaaacctgcttaagtcagtagtttttaagcccttgtgagttgcagacaccttaggacaaagcatctcaaatttaatatgggtatgaaccacctggtggtcctactaaaatgaaaattctgattcagtaggtcaggggagggcattgttggatggatcaaatgcatctccaagcttccccacttgggcacccactttggcttcagcccacctccaaatgcccaatgcactcctgtttttcaaagtccactgctgcagtatcccattctaactattaattcttgtcagatgcccctgctacaaatctttctgtttttacctcaccttcaagtttacctctcttaggtgtgtttctctctggaccctactctcagtgaaaatataatgagcaacaggtgatcgtgggttgatgagttatttctctttctcccttggacagaagaccaagtccactcatccctccaccaccacaaggtaacaatggaatttaactatagctttcaggaacaaagcttttctcaaaggaaaaattccaaatggtaaaatttttctgccttataacacactaatggaaaggctattttttagtggtttggagaggaggaatagaatttctaatttctcagaaaaaaaaatccatacaacctacttagataactgccaatctgacctgcttacactctgctctgcctctcatctgctctggtcccattaaaagcaacattgtcttattttagaaatggaaccatgaaactgttaaacgaccagttatttcatggttatgtccaaagtggttgaaattccaaagtaagggaagcaaccaatttatctttttattttcttttttcttttttttttttttttactgagagaccttgatgacccatggttaagagcttcaaagcagcgtccaaagtcttaaccatgaaaatatttttcttaactgcaaagagggctcagtcttcacaattcaaattgtctcatcttgtactctccggaagggagggcaaatatttgcattctgttctgggagaggtcccttccgctaagaatgtgttaagtgctcctaatacaacaaaggaaaaggatttttttttaaagcagttgcatttccttatttaaaaggccaatcatttacacactgctttacttgcaaccgaaatagttccaatgcatttatccacagcacattatgctgatggtagggactgtacattgtcaacctttagctctgaaaacttgtgactttatcttcttcttcttttttttttttctcgagacggagtctcgctttgtcacccaggctggagtgcagtggcgtgatctcagctcactgcaacctccgcctccagggctcaagcaattctcctgcctcagtctcccaggtagttagctgggattacaggtgcccgccaccatgccyggctaattttttgtgtttttagtagagatggggtttcaccacgttggccaggctggtctcaaactcctgagctcaagtgactcgcccgcctcggcctcccaaaatgctgggattacaggtgtgagccactgcacccggcttatcttctttcccaggcagagtagtcagttcagagccagtaaatatggttgcaggaaagtcttttctttaccatctgtattactttcctattgctgctataacaaattactataaacttggtggcttaaagcaacacacacttattatcttatggttctggttgtcataattctgcattgggtctcactgggttaaaatcaaggtgctgacagggctgcattcctttctggaggctctgggggagaagttccagcccacattccttggctcctggcttcctttctctatcttcaaagtcagtaagagtgggtcatgttctcatatctcatcactctgacttctgtgtccctcttccatttttaaggatccttgtgattacattaggccacccatagaatccataataatctccctgctttggggtcagctgattagcaaccttaattccaccttcattcccctttgccatgcaaggtaacgtattcacaggcttaggatgtggacatctttagggggctattattctgcctaccacaccatcacatgacaaatgtttattgaacatctactgtgcatagagagctttgtgctctgccttaaggagcaatctggataagataggacttgctcagaaaagggtaaataacaatgggaggtttcacaggctatgagagaggtaagaagatgaggaactcatgctatgtcatgctataaaaattggaagacagtgtggtatgatgactgaggtggtcagagaagacttcctggaagaggcagagcttaatcggtcttcaagaaaaggcaagagttgaatattgtttctgagctgaataagtctcacatatacacttttgagggcagatttccaaagtagcagatgtaacatgaaagtactcattgctattctagtgatgtctccatgatacttactggcctaaaaatcactgttatacataccagctcatttgatgctcaccacagccctgtgatggaagtagggagaacagggaactacataaacctttccatcattgagtccccaggcccctttccaggcctagggccacccccagtgttctttcttccttatggccatggggataccacctgttttcttctttggtaattactccccaagcctagctgcagaatgagacacaaactctgcaccttcccagtttcttgctactattgaagccaagcacacaggctcatttaaaatttgctaaactctggagaaaacagggtaaaaccgacggacataaggtagtgacaaaagtttcataatcttacaaagtttgtataataatggtctctgatctatagtttctgctccccttttcaatagcaaaagaaagtaccattgagtttaggtcctctgcttatattttcttagggctcatcatcatcatcattattatagcaagcaactatggagtgctttttatatgtcaggcagtgttctcattgctttccatactttaactcatttaattcttataacaacccattttatggataatgaggcaggcttcaaacctaggtagactggctctggaatctatatctaaccagtacaccatactgctctaccatctcttccgtaccaccactttgccttctgcctatcaatataggctacaatttgaacactttctccatgagggatcagtacgctaggttacagatgaagaaactgaggctgagcaaagttagacttttccaagggagcattaatagtgagtggggagctggaggtcaaatccagctccatcataccatattgcctttacaaggtgctactttggtgaggtctggttctgctccaacatagtaaaaagaattgatttcaaataattccacatgtatcagtccctcttatcattatgggatgtttcatttttggacgctgtaatcaagaccaaattaatacctttaaaggctctaagatttaaaagaaacaaatgggccaggcgcggtggcttacgcctgtaatcccagmactktgggaggccgaggcgggtggatcacgaggtcaggagatcgacaccacagtgaaaccccgtctccactaaaaatgcaaaaaaaattagccggkcgcggtggcgggcgcctgtagtcccagctactggggaggctgaggcagcagaatggcgtgaacccgggaagcggagcttgcagtgagccgagatcgcrccactgcactccagcctgggcaacagagcaagactccgtcttaaaaaaaataaaattaaaataagtaaataaataaataaataaacgaatgtcctcccaacaccatcctctatggattcaaattaaacgtaattataaacaataaaataagtaaaacaaactatcattttccccatgactacttaaatttttgtttttgaaaaccaaccatcaaattcttttataaattcttaaaataattctcaaaacaattttttctgatgtcctaagcacatgtttaaactgttaagtaattcaacactctctgttatatattaattcctggaagaggtgtacaagagttgtaactgtaaaggcaaatttgggacaaatgaggacagacacaagtgatcagggagaagacacaacatgcaggtcaggtaagggctttgtgtttacagtttgcaagaatccacctaccatgggtgggatcaaccgtctacaggaaatctttccaaaagactgcagtctatggtaaaactgtgaataagttactgatgacatttaagtactccctagagatctccaggaagcaacctcaaatttagtcaatgcygcataatccataaacctgggaaatgcaaacattaagacaggtgaagcaatacagggtggaggggactattataatgtctagagccaacagaaggaaagcaattctgggagaatttacaaaaaagggaggttgatggtgagaagttttgtttatttattttaacttatttttattttactttaagttctgggatacatgtrctgaacgtgcaggtttgttacataggtatacatgtgccatggtggtttgctgcacctatcaacccataatctagtttttaagccctgcatgcattaggtatttgtcctcatgctctccctccccttgcctgccaccccccaacaggccccagtgtgtgatgttcccctccctgtgcccatgtgttctcattgttcaactcccacttatgagtgagaacatgcagtgtttggttttctgttcctgtgttagtttgctgaggatgatggtttccagcttcatccatgtccctgcaaakgacatgaactcattcttttttatgactgcatactattccatggtatatatgtgccacattttctttatccagtctattattkatgggcatttgggttggttccaagtctttgctattgtaaatagtgctgcagtaaacacacacgtgcatgtgtctttatagtagaatgatttctaatcctttgggtatatamccagtaatgggattgctgggtcaaatggtatttctggttctagatccttgaggaatcaccgcactgtctttcacaatggttgaactaatttacactcccaccaacagtgtaaaagcattcctatttctccacatcctcgccagcatctgttgtttccagactttttaatgatcaccattgtaactggcgtgagatggcatctcattgtggttttgatttgcatttctctaatgaccagtgatgatgagctttttttcgtatgtttgttggccacataaatgtcttgatggtgagaagtttttagtgtgtccggcattgcccaagagagggaggtttcagatttggggcatggatattttagttgaatttgctggtgtaatcttaccttgaaaagggccaagtgagtttgctgctgcagcttaatagtaatattccgttaagatcatctgactatcttagctcagattctgtgatcaccagcttatcaaaagacttcctagtactctgatattgggaatgggggtcctacctcacagacataagggtccaatcagcatggcatatataattctttagataatacataaattgtcatccagattatagatcattcttttatgaatcacaggatctcaatgttggagtatatttaagggacatttagttaaccatctacctggtgctgatattccccttataaaaagctgacaaggggttgtccatttttccttgagagtctcaagtaataggaaactcattacctctttacttctctgaatacccgtgttggaaaattctgctttatattgaaaaaaaattgtgttactttatttatttttatttttattttttgacacagaatcttattctttcgcccagtctggagtgcagtggcgtgaccttggctcaccacaaccctcgcctcctggattcaagcgattcaagtgcctcagcctcccgagtagctgggactacaggcatgcaccaccatgccaggctaatttttgtatttttggtagagatgggggtttgccatgttggccagccaggcttgtctcaaactcctgaccccaggtgatctgcccgcctcagcctcccaaagtgctgggattataggcgtgagccaccatgcccaacctaaagtgtgttactttagagcctctattccttggttgactccttgggtcacatacaaaacaatctaaatcttcttaaaaaaaatrtagataaactcatgtccccgataaacctctttccaggccaaattccctacactctttaaatcctcctaatataggatgctttcaactcattacatcatcttggtcacccttccatggacaggctttagtttctcttttaatgtgtggtcttgggcacgggcaagtgtttttgtaaaatttacaaatgtaaaatattttcattgctagtgattgactgtctcttaccactccaacttccctctgtcacacttcccctcaggtcaagtgatgctggagtggccatgagcatttctggaatacagataagaggttgttgtgttggtggtatatttagtttggatttaggagaatatatattatgtggttcactgacacttctatatctagttaactgattgatarctgccttagtgtagaaatggcttccagraaaactcctaccacccactgtgccaatttcacctggcattatgatactaaattgcaggtgtgttcagcagctaatgaaaatgttgtttttatgggttttgtgatgttgaagagatttttcagctttttacaataaatataaaatgtgctgtgcattgcgctatactccttataatgggaacatttcatggcatataaattatacctcaataaatctgttaattgtgctgtgctttcttttctgttttaaataaatatttgcttttgtgcctaaagtaaagtaaaataaaaatatgtagcagkatatctacaaaacctatacaaaacattctacttaagggtgaaatggaagaatcccctttgagattgggaattaggcaaggggatcactacttctacctttgtgcagcattgtactagaagttctagtgagtgcagtaagcgaagaaaaagaaataaaagttataagaattagaaaaaagaaggctgggcacggtggctcacgcctgtaatcccagcattttgggaggccgaggcaggcgtaycacctgaggtcaggtgtttcagacctacctggccaacatggtaaaacccagtctctactaaaaatagaaaaattagccgagcatggtggtgggcrcctgtagtcccagctactcgggaggctgaggcaggagaatcgcttgaacccgggaggcagacgttgcagtaagccattgcactccagcctgggcracaagagggaaactccgtctcaaaaaaaaaaaaaagaattagaaaaaagaaataaaactgtgtttagagcgaaaaatgtgactgtgtttatagacaatgtaagacaaaatacagaaatattattacaattaataagtgagtttagcaatgttgctgggcataaaaatcaatatgtaaaaacaaattgtatctttaacagccatcattaaaaattaaaattaaaatatataatttacaacctcatgaaaacatataaagttcttagaagtggatataacaggctgggcacggtggctcatgcctgtaatcccagyactttgggaggccgaggcaggcggatcacgaggtgaggaggtcgagaccatcctggctagcayagtgaaaccccgtctctactaaaaaatagaaaaaattagccaggcgtggtggcgggcgcctgtggtcccagctactcgggaggctgaggcaggagaatggcgtgaacccgggaggtggagcttscagtgagccgagattgcaccactgcactccagcctgggcgacagagcgagactccgtctcaaagaaaaaaaaaaaagaagaagaagtgaatataacaaaggagacgcaagaatttgattataaaatttacatgaaaatgaaaaaggccaagaataaaaacaaaacacagaaccccccctccccccaaaacaaagaaacaaacaaacaaaaagtcaagaatagccaaagcactcttgaagaacaaggtggggaaacttgtcttatcagatgtcaagacttagtaattaaggcagtggcatggaagaactgaatggagagctccggaacaaactcgtgtatatagacatttcatatataatagaactgacattttagatcagcgaagaaagtatatttttgaaagtacttttcaaaaatggctgagcgcagtggctcatgcctgtaatcccagcactttgagaggcccacgtgggtggatcacatgaggccaggaggtcaagaccagactggccagcacagcaaaaccctgtctctactaaaaatacaaaaattagccaggcatgatggcgcttgcctgtaatcccagctactcgggtggctaaggcatgagaatcacttgaacccaggaggtgaaggttgcagtgaagggagatcacaccactgtactccaacctgggtgacagagtgagaccctgtctcaaaaaaataaaaataaaaataaaaagtacttttcaaaaatgatgctggggcaattcgttttccatatttaaaagtagtaaattggataccatacatgaaaatcagctccaggtggattcaaaacataaatgtaaaatgcaaaaatataaaatttctagaagaaaatataaaagagtatcttgatatctgggtagtgatggatttctaaaacaagacataaaatgcataaatcataaaagaaatgactggtaatcagagtgcattaaaattaagaacttccatttatcagaaaacactattaagagactgaaaagacaagccataaacataagcaataaaagattagtataagattataaacagaaccctaagaatctaaaagcaaaagaaaaaccaatagaaagatagaccaaaaagtagaataggctcagaataggctcttttaaaaagagaaaactcaaatggccagcagttgaattaaaagatgctcaaactcattagtaatcagggaaatgcaaattaaaatcataatacgatagttttccacacttacttgaattataaaaacaaaaaagtctggaaaataccaagggttggtaagcatgtagaggaagtagaactctcattcataactctctgtagtatacatttaggtggtcacttcggaacgggtttggaattacacagcaaagtagaatatgtgcaaatctcaggaccctggaattttactcctgggtatataccttagagaaactgtagcatatgtgtgacatttgatcaacattgttccatcatcatatccatcagtagtaggatgaatgaatacattaatgtatattcattcatgcaatggcatattagatagcagtgtaagtgaaccgcaattacatgtacatgtatgaatctcaaaaacccaatgttgaaagaagcaaaccacagaagcatacatacacactgccaggtttcatttacaaaaagttcaaaaacaggaaaaactaaacaatatattgcttagggatgcaattatagttagtaaaaatataaagaaaaataacagaatgattaccccaaatttcaggatagtgattacatccggtggggtagaggaggggaagaagatagatgtgatcagggagggaaatacaaagagctttaagatactggagaaaaatagtctattttctttaatctgagtagtgaacacatagatacttattccttaaaattattctttaagttacatatgtatgttttatatactcttctgtgtatatttcaccattttagaaaagggaaaaaaaatcagtgcccagagctgaacacacaactctagtaaatctatcatactagaagacaatcatctccattcttttgagtgctctgcctctgtttattttgaaccaaagtgcacttttatacttgttaaattttctcttgctctatttggcccttcttttcacttgtccttccagccagtcaagttctccccaaagccatcatcatatatgtcaaccacagatcatcctccaggggaactgktatgctaaagtttctgagctagccaggctgaaatccaaatggcagccggcagatgtggcaacagtttgaaaagtgcactttgaaacagcttccttaccacacacgcttccctccctacttctcctgaagtaatctgtttacagacccagactaataatcttttttatgagaaactttagcaaatcttttatctaggaaggcaatgcttcacattaggtcatgttgataagatgatgagagagaatattttcatccaagaatgttgctatttcctgaagcagtaaaatccccacaggtaaaacccttgtggttctcatagatagggctggtctatctaagctgatagcacagttctgtccagagaaggaaggcagaataaacttattcattcccaggaactcttggggtaggtgtgtgtttttcacatcttaaaggctcacagaccctgcgctggacaaatgttccattcctgaaggacctctccagaatccggattgctgaatcttccctgttgcctagaagggctccaaaccacctcttgacaatgggaaactgggtggttaaccactggttttcagttttgtttctggtaagtgatgtttgacttcctattaattaggaaggattaaggagaaatcatgttttttaatatttgtaaagcaatttgaaagagaaagatgattccatgccgattattgggctcatcaagaccagttagttaaaaaatacaactrtgggtcagatgagaggacagaggcaaataacatgcaattgttcatgttgtcaaatcacaagtatttggaatttcaatctgttttcattttctgtcatctccctttctcttccatctcacttctaactactaccatgagtgctgatttctctctatctttcctatactggtcccatcaagatttcaaaaagtcactgaatgtttgagatgaaagtgatcttagagatcatctggcccagtactgaccactagaaatatagcaaaccacataatgtaattcctaaattttctaatacctacaccgaaaaggtaaaaataaacaggtgaagttaatatttaacaatataattcatttaacccaacatatcaacaaatcctttcagtatgtattcaatattgaaaatattaagaagctaatttacatatttttatttttactgagtctttcaaatctgatgtgtatatatacccacagcacatctcagtgaggactagccacatttcaagtgctcagcagccccatgtgggtagtggctgtggcattgcatagtgcagatgtaaaccaacttattgattgtacaaaggaaaataagacctagatgtcacacaatgaattgactgaattggcatcactcgaacccagctccccaatgacgttcaggccagaacccctttatcaccctttgtatgcacaatccctttctcctaacactctaacacctctctccactctcattcttccatttctgagccacagttgagcctggggctccctgtgtcctttctcactttcctagatcttcattcattactctttctcttttctcctgttttgcttttgggtcccacaggcaaaacagaagagagaaggtgtgatgcttctttttattcctgtctacccccccgccccccgaccaggtgctccagggaaaaatatgtggagtttccctggagggttgtttgttttacatttaacaaaagtgcttattttgtcaggttatcccatgacatattttaaatgctcaatgccttatattgagttccttttgcactataatggaaagaacactagtttaggagaaagggaacctggcaagtactttgaattctgctactaactgggtgatctcgatcaaattatttatcctctctagacttcaggtcctgtgggtgtgtaggtggggggaattgggcaggggaggggagcaggggattaataaagtgactagattagatacaaatataagggtgtttctagctctaaaatccacatttacctgcattttttccccctctcttattttttgctgggagagtttaccagctatgatggtgactcacatttaactctctagctttgaattttcatcccccaccaaaccagctggcaagcttagacttctcattatctctgacatatactcctatgcactgatttttaaataaaaaataaattacttaaaaatagttttattcctccttcctcccaggtcttgtagtttaccttctttgacgttcatagtggaggaaatgacagctaagatggggaatggaatgccttactcctagatatcactgtatttcatcatttgccttgcctacaattgatgatgggctgacacagttatttgcccctgtgtctctttgcgatccagaaatatttctgctccctctaaataaacttctctcctctgtcttccaaattcttgaggtgtctgtgactgttgactttcttttctttcaaagacgtttctctggaagacactcagctctggaaaagggtaactgagcaaaggaggcaggaagaaattgattggtaaagcaggttcggtggtgacacaactctgtagctagcacttattgatctcttactaagccccaagcattgcattaatcactttacacgcattatctgacgtaagcctcatagcattactataaagtaggtcctgttattatcctcattttgcaggtgaagaaattgaggtttagaaaatttaaatcatatgtctgtctgagattatagagctattaattggtgatgctacaacttgactccaatatcacactttaaatcactatattatagtactaaaggtgtgtgagtggtctagatctagggagtctgaataggccatgtcctaggctaaaggccctttgcctgttgtgctgagatggttctgactcatactgtggggcgagggatatatactagcgccctggagacctgtcgaattacagactagcacctccacacttgggctagagaccagttggttggtcctcaaggcaatgggcagtgagttccaaatttcacctttagccagtgcagagacagaacttggaacaggcaaaagcagtcttaagagctcaaaaaagtccaaaggaaaaatagattaatttgaaaaaagactcacaatctgaaaacagaaaaatgtgtgtcagggtgtaattaaaaaggcaggcccatctggaatggtttagttcttttcagttaggtattgttataggygctaaatttgttctttgtttcttcagatatccatttattcacttattgccatcttttaggtgcaacagtttgaatgctctagtccaagaaatggcaaatgtttctgtaaaaatctagatagtacatattttaggctttgcaagccatatggtctctgtcccaactactctactccgtcattgtatcacaaaaacagccataaacaatacaaaaatgagtagcagtggctaagttccaataccactttatttatggtcactgaaatttgaatttcatrtaactttcacatgccacaaaatattcttctttcgattttctcaaccattagcaaatttgaaaatataaaatataaaaaacaattctgagcttgcaggctgtggcaaaacaggtaatgggccatgggcctcagtttgctgaccctgctctagtctaatgcatgtctcaaagtgctaactcactctgaaagccagttagatactagcaggattgcactcatttaaaatgaaaacaggtaaacacaaaatagccaaaacggcgacactattgctatccctatcccttatttactccttcccatactcaaatttcactttattctttgcatgtttttttttctttctctaggttgtttggttagggctgaatgttttcctgtttgtggatgccttcctgaaatatgagaaggccgacaaatactactacacaagaaaaatccttggggtgagtatcacggttgtcacggatagaatctctattgttttccttatctctgattccagcttctttgtgacccaatgccctgatattctctagggctagggttgccagaaaaagtacagaatgcccaactgactttgagtttcagataaatgacaaattatttttttatgtaagtatgctccaaatactgtatgaaacacaggtatactaaaatatttattttaaaaagtctgaagttaaaatttagcttagcatcctgtatttttattaaataaatctgataaccccatctagggcacactacccagacccaataaaggaaacatgcaataaagaaaactattaggcagttgttttcaaactggtttccagaaactcaggtgttcctacagggtatgaggggaaggctaactgggcagtgctcctgctcctgctcctgcccctatttcttttttttttttttttacaaggaggaactggtaccattcttctgaaactatttcaatcaatagaaaaagagggaytcctccctaactcattttatgaggccagcatcattctgataccaaagcctggcagagacacaaccaaaaaagagaattttagaccaatatccttgatgaacattgatgcaaaaatcctcaataaaatactggcaaaccgaatccagcagcacatcaaaaagcttatccaccatgatcaagtgggcttcatccctgggatgcaaggctggttcaatatacacaaatcaataaatgtaatccagcatataaacagagccaaagacaaaaaccacatgattatctcaatagatgcagaaaaggcctttgacaaaattcaacaaccyttcatgctaaaaactctcaataaattaggtattgatgggacatatttcaaaataataagagctatctatgacaaacccacagccaatatcatactgaatgggcaaaaactggaagcattccctttgaaaactggcacaagacagggatgccctctctcaccgctcctattcaacatagtgttggaagttctggccagggcaattaggcaggagaaggaaataaagggtattcaattaggaaaagaggaagtcaaattgtccctgtttgcagatgacatgattgtatatctagaaaaccccatcgtctcagcccaaaatctccttaagctaataagcaacttcagcaaagtctcaggatacaaaatcaatgtacagaaatcacaagcattcttatacaccaacaacagacaaacagagagccaaatcatgagtgaactcccattcacaattgcttcaaagagaataaaatacctaggaatccaacttacaagggatgtgaaggacctcttcaaggagaactacaaaccgctgctcaaggaaataaaagagkatacaaacaaatggaagaacattccatactcatggataggaagaatcaatatcgtgaaaatggccatactgcccaaggtaatttacagattcaatgccatccccatcaagctaccaatgcctttcttcacagaattggaaaaaactacttcaaagttcatatggaaccaaaaaagagcccgcatcgccaagtcaatcctaagccaaaagaacaaagctggaggcatcacactacctcacttcaaactatactacaaggctacagtaaccaaaacagcatggtactggtaccaaaacagagatatatatcaatggaacagaacagagccctcagaaataatgccgcatatctacaactatctgatctttgacaaacctgagaaaaacaagcaatggggaaaggattccctatttaataaatggtgctgggaaaactggctagccatatgtagaaagctgcaactggatcccttccttacaccttatacaaaaatcaattcaagatggattaatgctcctgcccctatttcaaccaaagcagactatatctatctatgaacacctgcttacaattttaagaaagagtttggtttttttttaaaaaaaaggaaagtaaaaaagaaaaaacaaacacaacttgaaaacactgctgtcatggaaacatacctctctatcaaataggagggatacttaggggagtctcatgggtgctacagaattcaaggcctgcagaaaggagggctcaggtcaaggttacagaacctgagaagcttggggaagtggcagatcaaaaacagaagagggagggagggagtgggtagggcacaggggtgtggaggtgaccaggaggaagcacggagttgaggatggttctctcacaggctgatgaacccggatgctgcctggttagaagagcatatttgactgctacctctagtctattatgcaataacagatagaggattttaaatcactttcatcttgacagtgtcattttttcagtagcttttggtatcttcccaatgtacatgtttaaagacagcttgtccttttaaaaaatgcttttttctctctccataatcaaagaatccatgttgagatcacaactaatttgaacgttctgttcatggtttatttcaccctgctgttttccattttaaatgttcatccttgatccttctttagaaactataactccaaaggaggtattaatttgctttaaaaatagctttttactaagagaatgatgcaataaatgtgactagttattaacagcttgattactacatgaccaaaatgtcagcagcacaaaaataaattatgctgatgtcccatggacatttttttttcaaaattatttaaaaattgtttacatatgtagggggtataagtgcaggtctctttctttccttctttcttttttctctttcttcctttctttattcttccttccttttctttctctttcttctctctctctttctttccttccttccttccttctttccttctctctttctctytttcttcttttcttttccttccttccttccttctttctttctttgttttcattctttttattttgagacagggtctttctctgttacccaggctggcatgcagtggcatgatcatggttcactgcagcctcgactctcccaggcttcagctatcttcccacctcagcctcctgattagctgggaccacaggtgtgcgccaccaagcctggctaattaatatgccataatttatttaaacattccacagtcattaaaacatttaccatcactgcataactgcatagagctctcagccttttaagagaataacaattcattgcattgatatgccataatttatttaaacattccacaggttatttcttaaattcatgctcaccttgggaaaatacagggaacaatttgattcactatgaagtagagcagataagcagcagaggaagaagtttaaatccataatttaaaaacatttttttgccaggcgctgtggctcacgcctgtaatcccagcactttgggaggccgaggcgggcggatcacgaggtcrggaratcgagaccmcggtgaaaccccatctctactaaaaatacaaaaaattagccaggcgtggtggcgggcscctgtagtcccagctactcgggagactgaggcagaagaatggcgtgaacccagaaggcggagcttgcagtgagccgagatcgcgccactgcacyccagcctgggcgacagagccagactctgtctcaaaaataaatacataaataaataaatactttttttttgtagacatgaggtctccgtgttgctcaggctagtctcaaaactcctgggctcaagtaatattcccacctcggcctcccaaaggccgggtattacaggtgtgagcgaccatgcccagtcacaagtgtaggtttcttacatgcatatattgcatagtgatgaagtctgggtttttagttacctatcacctgaatagtgaacattgtacccagtgggtcatttttcaaccctcactcccctcccaccctcccacattttgtagtctccaatatccattattccactctgtaggacatttcattttttaaatccctattttaaaaccttaattatcaataatgctgcttccaatgagatcaaagcacatattagtttggtgcaaaaattattgctattaaaactgtttgcaaaaaccgcaattacttttgcaccaagcgaatagaagtgtataagtaaaatgtgaaaatctccctcccatcctactccccagagatacacacacacacacacacacacacacacacacagggacacacacactgacataagctcacaaatgtatcagacacgtaggttttgtttttgaggtgggtactatcgtttattcactttttcattttcatatagtaaaatttgctgttttttggtatacagttctatgagtttgggtaaacacatataataagacacacagctttttgttttaaccaaaaaagggatcactttgtagatattggctggaaattgcttatgttaatatatctcagatatctttctttcttttttttttttttgagatggagtctcactctgtcgcccagcctggagtgcagtggcgcaatctctgctcactgcaacctccacctcctgggatcaagcgattttcctgcctcagtctcccaagtagcaggggttacatgtgcgaactttcatggctggctaattttttgtatttttagtagagacggggtttcaccatgttggccaggctgatctcaaactcctgacctcaagtgatccacccgctttggtctcccaaagtgctaggattacaggcgtaagccactgctcccagcctcagatatctttccatgtgagtgcctaaccagtggtgtgctgaaaccagctcataccaggttgcaatgccagttgcgtgcatctcttcccaactctgcattcagtggtgttcaatgacatcaagttagtgtcttgaaatctggcatggtgggagtatttacatcatcaaaattggcaaatgctggaaatcaggaatccccttcctcccaaaaagctagtcattaaaacatttaccatcactgcatcactgcatagagctctcagccttttaagagaataacaattcattgcattgatatgccataatttattgaaacattccacaggttatttcttaaattcatgctctgctcaccttgggaaaatacagataacaatttgattcgctatgaagtagagcagataagcagcagaggaagaagtttaaatccayagtcaattatgcattaatgacagcaggagttcaattataacaccagtgagtggagatctagagaaatgaacatacattggcatatttaaatgtgctgcaacgaggaaaaaatgttttctctaaaaagaattcatcctatacagatagccaccacagaatatggaactgtgaaattatagtcctatattttcaattcacttgccaattttagctttaagaaatctctgtgattcaaataagcaagtagtgggaaccaatgtggaaatgcaggatctctgagatgagcagaggaaatttactcagaagtggaacaggctgtctgtaccaaaaacagtcagggtgtgagtcagcagagggagaaaacacaggtcatgtggaaaagccagaaatggaaaacagtagggcagcttttgttcaccacattgcctgacattcttagccattatagatactaggcagatcttgtcctggcttattaaactaacatcacatgttcctgggtttacgatataaggaaaaatcaattttgtgcttcatagataattacaaaaaggccaagaaattgttaaccttaacccatacccctccttttagaaagtctttgacaggcacacaatgtaaggctggccagtcagcagaagtgcaacaaaaattgcctggctgctgctgtcagctcctctgctacaacattgtcacactccatagcagtcccaagttcatgaagtagactcagagaccggttgtacagagttgaggagagaagtcagatttagctgccatggagttaagcatattctgtccagcttatacctagtaaggcctgttttttggggctaaatgcttctttgaagcattgattccttgtctcctttgctagcagcttctactgctggatcaggttgttcttgatttatgctgcctggccacccaaggaaatcagcttaaaattttgctcctctgaagttctcccttctcaaatatctacctgtttaaaaattttgctccaagaggtttgctagtcttgactaaatttattcaatttttaaagacatcttaaatagaattggttaaaaattttaagtgtttttattatacaactcttatgtgcttataactgcaatattagaaaatacagaaaagaataaaataccatctgtaattgtacctctaagtatgagctttatttaaaatgcaaataaaggtatatatgatccttggccaggcatggtggctcacatctgtaatcccagcactttgggaggccaaagcaggcagatctcttgagctcaggagttccagaccagcctgggcaacatggcaaaaccctgtctctaccaaaaatacaaaaattggctgggtatggtggtgcacgcctgtagtcccasctactcaggaggctgaggygggaggatggcttgagcccaggaggcagaggatgcagtgagccgatatctcgccactgcactccagcctgggcaatagtgccagaccttgtctcaaaaagaaaaatctatatctatatctatatctatatctatatctgatccttaggactcttttacaagtgacaaataacaaaattataataaagagtattaagtaaaatgttacagccatagaatgttttgctaacatgtaatcattaaatcctattctctttcatgttaataaatgtagtcaaacatttccaaactactgtcatgggaatttctcaactcaatattaaattcagtatgttttatgtattttgcaaacagagcctggcctgatggtgttagctactgagagagaggagaggcagctgtagccctgttcatttgcaggcctcagatgagtgggctgggtcagttgctcacgtgctagatggtgaaatgaagcagctgatggtctctttttctcctctgctgtagtcaacattggcctgtgcccgagcgtctgctctctgcttgaattttaacagcacgctgatcctgcttcctgtgtgtcgcaatctgctgtccttcctgaggggcacctgctcagtgagtcccaaccactcctaagtcaactttcacattaaagaaggagaccccagactcctcagtaggacagtccaacaccatgctcctaggaatggaagctagaagtctcctttggtagctaagggggtgggttagtgcgggtgagtattggcatgctatatgcaagacatattggttatgggttagtgaatttaataaagctggctggcgacatctgaccatgatcattctacatttgtagttttgcagccgcacactgagaaagcaattggatcacaacctcaccttccacaagctggtggcctatatgatctgcctacatacaggtaactcaggcaatccatgaatctgcagactccagggcattcagaatcttgcttcattcatccatccatatgcacattcaaaaaatatttatcgagcactgggcactatttgtcaggcactgttcttggcctgttttcatggagcttaagttctattcctttgggaacagagtaaatataaaaaagatctctccgcaatcgagggtttattgggcaccttctgtgcactcagcattctgctaagcactataatgtaggattcttctagtctagtggggcacacctgccatgatgttgctgagatgcctcttaacatttcttttcatctttccatttagctattcacatcattgcacacctgtttaactttgactgctatagcagaagccgacaggccacagatggctcccttgcctccattctctccagcctatctcatgatgagaaaaaggggggttcttggctaaatcccatccagtcccgaaacacggtgagttgactttctagcaaagcatctgagatctggtcatgagcaggaagtgcacaggtggacattgtgtcaggstgacatttctcctttcacagacagtggagtatgtgacattcaccagcattgctggtctcactggagtgatcatgacaatagccttgattctcatggtaacttcagctactgagttcatccggaggagttattttgaagtcttctggtatactcaccacctttttatcttctatatccttggcttagggattcacggcattgggtaagatcctcgaaccctcattctcatgccccagcccctgaccttgcataattctttgtcccaaaccatccttctttgtctatttcagtggaattgtccggggtcaaacagaggagagcatgaatgagagtcatcctcrcaagtgtgcagagtcttttgagatgtgggatgatcgtgactcycactgtaggcgccctaagtttgaagggcatccccctgaggtaagagccctacgggcaaggacagactcttgttaggagctgttactgttattattcttattattactcttattgttattatcatcattattattagttcagtcctgtgctgggtcttatgaaggatrtctatggggttcctacctttaagaaacttccagtatcactggcaacaggcaattacaaggggatcttgaagagaaaaaactaatagttcttgcatgttgtgagaccctctgcaaaggtaataatgatagcccacattattaattgtgtttatcatctgccagccttgctgcataatatggattatttcatttatatatagcaatagcctatgagatattacttcttttttgtctaaattttgaaacaaaaggacaggattccaagagattaagtaaactgacaagctcttacagtaagtagtggagcttgaatacaaacccaggccttttggattccaaaggtttgaactcttgaccactatactgtcccaaagctcagccgtgatattccagtcaaattctggggggaaataaagcattcttgaagtgggctttctttggtgttctaagaatatgcttggaaatttttgttagatactgggtgattatgaaactgtgttctagggaactcaaggtgtgccccagggtaattcttgcggatattattatttacctttgcttgctcacaaaataggttatattgaggagtaaatggaaggggaaggttgatttgtggtgcctcagagtattctgagaatgattaaggtctttaaatcagattcaggattaagagcaatagcttagttctcatctggaacaggaaaaatatataaaacaaaaagtcttctaaagttggcattttaattcagcaggaaaaggataaatgaataatttttagcacaataagatcatcatctgggaaaaaagctatatcttcatttcacgccttgcactaaaatatgaatcgaggatacatgaagcaaaaaaaccataaaagcaccttaagaccacgtgggaagtttttttctaatactgaagtggaggaacatgtttctaaataagataaaccaccctgaagccataaaagaagagataattttgcatggcaaaagaaatccccatcgggccgggcacggtggctcacacctgtaatcccagcaatttgggaggctgaggtgggtggattgcttgagcccaggagtttgagaccagcctgggcaacayggcaaaaccckatctctacaaaaaatacaaaaattagttgggcatggtggtgtggagggtgaggtgaaaggattacttgagcctgggaggctgaggctgcagtgagctgtaatcatgccactgcactccagcctgggtgacagtgagatcctgtgtcaaaataaacaaacaaataaacaaaaattcccattgtaaataaagatagacaaaaaattaccaagtaggaaaagtatttacaactcacagggcatggactaattttctaatatataaataactcctagaaatcaataagaaaaagcctaataacatgataaaaagagaaacagaagatgtgaacagaataatctcagaaatggagatatatccttatcttaaatatatgaaatgatgcttaatgttattcataatggaaaaaaatgccaaataaaactacaagaatctgttaacctaacagattagcaaagattaaaaaacctgctaatgtatggtgctggcaagtgtggaaaaatgctcttatgcattgctggtgagagtgtaaacctatacaactgcttgtagagagtgatttggcagtagcaattaaggtttaaaactcgacttccaatttattccacaaatatacttaaatatgtgttaaattacatgcattaagttattcattacagcattgttgaatagaaaaaaagactggaaacaagtgtccatcagtggggaactagttacattttgggactttcatgcagtggaatagtctgcaaccagtaaaacgaaagagacagtaccatagacactaatagggaccagtctctaagatgttaaatgcaaaaggcagggcagtgtgtagagtctcctatcatttgcattgaaaagatcatttaaatgcatgttctccagaagaattcacaaaataataacattacctctggggatctggaggggyaggaggatttgctttttactattgtactgttgtactttcagattttgtaccatatacatatattacctatttagaaagtaattttctaataagatagatagaatgctagctacacaaataaagaatagaccactagctacactaataaagaaaaaagagagacaatccaaaaaacacaatcagaaatggcaaagaggacattaygactgaccgcacagaaattaaaaaaaaaaaaaccctcagagactactatgaacatctctatgcacacaaactaaaaaaaaaaacaacctagaagaaatggataaattcctggacacatacaacctcgcaagaccagaccacgaagaaatttaatccctgagcagaccaatattgagttccaaaactgaatcagtaataaaaaagcctacaactaaaaaatgcccaggaccagatagattcacagccaaattcttccagatgtacaaagaagatctggtaccattcctactgaaactattgcaaaaaaattgaggaggagggtctccttcctaactcactctatgaggccagcatcatcctgataccaaaacgtggcagagatacaacgaaaaaagaaaacttcaggccaatatccctgatgatcattcattgatgaaaaaatcctcgacaaaatactggcaaactgaatccagcagcacatcaaaaagctaatccaccacgatcaagtaggctttatccctgggatgcaagtttggttcaacatatgcaaatcaataaatgtgattcatcacrtaaagagaactaaagacaaaaatcatatgatcatctcagtagatacacaaaaggctttcaataaaattcaacattccttcatatgaaaaactctcagcaaactaggcattgctggaacatatttcaaaataacaagagccatctatgacaaacccacagccaacatcatactgaatgggcaaaagctggaggcattccccttgaaaactggaaaaagacaaggatgcattctcttaccactcctatttaacatcgtgctggaagtcctgtccagagcaatcaggcaggagaaagaaataaaaggcatccaaataggaagacaaaaagtcaaactatccctgtttgcagacaatatgattctatacctagaaaaccccatagtctatgtccaaaagctcctagatctgataaacagcttcagcaaagtttcaggatacaaaatcaatatacaaaaatcagtagcattgctataccccaacaacacccaagctgagagccaaatcaagaatgcaatcccattcacaatagccacaaaaaaaataaaatacctaggaatacagccaactagggaggtgaaagatctctacaatgagagttacaaaacactgctcaaagaaattagagatgacacaaacaaatggaaaaacattccatactaatggataggaagaatcaatatcattaaaatggccctactgcccaaatcaatttacagattcaacactattcctaccaaactaccaatgacattcttcacagaataagaaaaaaaaactatttcaaaattcatatgaaaccaaaaaagagcccaaatagccaaggcaatcctaagcaaaaagaacaaagctggaggcatcatgttacccaacttcaaactatacaaggctacagcaaccaaaacagcatagtactggtataaaaacagacacacagactgatggaacagaatagagagcccagaaataatgttgcatatccatgaccatgtgatctttaacaaagtcaacaaaaataagcaatggggaaaggactctgttcaataggtggtgctgggataaccggctagccatatgaagaagattgaaactggactctttccttacaccatatacaaaaaccaactcaaaatggattaaagacttaaatgtaaaaccccaaactataaacaccgtagaagacaaccaccctggaagacaacctaggcaataccattcaggacataggccctggcaaagatttcatgatgaagataccaaaagcaaatgcaacaaaaatgaaaattgatgaatgggatctaattaaactaaagagcttctgcacagcaaaagcaactaccaagagagtaaacaaacaacctacagaatgggagaaaatatttgcaaactacacatccgacaaaggtctaatatctagcatctataaggaacctaaacaaattaacaacaacaacaaaaaaacacaaattatcccataacaaagtgtgcaaagtctcaaaaaaaaaaaaaagtgggcaaaggacataaagaaacacttttcaaaagaagacacacacrcagccaacaagcatatgaaaaaatgctcaacatcgccgatcattagagaaatgcaaatccaaaccacaatgacacaccatctcacgccagtcagaatggctattattaaaaagtcaaaaaataacagatgttggtgaggttgcaaggaaaagggagcacttatacagtgctggtggaaatgtaaattagttcagccattgtggaaagcagtgtggtaattcctcaaagaattgaaaacagattaccgtttgacctagcaatcccattactgagtatatacccaaaggaatataaatcattctatgacaaagacacatgcacttgtgtgttcattgcagcactattcaaaactgcagacatggaatccacctaaatgcccatcaatggtagactggataaagaaaatgtggtacatatataccatggaatactacgcagccataaaaaataacaagatcatgtcctttgcagcaagatggatggagctggaggccattatcctaagcaaactaatgtagaaacagaaaaccaaatatcacatgttctcatttataagtgatagctaaacattgagtacatatgcacacaaagaagggaataacacactggggcctacttgagaatggagaaagggtggagagagaggatcaaaaaactatctaatgggtagtaggcttattacctaggtgatgaaataatctgtacaccaaacccctgtgacatgtagtttacctgcaaactgcacatgtacctctgaacctaaaatagaagttaaaaaaaaaagtaattttgggtggggcacagtggctcatgcctgtaatcccagcactttgggaggctgaggcaggaggattgcttgagctcaagagttcgagaccaatctgagcaacataggaagaccttgtctctacagaatattaaaaaattagccgggcatggtggtgcacgactctggttccagctacatgggaggctgagatgggaggatcacttgagcccaggagattgaggctgcagtgagctgtgatggcaccaccgcactccagcctggttgacagagaaagaccccatctcaaaaaaaaaaagtaattttggaaggacatacctgggatatgttaatagcacatttcatttctaaagtcagaggaaattataagatcataaccagggatctgtattagcggactagtagacaagaggaccttaaagatagggagctattgcctttccgcccgtgtacgccactgaagaagcatcgttaaagtctctcttctcccttccatcttgtctaagtcagagtctcctaaagagctcaaacagctgaggaagctcttcattggagatttgagctttgaaacaactgacgagagcctgaggagccattatgagtgatggggaatgctcacagactgtgtggtaatgagagatccaaacaccaagcgctccaggggctgtgggtttgtcacatacgccactgtggaggaggtggatgcagccacgaacgcaaggccacacaaggtggatggaaaagttgtggaaccaaagagaactgtctcaagagaagattctcaaagaccaggtgcccacttaactgtgaaaaagatatttgttggtggcattaaagaagacacggaagaacatcacctaagagattactttgaacagtttggaaaaatggaagtgattgaaatcatgactgaggcagtggcaagaaaaggggctttgcctttgtaacttttgacgaccatgactccgtggataagattgtcattccgaaataccatactgtgaatggccacaactgtgaagttaggaaagccctgtcaaagcaagagatggctagtgcttcatccagccaaagaggtcgaagtggtcgtggaggtggttttggtgggaatgaaaactttggttgtggaggaaacttcagtggtcatggtggctttggtggcagccatgatggtggtggatatggtggcagtggggatggctataatggatttggtaatgatggtggttatccaggaggcggccctggttactctggaggaagcagaggctatggaagtggtggacagggttgtggaaatcaggacagtggctatggcaggagtggcagctatgacagctgtaacaagggaggcagaggcggctttggcagtggtagtggaagcaattttggaggtggtggaagctacaatgattttggcaattacaacaatcagtattcaaattttggacccatgaagggaggaaactttggggcagacgctctggcccctagggtgatggaggccaatactttgccaaaccaccaaaccacagtggctatggcggttccagtagcagcagtagctatggcagtggcagaagatgttaattgggaatcaaagcttagcaggagaggagagccagagaagtgacagagaagctacaggttacaacagattcatgaactcagccaaacacagtggtgrcagggcctagctgccacaaagaagacatgttttatacaaatactcatgtttatgggcaaaaaagtcaaggactgtatttgtgactaattgtataacaggttattttagtttctgttctatggaaagtgtaaagcattccaacaaagggttttaatgtagattttttttgcacccatgcaaaaaattgctatatgtgatagtctgatcatgacrctgaataaatgtctttttttttttaatgtgctgtgtaaagttagtctacwctgaagccatcttggtaaatttccccaacagtgtgaagttagcattccttcagggtgatgccaggttctatttggaatttatatacaacctgcttggrtggagaagccattgtcttcagaaaccttggtgtaattgaattgatagttactgttgtgacctgaagttcaccattaaaagggactacccaagcaaaatcatggaattattggttataaaaataattgttggcacatcctatgcaatatatctacgttgaataatggtaccagataaaattatagatgggaatgaagcttgtgtatcatccattatcatgtgtaatcaataaacaatttaattctcttgaaaaaaaagatagggagctatttaaagattattaggaaagcttactagctaagatggttaataccttgtcttatcttgcacatcagcttctgtctttttctcatctattacctgagttaagttatagttggtctatttggtatccttaaaacttaggggttgctttggttggtcgtgtaatactctaagagagagaataccagttttgccacctgaatgtattgctttgtttcttccataaacatttaaaaaatactctctccatattcaccccatttaaaaattagaaaaataatatacatttattgtagaaagtttggaaaatacaaaaaatactagaagtaaataaaaaatttcatagagttctaccacctagaggaaataatgtttttccttgattgatataatggatgctttcctttgaaacatttttttttgttttgagacagtctccctctgttactcaggctagagtgcagtggtgtgatcttgtctcactgcaacctctgcctcctgggttcaagtgattctcctgcctcagcttcccaagtagctgggactacaggcgcgcaccaccacgccctgctaatttttgtatatttagtagagacggggttttgccacgttgaccagactggtctcgaactcctgacctcaggtgatccacctgccttggcttcccaaagtgttgggattacaggcgtgagccaccgcacccggccttgaaacatttgttttaaaatagttggccaggagtggtggctcatgcctgtaatcccagcactttgggaggctgaggcaggtggatcattcgaggccagcagttccagaccagcctggccagcatggtgaatctccatctctactgaaaatgcaaaaattcgccaggtgtggtggtgcatgcctgtagttttagctaattgggaggctgaggcaggtggatcattcgaggccagcagttccagaccagcctggccagcatggtgaatccccatctctactgaaaatgcaaaaattcgccaggtgtggtggtgcatgcctgtagttttagctacttgggaggctgaagcaggagagttgcttgaacccgggaggcgggggttgcagtgagccgagactgtgtgactgcacggagtgagactctgtcaaaaaaaaaaaagaaagaaagaaaggaaggacgcaaggaagaaagcaaggaaggaaggaaggaagaaaagaaagaaagaaagaaagaaagaaagaaagaaagagaaagagagagaaagaaagaaagaaagaaagaaagaaagaaagaaagaaagaaagaaagaaagaaagaaaggaaggaaggaaggaaggaaagaaagaaaaagaaagaaagagaaagagaaggaaaatatgtgtatggtatatataccattttaatcatttcttaaagtaaacattgtggccattactttactcgtgcataatactttttcacaccttaattatttatcttcatttcccagaagtgaagttccagggtaaaagagaaggaatgcttttgaggctattgagacatactgctcaactgctctctgggaagatgttgccaatttgcattttcacccctgtgaaatgcatgttcaatttgcatgcccacgtgaacactcccatttccctgaatcccagttaatgctgggcattattaattaaaattgtttttcaatttgagagactaaaatggtatcttgttttaatatttattactctgactatttctgaggccaatatttttttcacattgttattatccatttcttaaatatgtttttcctcaaattgagctggggaattttcttcaaataagaaatagcactgaattgcataatgttcactctgtttgatttgtcccatctctgcctcttccttccctagagatactcaaggaagttatttgcttgcaccagcttaagaaacctcacttcacacagtcccaatgtatcacacttgagcaactgtgcaagaaaggacataatttagtattgctaggaagtatatttttagtagttcctgtgcaggtagaagcaaactgctgctttgcaaagatctcagggatagaaaagctgctttatttatttatttattttatttattttgagacggagtctcactctgtcacccaggctggaatgcagtggcgcgacctgggctcactgcgacctcctgggttcgagtgattctccttcctcagtctcccgagtgtctgggattacaggcgcccaccaccacacttggctaatttttgtatttttagcagagatggggtttcaccatgttggccaggctggtcttgaactcctgatctcaagtgatccacccgccttggcttcccaaggtgctgggattacaggcgtgagccactgcgcctggccaaaaagctgcctttaaaaaaaatgtagacaaggtaaaaaagatattactatgttaaatgtttaagcacttgagaaaggaggtgatggataagtactgagttttatgtaccagtagcatcagtcacatactttcccttttttgtgtttgttttgtttttaatcatctgcctctatttcacatctactttctctgttggttttttagattggacaagctgtcctcgaagacagtcttagattcttaaaattaaatcttattttatttttttggagacagtgtcttgctctgttgcccaggctggagtgcagtggtgtgatctcagctcactgcaacctctgctgcctcctgggttcaagcgattcttatgcctcagcatcccatgtggctggaattacaagcatgcaccaccacgcgcagctaattttttgtatttttagtagagacagggtttcgctatgttgcccaggctaggtctccaactcctgagatcaggcagtctgcccgcctcggcctcctaaagtgctaggatgagccactgtgccaggccttaaaattaaattttatatgtaatttaagaataagaatatttaccatgtgttccatttctgtgcttttctcctgcttcttggtcagacttgtaaattttcaggaaatggtctgttttatgaataacagattagcaaacgaaaccattgtcctttattttttctatttccatcttccagatttggtgaaattagtagcttaaaaatgatacacattggagaactcagtaaagaatgaaggatgaactgctacacaaataagtcctaaacaagaaattagtgtgtaatctcattcttaaccctgtctctgtgcagtcttggaagtggatccttgcaccggtcattctttatatctgtgaaaggatcctccggttttaccgctcccagcagaaggttgtgattaccaaggtaaagaatatgcactttcctcttgctgtgataagagttatcttctaccggactacagaactaaatttttatgttgtcaccctgaaagaggaacttggaaactgggcacagtgggtggtagtcccagcactttgggaggccaaggagggcagatctgttgaggtcaggagttcgagaccagcccggccaacatggcgaaaccccatctctaataaaaaaaaaaaaattagctgagcgtggtggtgcccacctgtaattccagctacttgggaggctgaggcgggagaatcgcttgaacccgggaggcagaggttgcagtgagttgaaatagcgccactacactccagcctgggtgacagagagaggctctgtctcaaaaaaaaaagaagaagaacttgggtttggcatacctcagttcctccagcactggacagaactgggaaagaggggcttggccgaaatcatcaggatgagtctatatcagaggttgcaaacaggcagcctgggccagagctagttcacagctatattttgtttggtgcacacaatgtttgtttataaagttgaattggttgccaacatttaaaaatctggatggaagctttcgtttgattttttaaaagctatttcttgcttctcttgaagaatcaggaaacctgataacactgtcatggttccatatcgcaaccactgtctggagctaagtagctgctgccctctttagagaggacttgtgtttgtagttcaccactgtcaccagccctccagcttcactcatttgctttatctgcctgtccctgtcgtcattagagtttgctttctttggtctatgtgcttcattcacaggttgttatgcacccatccaaagttttggaattgcagatgaacaagcgtggcttcagcatggaagtggggcagtatatctttgttaattgcccctcaatctctctcctggaatggcatccttttactttgacctctgctccagaggaagatttcttctccattcatatccgagcagcaggggactggacagaaaatctcataagggctttcgaacaacaatattcaccaattcccaggtaggtccttgagaccaggagagtcccagaccaggatgcagactggcagaaaagagaaagcaattcttcgttgaatcttaagtttggtacaatagaataggattataataaatatgcagaagtcagccatgggaacaactatatttctgggaggatgtttgaggttggaggtggaggggagtcttcagttgcccgttatcttctgtcttctgccaggattgaagtggatggtccctttggcacagccagtgaggatgttttccagtatgaagtggctgtgctggttggagcaggaattggggtcaccccctttgcttctatcttgaaatccatctggtacaaattccagtgtgcagaccacaacctcaaaacaaaaaaggtataatcccgtatatcacttttcttctggcctgagtctgacaagtctattgccttcttgggctaagctctttacaattgataagggagcaacctatccctggagttatgagaataagtgatcacttctcttggccaggacatccacttctacagatttatcataagaacagggtcttcttttcaatttggagtttaagatcaccctgaccaaagatgttggaaggctcgttcctaaggaaaattgtcagaactctgaacattcctgctgcctaaagtttgcggctctataaatgtgacttttaaggtcacctaataaggctatgttctctcttgctgatttcagatctatttctactggatctgcagggagacaggtgccttttcctggttcaacaacctgttgacttccctggaacaggagatggaggaattaggcaaagtgggttttctaaactaccgtctcttcctcaccggatgggacagcaatattgtgagtccaaataacacactaattcccctactaaacataagacgaatgtcagacaaaggatagtgcatatggattagaagttatttcttatgatttcctacctgccctcacactcacacacaagtttaaaagtggtggaaagaagaggcagctatcaggacttggtttttcttttctttctttcttcttcttttttttctttttgagacagagtttcactcttgttgcacaggctggagtgcaatggtgcgatcttggctcaccacaacctctgcctcctgggtttaagcaattctcctgccttagcctcccgagtaactgggattacaggcatgcgccaccatgcccagctaattttgaatttttagtagagatgggggtctcaccacgttggtcaggctagtctcgaactcctgacctcaggtgatccacccacctcggcctcccaaagtattgggattacaggcgtgagccacgcacccagcctaggacttggtttttctaacttttattcctctgaatccaggttggtcatgcagcattaaactttgacaaggccactgacatcgtgacaggtctgaaacagaaaacctcctttgggagaccaatgtgggacaatgagttttctacaatagctacctcccaccccaagtaagtatattttcctctagtaagatgagtttacaggggccgtgcgtggtggc

SEQ ID NO: 96974 - DNA, 31999 bp, Homo sapiens
tactgcccgcagtttgatgccttgctggaccacatgacaggccgggagatgctggtcatgtacgctcggctccggggcatccctgagcgccacatcggggcctgcgtggagaacactctgcggggcctgctgctggagccacatgccaacaagctggtcaggacgtacaggtgcacctcccgagccctggcccttcccagagtggagtcagaatcaaggtccccatagcatagagctgggagtgaccgctcaggtcagcagccagagctcctgcttgtggctccaggatggagctgggatgtggtggtgtgacccaggtagcttcacgtaggaaagggactgccctgacagtgcctgccacctagggacaaagccagcagtgagagatgtcagggtcggcaggtcccctttaggtgcaggcagatgtcttcccatgtaggtgcgtgcaccgggcccctgggaaaagccttctctggggcctccagccctatgcggtgggctttccaggtgcacacacagctccttcctcttcactagggctgttctgcaattgctgggtgtgggccgctgctgggacacgggcctccactgggacatgggagccaatgctaactctcagccttattcccccacctggcaccctcctgcctctagtggtggtaacaagcggaagctgagcaccggcatcgccctgatcggagagcctgctgtcatcttcctggacgagccgtccactggcatggaccccgtggcccggcgcctgctttgggacaccgtggcacgagcccgagagtctggcaaggccatcatcatcacctcccacaggtagagcctgggtctgtgggttactggaagtttcagcaccgggtgggccatggaggagccaggtggccaggagacccatcagcatctggtgcagagtctgcccgtgagccacactgagcatgggtatcaggaacagcctgatcggagagccaatgccttcctgtctgcacaagcctttggcaccccaagccctatctgaggtcccgccctctccacagcatggaggagtgtgaggccctgtgcacccggctggccatcatggtgcaggggcagttcaagtgcctgggcagcccccagcacctcaagagcaagttcggcagcggctactccctgcgggccaaggtgcagagtgaagggcaacaggaggcgctggaggagttcaaggccttcgtggacctgacctttccaggtgtgtgccggccccggcagcccccactgggtgggccctgggcccctacctaggcctctcccatctgctgtgcggagcgtctgtgcctcgccccgccaagtcccatctccccaatccctgggacgaggactccagtgctgagcacccaggcaccctccccgatcctccagcccggcgctcacagcaacaccgtctctcctttgtgcaggcagcgtcctggaagatgagcaccaaggcatggtccattaccacctgccgggccgtgacctcagctgggcgaaggtgaggcagtccctggggccccactgggcactcatggggcagggggaggtccctccaggggtctctccctctgtggtgactgcaggctctttccacagaggagtcactttccatttctcccctaacactcagcctgatacgtgctggtttgggggttttatatccaaaattatcagtggtaaaaggaattcagtgtaaaacaggaaaggggtcagggatggtggctcacaccataatcccagcactttgggaggccgaggagggaggattgcttaagcctgggagttctagaccagcctgggcaacatagaccccgtctctacaaaaaatttaaaaattagccaggtatcatgcatacctgtagtcccagccactcgggaggctaaggtgggaggatcgcttgagcctgggagttcgagactgcagtgagctatgattgtgccactgcactccagcctgggctacagagcaagactctctctaaaaaaatatgggggaaaaaaagaactggctcagaaagggaacatcactggctcaaggttgtaatctgagctgggaacagcacagggaggaggctgggccccatccccgctggctcctgcttagccagcgtcctctacctgggagcacggtgccgtcgcagggctgacctctctggggctctggggtggcgctgggcaggggtaggattgtgggggcctcatcagcccctattgccagaggactcccaggtcccgcagaggagcctgggccctgttctctcctaccagtgacttttctgctccccaaaggttttcggtattctggagaaagccaaggaaaagtacggcgtggacgactactccgtgagccagatctcgctggaacaggtcttcctgagcttcgcccacctgcagccgcccaccgcagaggaggggcgatgaggggtggcggctgtctcgccatcaggcagggacaggacgggcaagcagggcccatcttacatcctctctctccaagtttatctcatcctttatttttaatcacttttttctatgatggatatgaaaaattcaaggcagtatgcacagaatggacgagtgcagcccagccctcatgcccaggatcagcatgcgcatctccatgtctgcatactctggagttcactttcccagagctggggcaggccgggcagtctgcgggcaagctccggggtctctgggtggagagctgacccaggaagggctgcagctgagctgggggttgaatttctccaggcactccctggagagaggacccagtgacttgtccaagtttacacacgacactaatctcccctggggaggaagcgggaagccagccaggttgaactgtagcgaggcccccaggccgccaggaatggaccatgcagatcactgtcagtggagggaagctgctgactgtgattaggtgctggggtcttagcgtccagcgcagcccgggggcatcctggaggctctgctccttagggcatggtagtcaccgcgaagccgggcaccgtcccacagcatctcctagaagcagccggcacaggagggaaggtggccaggctcgaagcagtctctgtttccagcactgcaccctcaggaagtcgcccgccccaggacacgcagggaccaccctaagggctgggtggctgtctcaaggacacattgaatacgttgtgaccatccagaaaataaatgctgaggggacacagtcacagtctgtgggtcacacgcgcgagcggtcacagggctcaatcactcgcccacaatctagacatgaggctctcctttcacatttcaatcacacaaacgtgggacgttgcttttcccagaagggagcacacgcagagaatacactgaggtgaaggaacaggcccataacacaaaggaaaaagccggctagatcaacgcccggtgacaggctcttagtctaaagacaagagcaggtggggctgtgtgggaagcacaggtctggtgggagagaagctgctggcatcagggtcacccgtgggcatttgccatttcccagaaataactcctcatcagctccctttttagttatttatggagtcttgctttgttgcccaggctggagtgcagtggcgcaatcttggctcactgcaacttctgcctcccgggttcaagccattctcctgcctctgcctcccgagtagctgggacaacaggcacgcgccaccacacccagctaatttttgtgtttttagtagagacggggtttcaccatcttggtcagcctggtctcgaactcctgacctgaagtgatccacccacctcagactcccaaagtactgggattacagccataagccaccgtgcctggcccctttttatgcactgttttgtgttttgtcttttggagacaggatcttgctctgctgcccagcgtggagtgcagtggtggtatcacagctcactgcagcctcaaacacctgggctcatgcaatcctcccaccccagcctccggagtggctgggactaagggcatgcgccaccatgcatggctaaattttatttttagtatagacgaggtctcatgttggccaggctgctgccaaacccctgacctcaagtgatccacctgccttggcctcccaaagtgctgggatcacaggcgtgagccaccatgcccggcgaatgcactattatttcttatggttttctaaacccgatttgaacttctgcattttacattcccttagaattcagagttttagaaaagacttgttttcatcactttggctcatttgggacaatttcaagtctgtgtttttatcagtctctggaaatttatgaaagctgcaaatcgtctccagtagctcttttattccctttaaacttctgccatctagttccatgttataaaaaatataacgtgtttgggcagtgtttaggccacagccacccatgtgtagccacccctacacatgggtggctgtggcctaaacactgcccacgagaaaagttctgaagtgggcccttctggccccacagcctgtccgcaggggctgtggcctctaggtcgggcctggggctaggaagagggaaaggtcagtgcacgaggccacccagctccatgtccatgcccatggcccttctgcagggcatcctcagacttgttttcaagcccatgtgttagagatttaggaatgtgtcatttttctcctgtgacaccctaaaagagggttggggagagcgtataggactgagggcacagcccgcatgaggcacacacgtgtgaggccagcgtacacaggacacgcacaggagataccatccttcccggtagcacgctgccagcaccagcaggggtctttaagtaaggactggcacaagtagaatgccttcttaggaaaatgatccgcagctcaggaggctgctgcgtggggaccgggaggggcaggtgcattcagggcgtctgtggcaggggcccagggctgcacccaagcctggagcttagatgaccccaggagcagcaggaagggcccatctggcatcccagggacatcctcaaggcctctggaaactcagtgctggagctgggtcaccaggggtgccctaaggagcctgggactgaagcctcaggaccctgccctggccgatttttgtctgagctgtggcagttcccagcccacgggagggcaggggaaaagagccttgggcccagggataggagtgaccggcctatccacgctccaccctagaccacggaggggggccacacattctctacggacactgtccccaaacaactgtggcatctgacagagccaactcctgccctgctcccagttcaccttagacctgggaaacgaggttttgacttcactgctctgcatggcctggtgcagggctcccgtgagcagacggcccatgggccacgagccaggtatgtggaagagcctgtgccttctgtcctccaggccggcccagtccaacggcgtggctcaactgaaaccacacccagaactcggagaggggaagacctcgcggtggggcgggcccaggccaagcccctccactgccatcacaggtttacagcggagcagaggggcaggccggatacaggcagcccaggccacaggtcaggggacccacaccaggccacaggaacaggcttgctgagggtatcagaaaaccccaggtcacagtggtttgaaaaagaagtttatttctcagccatgtaggcaggaggaggcagtccagcactcggtcacctgaggtctcagggaggcaggctccatctgctgccccgtcatcctggttcacgcctccctcctcatggtcacctctgtgttcaaggaagtgcttggccgggcatggtggctcacgcctgtaatcccagcactttgggaggccgaggcaggcggatcatgaagtcgaaaaatcaagaccatcctggctaacacggtgaaaccccgtctctactaaaaatacaaaaaaattagccgggtgtggtggcgggcacctgtagtcccagctactcaggaggctgaggcaagagaatggcgtgaaccggggaggcggagcttgcagtgagccgagatcacgccattgcactccatctggactacagtgagactccatctaaaaaaaaaaaaaaaaaggaagtgctcaagttcaggccggggtagggtgtgtgcagtggcctccgtcaagtgtgtgtcacccccaggcagctccctgctgcgcctggacccaactgtgcccttggctcactccatcttgctgggtttcccatctctgtcttactggctgctttcagagaccaggcccagagtccccaggactcaggtgaccttggctaccctggaatcctggactaaagatctgcaatagaaatgtgtccagcagggaatgtaatgtgtccagcagggaaccatcctgtttgctttgcttttctgagttcctacaaccaaccggccagggcgcactgtggggcacagggatgcaggccctggagtatggccacttctgcctgggggcgtctggggggtttcctgagtgaggtggggtctcaccagctccaggagacaccactgccatgcacaaggtaggtgtgggggtggaggatcacctccgtgaggacccagaccccacccactgtggctgtggtggagactgcaggtctgtctcaaggccccaggcctgacacctgcaagaacagaacctgggggtgacggagaggggattccaccaggccagcccggggcttgaaccccagccagggcagctgctgtctgctgccccaccaggtaacgcaccgacccagctgctgttcagctccccctctgggccagcaccatgctcatggcataggccggctgggccctctgagacccccactcccacacagactggtctgcatggaggctggtgcagcctgtgccgtacagaccctgcccggctgcactactggccagagccccctgcagacaggcggctcgaggggagctccaccatgcaggagatggcccagcactgcagtcacttaggctgctcatccctccccgaactgacatgtccctccctccagatgccccccaccgccgaaccccagcatgctgggcatgctctggccatcccacacagggatcagggtgggagggctggaggctgcctgtcaggggcaaggcctcctccaggaggtaggacggggtggtgcaggtggggtcccctcacctgatgggccctcgaggccaggctgtaggcaggcaggagggggctgaagcagtggggtcaggcccggggagcgggggccctgccttccttcctcaacacacggggctgcccaggccccgctcctggggccgggcccacacctcacagacactggtgttggatgcttcggcttgaaggagctccaaatggactagccgcagctgcccctgggtccacctggcccaggcaataccacagaatcaccaaggctcatctagccatgggcccaaacccaaggccctaagaggcaccccgggtgcctcagtcacagtcccaggcagctcaggtcccaggcggctcacagtcaccatccttgacttcatggtagcagaaatggagtgctttgagcttgtgatgagcacaggctcccaaccctgggagagttcagacatgcccactggagaggccccaggccctgatgatacccactcctcagacatgcaaacctggagccagggaggccccaatgaactgcatactctcccaacagaccaagctcaccccacaccagcgcaaggccctttcagacccagcctggccacccccatggacctggccagcacctcccccagccccaccctctccagacaggcaccaggctgtggtgacccgcctctcagcagctcctcctctgatgcctccccacggtccagtcgttaccccctcgtccacctgactgggctgcgcatggcctcagtgcagagccaggttttagtagtgggtaaaagggctcccttgctgtgctttaccagagaatgcaacacccccaaagctccttcatgacccactgtgacctgcagcaccaccaagcccatcctcatccctgtgtcccaggccaccagcctctgagggcaggcactgcaggagccaccgggccacagaggatggaggcagggaggacattctgccttcatgagggcatgctctcaaagacagagccgccccaaactgtcagcaggtgaccctccgctctgggaaggcaaggggaggagctcagggccgtggccagagcccacgagaagcccgtgcccagctcagcaggtgaccctccgctctgggaaggtaaggggaggagctcagggccgtggccagagcccacgagaagcccatgcccagcactgcagggctctggccactgcctaatgccctccatgaagccctgcctgcccttccagcaaaccagggcccctgaggctccagaaaccccagctccactgccctcagcctccatggccttagcagcctggctctggggctgagctcctggaagggcagggtgggggtaggctcctgagttttattttctcacatttcttccagacatgcttctgctgatcctcaaaatggcaaaagccaggatgctcaattctcaaagctcaacagctgatggcacatttgataacaaaaatcagtaatatttagaaacaaatttgattaaattcgtaagtgcctgaataaatcatacttgtagatttaatataaaatgtgtgaaagcttattcgcaggccaaatgacattactgcagagcattaaaaaccagcagggggagggctgtcggcccagctggtgctgcgtcacgcccacccatgtcatgtggggtcaccaggctgcccctgcccaccaggtgtcagtggggccctgggcatgggctctaggtttggggccttttagcacctctgaccactggactccaatgccacctcagagaattccgcctatgcctgcctggaccaccgaggctgccccctcccctagcgccgactctggggccccttcagcaggggggcggcccctctgttccacttaatcttccatgcctgggcacagcaggtgtgacagtaatgcagagactctaactcactttacatgtcatcaaacccaaatccaacgggtacccaaaccagactgatgggcctgccagcctccacccacaggaacacactggtgacttactgcagcagactcgggaggtagctcctcctcctagctgcctttgtccccaactccttggacatcccttagcccagggtgaagggtcaagggcacacttgacaccctcggacagggccagagggagtgggtctcggcaggaagtcaccaagagctggcttcccacacagggaagagggcagtgatggcagaccacatccccactatctatccatccattcacccacccacccactccgggtcaccaagctgcaccctgtcctttgctctgacatctaaagtctccaagtcatgctggttctctcctcccaaagatcggcttggatctgttcccttctcccttccttgctgccacgaagctgttcagacaaagtctgaagctcagcgcaccgtcaatccctccacaaataaccacagggcaacgactgcctgacaggcacagcagagaacaaaacccgccctcggccgggggcggtggctcacgcctgtaatcccagcactttgggacgcccaggagcgagcactttgggaggccaaggcgaacctaggagcggatcacgaggtcaggagttctcgaccagtctggccaacatagtgaaaccctgtctctaccagaaaaatacaaaaaaaattagccgggtgtggtagtgtgcgcctgtaatcccagctactcgggaggctgaggcaggagaatcgcttgaacccgggaggcggaggttgcagtgagccgagatcgcgccgctgcactccagcctgggcaacagtgcgagactctgtcaaaaaaaaaaaaaaatccgccccgtcagtgtggggagttgacgcggagcctcctgcctgcacccctacagcgtcaccccctcctctgtccctgccagaggcgccacctctggactctcccagggtcggaccctggtcgacagtgctccctgcccggaccctgcaccggccgatggatgaagcctcggcgctgcgccgttcacacgctccgtgccgctgccgcgaagctcgcgcgggcctgcgagccggtacccgggcctcccttccctgcttccagcgaacctcggcgcctgctgttcccccgccgggcgcgcccttccattcgggtctcagcggcagtgtcacctccccggagaggcccgccgttgcaccccatctcccactctcaagctcgtcgctcttcctgcccgcacagcccgcctgccgcgcccacccggtggaggtccgcctgccgggaggccgcgtccacgggaacaccccaaacgccaccagtggattttgaccgcacgaacgcacgccctgccccagcccgtctctccgagctacttccgccctgcgggcccccacgccccgccacgcacggccgcagagcctgcgaacccctcctgtgctaccaccccgccggcctcagcacagcccggcccggagccccgcctccaccgccggcgacaggggccggagtctgcccgggcgggcccagtgcgcccgcgcaaggaaaggggcggggcacgggcgcgttaacaccctccgcgccggaggacgagcctcggtcatcgcgctgccctcccaggytcaacagsctacccatgtgcccgctccagtaagcgtgcaaccagcccggtcagtcccagggactttaccggctaggagacaccttgaacgtccccagcgcgactcccacaaactgccttgactctttaacgcttcctcgctggcgcccattgggccaggcgtttacgtcatcgctgcgcgccgggcggcggcgacttcccgctccttgactctgacgtcagagcggcgccggcctcggcggctgaggaaagcaggaggaggtggcggcggcgggaagatgtaagttggggcggaatccgactgcatccgtgtttcgggggctgcccggcaggcccggcaggacgcctcgtgaagccggtccactcctcagccccgcagtgcggcggtggcctggcagcgcggtgcgggctccgagaagaaagagtgtggcccggggcgggcggagtgggaggtgtcgaggccgtggcccggaagtggtcggggccgctgcggacggaagggcgcctgtgcttcgtccgctcggcggtggcccagccaggcccgcgggactcagaccmscggggagcgcggcctccgcccttggggccctcccgccgggccggagacccaagcccccaacgccaggccctgccctggaagcgctcgcggcccggcgcctggacgggggagttgtgagtgaacgcggacgggtagcggcgaggtcggcgtgtcgggccggtgtcggcgggcgcggagtttctttgtgggatgcggtggaaggtcggccgatccccccttcggagtcattaattcaaacgtgtactccgcgaacgtttcccggactcccgtgtgcaattatcggcgctaggccgtggggatacggcccactatggaccgagcacggtggccgagctcagtttgatgggttaccccagaggggcggatacgggaaggttaagtttgttggaggagaaacgtggagtaggctttttgtcttgattccgcatgaactgtgcctgaaatgtacttttaaatggggaaggtgctctgaagatttgtgccgaaacgccctctcctcgagatttaactaattgttctctcctctctctggctgttggacgcgcacctttccggaggatgggggaggtaaccgaggtcctgagccggtacctgaacttgggtgaacagagaacctcaacttttgctttctagcactcgaccgcacccagcaaggcgtccgcttactcagtggttcttagtgtttggagtgcttaagaataactggtggtgtttgatttcaccaagtacattcgggcagatcttagttcttgggggggtggggctggaatctgcgggtgtgacctccactctaggtctgtgctgtccagccaagtagccrttggccacatgtggctgctaagcatgtgaaatacagctaatcaagactgaaatattaaaacacacaccagttttagaagactaggaaaaaagcaaacttttattagatgtttatgttgattatatgttggaaagataatattttggatgtgtcaaacgttaaaaattaatttcacccatttttgtgacgtggctactaaggaatttcaggtgatgcttgtggctcctcacacggtttctattggacagtgctgctgcaggtgattcgaaggcgggtgggtgcaggaacccagctgagagttcagaaattagtgtaamtttggagacaagtgtctgtgggggaaggagcctccggacgtggagatacaactcttgctcctaacatttatcgagtctttaattaatgccctgggtaactataaggttggaactgtaattgtcaccatattgatgatgagaaacttgagaaaggataagtgacttgtctaaaatcacacagtaaaacctcaaatcaaacccaggccctctggctccagactctaaattatactctgaatgatactcactgattgtccgaggacacrragagtgtcgaggcactatctgctgggtgtctgcagaaccttactgttctaaagcaaaacattttacccctggacaagagcagcaaaggtggcgttcggccctccttggctctcatttgactgttcaaagccaggtgcttttctttcttgggtcagaacgtattttcagcagcattttgaagcacccctggcgtgcactgcacagggaaaccaggaccacattggtgtgctgtgtcctccttaccaactggctcttggagaaggtgagacagaagtagctgagactccattcctgagatcttcacttaacaactcctgcagcttgtgcagagccttactagaaatactgaaggcagaagtccctggaaaatagggcccataactaattagtaatttgtttttgagtaatttgttaccgttatttgagcacattctgcagtccaggcattttgctaaactcttacatggcaggcagtctctcacgcaatttcaatgcctactttttttctccatcttatttttgaaaaatgttaaaaaaaacacaggaaggtcgagttatacagttaatactcacataaagaccacttaagggccgggtctggtggctcacgcctgtaatcccagcactttgggaggccgaggttggcggatcacgaggtcaggagttggagaccagcctggtcaatatggtgaaaccctgtctctactgaaaatacaaaaattagctaggcctggtggcgtgcatctgtagtcccagctactcgggaggctgacgcagaagaaatgcttgaacccgggaggcggaggttgcagtgagccaagatcgcaccactgcactccagcctgggtgacagagcaagactctgtctcaaaaaaaaaaaaaaaatcagaggttaatagtctataagttacgtttctgctatatttgctgtatggtgtatctagccacccatcaatcttattttttctttaaaagtgaattgcagacttgcatgtgtcttcccctgcactcaatatgcatattattaaagtacagtgcaataactgctttttaaaatgattcttctactgctttttagatgttcatatggtacatttcatctgcttgcttttgggtattaagtgttttgatgctggtaccagtcgcttttgaaatgatttttgcttccagtcacatccagtgtatcctaaggggaaattgcaataaaacaggagatctaatcctatctggagaccacccttgagttaggtttttctctgttctgcatgtgaatgtggtgctgtggcattttgaaaggactgcaggggctcatcaaacttgtgggtgaaaactgaattgttcagcctgtaaaataacagtgatggtctccaccatctccattttttaagaaaaagatacgctggggcgacagttgtacctgtgcctcctctgcggggtagagacgcctccaggagcacatggggactgtccctatgtgttcctgactgtgtggacacttattgcttaccgtgctcccttgctgcctttttgtgtgctcagcttttgactgcaaagtagacttgttgccttgccaattcgttcactctttaaacccttttatcttgttattaggctgctctttggcgtaaattgcaatcgattagggatcgtttctcagaatcaagttagaagtgagagttcagataagtgaggccgccattgctgctttgaacacctcagaaggggagaatggatttatcaggagtgaaaaagaagagcttgctaggagtcaaagaaaataataaaaagtccagcactaggtaatccttctgtaagatttttctagtgctacttgggggtgcttactgctagggacccgcagaaaggggaaagttgagaatgttctgcattctacagtgagtgttctgagccacagaccactttgctctgtggtcacctcgggtctctgtggccctgctgatgctgatccccygttttgggttgtgctgtttgggtttggtcagaggagcacgcaatctcacactcttcctcaccatccagggctccttcacctaccaaacgcaaagaccgctcagatgagaagtccaaggatcgctcaaaagataaaggggccaccaaggagtcgagtgagaaggatcgcggccgggacaaaacccgaaagaggcgcagcgcttccagtggtagcagcagtaccaggtggggcgggctggcctggagcctggagaggacctgtgccacagctacacccccactccccacagatggctcggttttcttgattatttacaaagaaaacacatcctctgattgttagtagagaccctaatttatggcagactggctaggtgcagtggtggctcatgcctataatcccagcactttgggaggccgaggcaggaggattgcttggggcctggagttcaagaccagcatgggcaacaaaacaagagctcgtctctacaaaaaaaaaaaaaaaagagtaatttgtaaaattagctgagcgtggtggcatgcatctgtagtcccagctacttgggagggctgaggcaagaggatggcttgagcccaggagtttgaggaaaataaacaaaactagccgggtgtggtggtacacgcctgtactcccagctactcgggaggctgagtcaggaggatggcttgattccagggggttgaagctgcagtgtgcggagatcatgccactgcactccagcttgggtggcagaccctgtctcaaaagaaaaaatcaacctagcctgggtcagcatcagccagcagctgccttcccagcctgagttggcagttgtgacttttgccagagtcctttgcctcccagcaggaaaggcttctgtatgggtagaaggcagcccatcacctctgtcctgtcccacacacaatgtgacacctagggctctgacttgctgggggattggggggtgatgttttccccactgctgaaagcagtgaggcctggaggcacccgaacagcaggtttctcctggggggagcacaacagaattggaggaggcrtctgtactgtgagacttggtgtgtggtggttgtgacccctcatcttgccctcaggtctcggtccagctcgacttccagctcaggctccagcaccagcactggctcaagcagtggctccagctcttcctcagcatccagccgctcaggaagctccagcacctcccgcagctccagctctagcagctcttctggctctccaagtccttctcggcgcagacacgacaacaggaggcgctcccgctccaagtgagtgccctgcgcctgggagctaaagtttacaagctcggggctacagatttaccatcgaggttataaaagggacccaaaaggagtcttyctgtgttaataggatttctgagacaggaataatgtatgtgaactagcaggaaagtcttccttatgaaaactgtcacacaagcagataagagcttactcgaaaggcgtctagtacattttgacttgacagaaattgtttctggtgttttgttttctcaatcagatccaaaccacctaaaagagatgaaaaggagaggaaaaggcggagcccatctcctaagcccaccaaagtgcacattgggagactcacccggaatgtgacaaaggtgaggatcatggatctctcctgtgggcagtggggtgtggacaagcaggcctgtgcctgcagatgaacttagaatgtagccttttggaggactggggtggtggcatgtggtttgagtacagcattgattcgttcctcttggtggaccattaatacatgtgtctgggagatttatcccagaacaacactggtactcatcagatggaatgttttaccctgccgaggttttagtcatgatgtgctgagctctctgcgtctgacgtgactgactggtagctgggcgttggcrtgacccttctttccctctaggatcacatcatggagatattttccacctatgggaaaattaaaatgattgacatgcccgtggaaaggatgcatccccatctgtccaaaggctatgcgtacgtagagtttgagaatccagatgaagccgagaaggcgctgaagcacatggatggaggtgggtgaccctgccacataaccctgacctctcagagacccgccgccgcgaggggctttcaaactgatttccaactgggctgcacttctttttgtttgtttgagacagagtttcacacttgttgcccaggctggggtgcagttcctggaccaaactgaggtttgggctgctmtttctcatggcccaataacaagatgcacattmactgagtmggtggagtttttatttctgmaacmmgttgcagggaaaaggcctggaaattattgycagaccaacttaaaattacaaagtttttcagagcttatatattttttaagctatatgtctatacatatgtgtacatttatgtaaagacataagttactgacttttaatctattaactaaggattgagtcttgaagaccttcctctggagcctcagtaaattgacttaatttaaatggctgtgagtgctggggtaattacccttgctttgccttctgctaaatcacagcagtttggggagttttcttcccaataaaactggcttaatcctaaatgggtcctgacgtattcttcgttattttatgttttaaggcccaggaaaggcctaagctaaacttttggtgggcttttcttatatcccagcctttgtataagggccttggcttttaatatttaactactcagacagtactaaaacacttgttacagaggcctgcgttagtgagacctggcctgccacaatccccactgtcaatttgctcatgctttttatcatgcatgtatatgtatttattaatcacgagaatcgtagggagatgaagcattgtaatctttctggctgcttcctgctgagagagggttgtcgtcatggggcaccaaacacagcgctggagtggaagaggtggatttgttcccggtagcactttctgttctgggggcttcgaggcagcacctgctgaaacgtaatakgatgcaacagccacacatagaagtaggttgctgctgttttcttcccaagtttagtcttcagtttacagggcttgaggaaagcatagcttagatttcagtgatttccaattaggaaaaaggaaacaaaaaaggaaaaaattgagaacagtatttgggtgtactayagtttttgaaacaatttttttttttttttgagacggagtctggctctgtcgcccaggctggagtgcagtagcaccacctcggcccactgcaagctctgcctaccaggttcatgccattctcctccctcagcctcccgagtagctgggactacaggcgcccaccaccatgcctggctaattttttgtatttttagtagagayggggtttcaccgtgttagccaggatggtctkgatctcctgaccytgtgatccrcctgcctcggcctcccaaagtgctgggattacaggcatgagccaccatgcccagccaacaattttttttgggggcttcccatttttattaaaagacaaataggactggtatttattaaaagacaagactggtttgctttattatatttggcttaattatttgtatacagtggagcaagaaccataattttttctataggccttttatctgagataatacctttttaaacccaagcccagccatggatatgtacaattaaatacctgtgagttgggtgaaatcctctcctcttgaggttccaagataacttgaggtttttgtccattagaaagtggcatgttttacttccctcagattagaaaccctgtacagggactgtgtacacaaaataggaggccggttttttatttgtgttctgttacaaaagaaaacggatttttattgcacttacgcaaataactatattgctataaattaagaatacgtacaaatagactgggcaacatggatcacctgaggtcaggagtttgagaccagcgtggccaacatcgtgaaaccccgtctctaataaaaatacaaaaattagccgggcatgatggcacacacctgtggtcccagctacttgggaggctgaggcaggagaattgcttgaacctaggaggcagggattgcagcgagccaagattacgccwctgcactccagcctgggcaacaaagtgagactaggtctcaaaaaaaaaaaaaaaaaaaaaaaaaagaatacacacacacacacaaatagtttccaaattctgaagaaattaggtagagagaaacaaatatgctccaagttttgttcctaggcgtatacttaattgttgatagcttaaaactttttttgactttgaaaaataaaaggattaggaatattttaagcaaaaagttaaaaagattacttcagtgttctattagttcagtttatgcagttaatttctgccctgcttgatattaatgaacgctttacctttcttttttttgagacggagtctcgctctgtcgcccaggctggagtgcagtggcgcaatctcggctcactgcaagctccacctcctgggttcacaccattctcctgcctcagcctctcgagtagctgggactgcaggcaccggccaccacacccagctaattttttgtatttttagtagagatggagtttcaccctgttagccaggatggtctggatctcctgacctcgtgatccgcccgcctcagcctcccaaagtgctgggattacaggcgtgagccactgcacccggccttattttagctctttaagagtcctgaatgttttttctttattctgatgtcacaatctgcaaagttattagaaatctgtatttaagagcaactgttagaactctatagctgattataaaaccaccttctaaaaaggattaaaacaagacaacaattgtttatggatgacaaaaaggttttagggcagccatagttaaagacacaattgacgaaatttgttagctctgtggcacacaataatttaacataacaattataattattactgatcatgtacactaggatatattgcaattgtaggagttttacgtgattttgggacacatatcaataacatttatacaaatacagcccaaacaaagccaaacccaattttatatttggtagtgcttcctgtataatttttggtaccaaataagccaaatttcacttttacatcagtgtgctgttaatgttaaaacccaatccttttttttttttttttttgagacttttttctgctcttgttgcccaggctggagtacaatggtgcaatcttggctcactgcaacctccgcctcctgggttcaagcagttctcctgccttagcctcccgagtagctgggattacaggcaacctccactatatccagctaatttttgtatttttagtagagacatggtttcaccatgttggccaggttggtcttgaactccagacctcaggtgatccacccgccttggcctcccaaagcagctgggattacaggtgtgagccactgcgcccggcctaaacgtaattttaatgcttaatttacagaaaaactagatgatacccctttaactttagccagcatgtttacatacagaattttctttacaatcaacctcccacacctttttttgagacagagtcttgctctgtcgcccacgctggtgtgcagtggcatgattttggctcactgcaacttccacctcctgggttcaagcaattcttctgcttcagcctccccaagtagctgggattacaggctcccgccaccacacctggctaatttttgtgtttttagtagagatggggtttcaccatgttggccaggcctgtctcaaactgctgacttcaggtgatcctctcgcctcaacctcccaaagtgctgggattacaggcgtgagccaacgcgcccggcatggattccagttcttagtgggtgtgtgattaccgaaaagatgttttaggaacaccttttttttgtagctccagtttaaaggaacactattcttgggggaaaaaaattagcaaatatgcgtagattaacattttagagagtttccaatctgttaaaagcttaaggatcaaattcagttttcttacatagaatacatttggctttttatatgggaatatttcctttaatcatttctgagaaccagaagtttcccagtatttcagcatttttagtttattttgctgagtgactggatttactgaatctatacagtttatttcttaaacacttgtatctcataaccactcatgacgtttatagctatttgtatctggcagaatggttttaaaagcacatggacccttgtgaatagtttcgggtggcattttgtcctcagtgcagcattttgaggcatgtggagtcatctctgctccactccctgctgctgtgactgaggccgctggcactgagaacacagcccacagtgctgtctgggctgccaggcctggtggggagtggagtgtgcgtgccccagaactttccgtcttccgaggccctgttacaaactgtataagtagcttagctggtttttttcagtaattgcccttcaggcattaggaaagtttccttgatatttggctaacttttctttcaagtttcttaagtcctgaaatgggttaggagctctgtgcgctcacatcagctgttggccttgtaagtcacacctttgctgtggagtctgctgattatctgctgtttgacagtctgagtgcttgctgagctaaaaacccaggggacccgggtaccttctgggtgggcgtgattacagacattccaacttttcgtaagattctggtaggattttttttgtgtgtctccccttctgtctttgaatggagtgagtccatgctgtctccataggagatgagaaggggttggcctttactggcagctacacagaagatggatttttcttcattattatagagtcagtgctgtgaaatccctaatttgggctaacttaggctgagtttactgaagttaaacctcttaagtatgttctgaatacatagccacatgccggagttagtccccatgtgccttaaaggtagttgagaaaacaaaagagccctttaccccttagggcacagaaggggctgcgcttgggctcccrgtatccccagctaccagacaattcttgaggtcggggtgcatgctcccctggggttcctgggtttgcacctctatttcctttcctctctccctggagcccacatcccacactgcctctcctcgcttcatgcacatggcgtgtgtttcagtgccatctacatgcagagccacctctctgagactgcttgtttccaaacacaaagtctttggcatctcctaaaatttccttcatgcagcttcccaccgcagccccacctctccgtcagtggaagttcacacctcaccacccccatcccatccatcaccaagctctggcaattttacttcccagctgtcccctgaatccttccgtttccctgccaaatcatttgatgttgattcaggcccctctcagtgctgcagagccctcctaagagaactkctcccacttctcttagccccagacccagcttcccttggttggaggagaaggaagcgcaaacgcggatactgcctgcatggtcctgcgaggaagccccaccctggccctggggccttctgtttgcctgtcactcgctctcgatgctaccttctctcaccagtgctttgggtccttcccagcacagggcccagcatagcccttctcttccacctagcagattccagcacattctttacttttcttttttttttcttgagacggagtctcagttgttgcccaggctagagtgccgtggcatgatgtcagctcactgcaacctcctcctcctgggttcaagagattgttttgcctcagcctcccgagtagctgcgattacaggcacacgccaccacgcccggctaatttttgtatttttagtagagatggggtttcaccatgttagccaggctggtctcgaactcctgacattgtgatccgcctgcctggcttcccagagcactgggattacaggcgtgagcctccgcgtctggcctccagcacattctttagctcttgacttggatgactcttgacctgggaggctgcctcgacacgtggagattggtgtgtcctgttagtttttatgcctcttttcctcatgaaacattagtcatgatgttatttctgtgattatctttttttttttgagacggagtttcgctcttgttacccaggctggagtgtagtggcacgatctctgcttactgcagcctctgcctcccgggttcacgccattctcctgcctcagcctcccgagtagctggkactataggcgcccgccacctcgcacagctgatttattgtctttttagtagagacattttcaccatgttagccaggatggtctcgatctcctgacctcgtgatccacctgcctcagcttcccaaagtgctgggattacaggagtgagccaccatgcccggccctgtttctgtgattatcttacattgtcattgtccccccaggcctgtctttcactgtggcatgcattgtctagggtagatgcttgttagatattttatgacttgctgtctttttcaacaggacaaattgatggccaggagatcactgccaccgccgtgctggccccctggcctaggccaccccccaggagattcagccctcccaggagaatgttgccaccaccgcctatgtggcgcaggtctcccccacggatgaggagaaggtaaacaatttgtagtttcagtggactgatcaggccacaaacctcaygtgaccrcagtgactttcagaccctttattcagccctgcctgccttccactgctgtgcgggctggcagagagcaggagcccttcagagctcatggagagagcaggagggccacagctgcagtaagccacaggcaggagacgccctagagttgcaccaacacagctttctgagtctgggcagtggcgtggtgtggccttcctaggagaccactagacctgtgagcccaggtgcaggcccacctttttctgagctaacaagaagagctaggagagggagaagttgggggtcagaagagttgtggggcgggggtggtaatccctcggcagaggccacagtttggtcttccgttgccggtggtgagctgtgctttcagcctttggggaagaggaggaaagcctgggcttctgccttgggtctcacaagcacccgttcccaagagctcagggcaggcccatcaggtgggacctgtcccaacttctagtattaaaaagtaaaacttctgccaggcatggtggctcaggcctgtaatcactttgggaggctgaggcgggcagatcacgaggttaggagatcgagaccaccctggctaatacagtgaaaccttgtctctactaaaaatacaaaaaaattagccgggcgtggtggtgggtgcctgtagtcccagctactcgggaggctgaggcaggagaatggcgtgaaccsgggaggtggagcttgcagtgagccaagatcatgccactgcactccagcctgggcaacagagtgagactccatctcaaaaaaaaaaaaaaaaaaaggtaaaactttgccacgtgtggtagcaatcgcctgtaatcccagcactttgggaggctgaggtgggtggatcacaaggtcaggaggtcgagaccatcctggccaacatggtgaaaccccatccgtacaaaaaatataaaaattaggcctagcatggtggctcacgcctgtaatcccagcactttgggaggccgaggtgggcggaacacgaggtcaggagatcgagaccatcctggctaacacggtgaaaccccgtcactactaaaaaaaacaaaacaaaattagctgtgcgtggtggcgtgtgcctgtagtcccagttactcgggaggctgaggcaggagaatggcatgaacctgggaggccgagattgcgcctctgcactcagcctgggcaacagagtgagaycccatctcaaaataaatatatacacacacaaaaattagctgggcgtggtggcgcgcgcctgtagtcccagttgcatgggaggctgaggcaggagaatcgcttgaaccctggaggcagaggttgcagtgagctgagatcgtgccactgcactctggcctggagacagagtgatattccatctcaaaaagtaaaactatggggaattgcccagaaagaagctagcttgcccytacagcctgagctactctgatgtggtttctcctcttcccgcaggtcccgstccccgaggcgcaggtcccccgtgcgccggagatcacggtccccgggccgccgccgccacaggagccgctccagctccaactcctcccgataaacaggccactgaagctctcgcccctgtaacttataccccacccagctcagttttgtcacttttctagccaaaggaagaccagtaggaaagcaaacccttgactctggcaggatttgcaggcagcaggcagcacccctctgccagccgggccccggctgcagaagtgctgttggtttggatgctgtgtgcctgtcaagattccctccggttttctggctagaaagctcatccgtttccggtttctaagagtcagttcagtggcagagccaccagggaaaagtgaggctcttgggggtggtttgaccctgcttacctgggagcacacttttcccttccccgatgacctgggatggtggccaggccgtgcccttgctgttgctgggcagtgtccttttggaaagggagctgccccaggctttagtgcagctgccaaccctgttaggcctggcctctcgaggcctcttctgayctcaagggtcacaccccctcaaagatcstctcacccatggtrgttgctgctcrtggttctgtctgtccgtgcaccgatgcacacaccgcaccccaccactgtactctgaaattggcgagtgagtkgagagccagctctgcggrgtcatcacgcagccatggttgtgcctgccgttcatggtggtctttcaggttatcttggcaacatgtacattgcttttattttttttcttttttgctttcattgtacagtcagtactataaaatttctcttttgagttttatacctttgtagcattttagatgacattgtgtttgtactttgttgtgtagagtggaagaattgtgttgaataaacccaagatcggaatgcaaatctagttctgggttcactgccttctcacttgtcccctcgcccctagtaactttctgttcctcaccatccgcagtggcacctccgatgctttcagccaggagaacctagggtttgtgtgctgtggggaccaggttgctcctagggtggacaaatagaaggagatggttttatcgccaccttggaatgtgtgtgtgttttcagacagactctcgctctgtcacccaggctggagtatgtaccatggtgcgatcatagctcattacagcctccaactccttcttcagtgtccagagtagcaggggctaatttttttttaattttttaattttttttttgagacagtctctgttgcctgggttggagtgcagtggcgcaatattggctcactacaacctctgcctcctgggttcaagtgattttcctgcctcagcctcctgagtagctggaattacaggcacctgccaccatgcccagctaattttttgtatttctagtagagacggcgtttcatcatattggcccggctggtctcaaactcctgacctcatgatttgcccaccttggcccccaaagtgctgggattacaggcatgagccaccgcgcccagcagcaggagctaatttttaagaattttttgtagcaacaagttgttgctatgttacccagctggtcctgagtcactggggttacaggtgtgtgtcaccatgccaggcttgcttcctcctccgttaagtggccatttttccacctcaaaaattggtttgggacacaaggaagaattggaaatgcttaagatgagaacaaaagttgagaccacccaacacagctgggaccttactgcccagtgctcccagtggtctgaccaaaaccccacaccagacagtacaaaggcccactcccgagctgccgcttacggcccagcgggaacagactgtattcttatctttcggcatttctctgcaaataaaaaggtgccactgcggtccggcctttgtgcacttgcccttgtgctgagcaaggcgggtggcctgttcttaccgctgggttctgctgcccccacccccatttcggtgactaaacctgcagctctgatcctgttcccaaaggggcaggaggccgggctcaccccaggcagcccctggcctccctgacggccccctcgggaggggttccgtgctttgatcgcctttccagcgccgatactgcagtagctgggcccggccgagagctcgcggtcacgaacaccggcagcctcttgcctacagtgtcccgcgctgcagaagagcctgccctggcgctgagctggtcgtggctgcttcagcagtgggcctgcgcctccttgtaggccagccctggcccagatccaggtgcctgccccggaagcgcgcggctgcccggggtgaagccggagggcggcgagcggctgtttcggccggtaggtggaggcgttgaccagcctctgggaacggggcgggacctagttgggggggctccgccccctccccaggaggcgagctcagcccgcgacctttatcccgcgcgttgcggtcaagatggcgctggtggcttctgtgcgagtcccggcgcgcgttctgctccgcgcgggtgcgaaacccggggtgggcagggatcgggccggggccggggccaggaccgggaactaacgggctcccccacgctgccttcgcaggggcccggctcccgggcgcggccctcgggcggacggagcgggcggccggcggcggagacggcgcgcggcgcttcgggagccagcgggtgctggtggagccggacgcgggcgcaggtgagcgggcggcgccgagggagggcgggcgtggggtcaggacccgcgggggtccgcgctcgcggggtgctgtcggagaaccacgtctgtcgacgctcggtttgtgtttagaacccaagtttcgaaacagaaccttgccgctctacctgggttcgttcgtcatgagataaaagtttctgtttttaaagttggcggaggccgggcgcggtggctcacgcctgtaatcctagcactttaagaggcagaggcgggcggatcacctgaggtcaggagttcgagatcagcctggccaacatgatgaaaccctatctgtactgaaaaatacaaaagaaaaaaattagctgggcgtggtggtgcgtgcctatgcctgggaggctgaggcagaagaatcgctggaatctgggaggtggaggctgcagtgagccgagattgtgccactgcactccagcttgggccacagagcaagattccgtctcaaaataaataaataaataaaaataaagttggcggggatatgagctgttatctaagttattcaattggaagtggaaaagaattggaatcttttggaataaaattacgtttgttaacactcccatgtggcacagaacctcgtacctacccgcccgtcagaacccttggtaaaacccactggaaaggatagaaaaagtacttttggaagagaagcctgtgcgctccctccagacaggaggccgagctgagggcaccgagagggcacgcctaggcgccagcagttctgcttccaggacatgctgacctggacctcccggtgcagcagtccctgctgtggctcctgagaggaggccctccccctccgcaagtaagtcacagcccctgccctccccaaccccccagactcagggctgtgcccaactttgcacagcttcaggactccaggctcctggtgcctctgaacttggttccgtcctctctgtctgggctgagggagctgcctgggctctctctacaaacttgagagggacaaactaagaccaacttcaaactgactttttttttttttttttttttttttggagatgtagtcttgctctccagtcgccagactggagtgcagtggcgcaatctccgatcactgcaacctgtgcctcctgggttcaagcgattctccctcctcagcctcccaaatagctgggattacagggacccaccactatgcccactaatttttgtaaaaactgagtttctgaagggatcatttctgtagcatatttgaatatatctcaacaaaatgcaaaaaaaaaaattattatttttttttttttgagacagaggctccctctgtcacccaggctggcgtgcaatggcgcggttccggctcactgcaatctcagtcaggcctgactttctgactccaaactctactttgtctttttttttttttttttttttttttttttttttgagacggagtcttgctctgtcgccaggctggagtgcagtggcacgatctccgctcactgcaagctccgcctcccgggttcacaccattcttctacctcagccgcccaagtagctgggactacaggcgcccgccaccacgcccggctaattttttttttttggtatttttagtggagacggggtttcaccatgttagccaggatggtcttgatctcctgacctcgtgatccacccgcctcggcctcccaaagtgctgggattacaggcgtgagccaccgcgcccggcttacgttgtctttttatatggtaaagtggggaggcactcgagtaaaaaaattgtcattgtacgaacacttttccttttttaccggaggtaatgtgtgtgtgtgtgtacataaaaatctttaaaatatgcctcacatttaccattctagccattttgcaatgtacaaccccgtggccgtaagtatattcacaatgtgtagtccacactacccattccaataccttaagataacatgtttttgagtccgggcccggtggctcccacctgtaatcccagcactttgggaggccagggtgcgcggatcacgaggtcaggagattgagaccattctggctaacacggtgaaaccccatctctactaaaaaatacaaaaaaaaattagccgggcgtggtggcgggcacctgtagtcccagctacttgggaggctgaggcaggagaatggtgtgaaccccggaggtggagcttgcagtaagccgagatcgcgccactgcactccagcctgggcaacagagcaagaatctgtctcaaaaataaattaattaattaaataaaataaataaataaataaataggaatgacaaccacatggatgaaccttgaacacatgatactaagtggacaaagccgacaacaaagcccggcggtatcccagtgatatggaatatggctggagcaggaaaaccgcagacacagaacgcagactggcggcttccaggggctaggggtgggatgaggagcaactgctcatggggacagggattccttttgggacaatgaaaaggttctggaactaggcagcggcgatagttgcacaacacagtcagtatactgaattgtgtaagtgcctgacttgtttacttaaaaatggctaatttaggctgggcacagtggctcatacctataatcacatcactttgggaggccgaggcaggaggatcacctgaggtcagaagttcatgaccagcctggccaacctggtgaaaccccgtctctactaaaaatgcaaaaattagccaggcatggtggtgtgtcctgtaatcccagcttctcaggaggctgaggcagaagaatggcttgaacccaggaggcagaggttgcagtgagccgagatagcgctgctgcactccagcctgggcaacagagcgaggctcttgtctcaaaaaaaaaataaagatagaaaatggttaatttggccgggcatggtggctcacacctgtaatcccagcactttgggaggccgaggcgaggtgttcacgaagtcaagagatcgagaccatcctggccaaccaacatggtgaaaccccatctctactaaaaatacaaaaattagctgggcatagtggcgcatacctgtagtcccagctactcaggaggctgaggcaggagaatcgcttgaacccgggaggtggacgttgtagtgagctgagatcgcgccactgcactccagcctgggcgacgagcgagactctgtctcagaaaaaaatgatagagagagaaagagagaatggttgatttaaaaagcatgcagtttatatagaataaataaaattgttaatttatgttatatcgatcttacttcaatgtaaaaaaccaagggctcactcctgtaatctagcactttgggagcctgaggcagaaggaccacttaagctcaggagttcaagaccagcctgggcaacaaaataagacctcgtctgtactaaaaaataaaaaagattaactgggtgtggtggcgcttgcctataatcccagctactcagcaggctgagttgggaggatcgctggagcccaggaggtcaaagctgcagtaaccagagatcacacccctgcactcctaggtgatagagtgagaccctgtctcaaaaataataataataaaaaaataacccccaggccgggcgctgtggcttacgcctgtaatcctggcactttgggaggccgaggcgagcggatcacctgaggttgggagttcaagaccagcctgaccagcatggagaaaaccccgtccctactaaaaatacaaaattagctggatgtagcggcacgcacctgtaatcctagctactcgggaggctgaggcagtcgaatcgcttgaacccaagaggcagaggttgcggtgagccgagatcgctccattgcacttgaacctgggcaacaagagcaaaactccgtctcaaaaaagtaaataaaaataggaccaggcgcgggggctcacgcctgtaatcccagcactttgggaggccgacgtgggcagatcgcgaggtcaagagatcgagcccatcctggctaacacggtgaaaccctgtctctacttaaaagaaaaaaattatccgggcgtggtggtgggcacctgtagtcccagctactcaggaggctgaggcaggagaatggtgtgaacccggaaggcagagcttgcagtgagctgagatcgcgccactgcactccagcctgggtgacagagcgagactctg

SEQ ID NO: 96975 - DNA, 12599 bp, Homo sapiens
cacagaccgggtggcccagaccgcagaagctcatctcacggtgctggagaccagaggtgcaaaatcaaagtgtgggcaggactgcacttcctccctgcgttccagggaggctccttcctgccccgcccacttctgctggctccaggcctccctgggcttgtgggcgcctcgctctaatctctgcctccatccttacgcagctttctcccctgtgtttctgtgggtctcaggtctctctctcccttctcaggacacctgccatgtgatttaggacctaccttaaatccaagatgatcccaacttaattacatctgcagagactctttccaaataaggtcacacttccaagttccagagcagtggttagggcttggacctatcttttggggcacacttttcaacctactacaaagacaattgtccacttcatagaaaaagagctggtcatatcagcgatggtatagaccagggcccagcaaattctgtctctaaagggccaggtggcttgtgggctctgtaggtaagacctttgtagcagaaagcagccacagaggagacgtaaactgacaggtatagctgtgttccggcaaagctttatggacagtgggccaggtgcggtggctcacgcctgtaatctcagcactttgggaggctgaggcaggcagatcacttgagatcaggagttcaagaccagcctggccaacatggtgaaaccccatctctactaaaaatacagaaatgggccaggcgcggtggctcacacctgtaatcccaacattttaagaggccgaggcgggcggatcacaaggtcaggagatcaagaccatcctggctaacacggtgaaaccctgtctctactaaaaatacaaaaattagccaggtgtggcggcgggcgcctgtagtcccagctactcgagaggctgaggcaggaggatggcgtgaacccgggaggcggagcttgcagtgagctgagatcgcaccactgtactctagcctgagcaacagagagcaggactctgtctcaaaaaaaaaaaaaaaaatgagccgggcgtgatggcacgtgcctgtaattccagctactgggaggttgaggcaggagaatcgcttgaacttgggaggcagaggttgcagtgagccaagatcatgccattgtaccccagcctgggtgacagagtgagactctgtctcaaaaacaacaaaaaaaattttatggacactgaaatttgagtttcacataattttcacatgtcacaaaatactaaccttcttttgattttcaactattcaaaaatgtaaaaaccagcccggcacagtggctgaagcctgtaatcccagcactttgagaggccaaggtgggcggatcacctgaggtcaggagttttagaccagcctggccaacatggcaaaaccccgtctctactaaaaatacaaaaattagccgggtgtgggggcaggtacctgtaatcccagctacttgggaaggctgaggccggagaatcacttgaacctgggaggcggaggttgcagtgagccaagatcatgctactgcgctccagccaggacgacagagtgagactcctctcaaaaaaagtaaaaactattcatagcttcagggccttgagaagccagatttgccaaccctgatacaaatgactgaaggctgtgctgccatttcctgtgctgtaagacagtatttaatatagtgccatggaaatttttttatttttattttatttatttattttttttgagatggagtctccctcttgctcaggctggagtgcagtggtgcgatctcagctcactgcaacctccacctcctgggttcgtgccattctcctgcctcagcctcctgcgtcgtggaaatattcttcataatatagttgagtgaaaatgacacgttaagtcgctgggcgcggtggctcacacctgcaatcccggcactttgggaggccaaggagggtggatcacctgaggtcaggagttcgagatcagcctgaccaacatggtgaaaccccttctctactaaaaatacaaaaattagccgggcatggtaatgctcctgtaatcccagctactcaggaggctgaggcaggagaagtgcttgaacttgggaggcggaggttgcagtgagccaaggtcacgccactgtagtccagcctgggtggcagagacagactccatctcaaaaataaataaataaataatacaaaattagccaggatgtgtgtgcacgcctgtagtcccagctactcaggaggctgaggtgagaggatcacctgagcccagggattcaaggctgcagtgagtcgtgatcactagtgcactccagtatgggcgacagagaatatcctgtctctttaaaaacaaaacaaaacaaaaaaaaattagggccgggcgtggtggctcatgcctggaatcccagcacttggggaggccgagatgggtggatcacctgaggtcaggagttcgggaccagcctggccaacatgaggaaatcccatctctactaaaaatacaaaattagccgggtgtggtggcacacggttgtaatcccagctactcaagaggctgaggcaggagaatcacttgaactcgggaggcggaggttgcagtgagccaagatcccaccattgcactccagcctgggcgacagagcaagactccgtctcaaaaaaaaaaaataaaaaataagttgggaatcaccccactgcccctgaaagtgggatttcagtggcacgtcccattctctttagaccatgctcgacagctgaccaaggccatgatgcgaaaggccacggccagccgcctggtcacgcagcgcgatgcggacgtgcagaacttcgtcagcttcatctccaaagactccatccagaagtccctgcagatgtacttagagaggctcaaagaagaaaaaggctaacgattgggctgccacaggcttacggccacacgtgcccctgtgggtcccagggaggtcttaaacaaggtatttttcaacttaaaagtactgccagcgtttcattttgctgatgttacgtagaagttcctgttcctcatagcccagtggcccaaggcccagccacacacaaacacacatgggtgcctgtgcccgtcaggcaaggggagttggagggcagccttttgacttgggattgtgactggcaggggatgccattctggacctggtgaggttgccacggagtgtctctgttcccaaggcagaatcgtaagtcaagtccctggtcatccattctggcctttggactgcctgctcttaggtgtaaggccaggtggtcttggcccccatgacccacacagaactccccagggaaaagccctttggtcactgcccttactcatcaggatgaagagcgcacagtgaatcagagcaactgggggatcctgagccagcgggagtgggactctggaggcagctgtgctgccagggatccaaatgtcccttaagaaggattttgcaagaaccaaactcatccaaacccttgaaacaaaggtttttcctcccatgcgattcagaccaagttaccacatcttgctaagatgtgatgtttcaaaaaccagaaacctcatcgggccccagtcagtgacccagtggacccgtgggcctgccttttccctatcctaatgtgtccttgcccaggcacagggcagcagccttgaagggctgagccacggcgagctgggcggttctttgcacgggaccttagtcccaagccacctgcctgggcagggaggagtccagcccgcccactgctctcaggctctccaaaagctccagggctgctgactagctggggctggcctccccttgcagtgctgggtaagaccgggctcttgagacagacaagtgcctgggggcccctgcagggccctggaatgggggctgcggggtgggcctggggagagctgttctgagagccccgagggcccaggaggctggtgtgttggcgccatccctgtcccagctgtgctcacagtacaggctcctgggagcgtttgtagtttccacagaggatgagcaaggagcatccctgagctgccttctggggccagcaggctccgggggcagccacgtcccaccaggacatggggtgggcagcccaggccatggctgcccctaaggagctgaggctgggtcctaaggaaggacagaggcctgggagccaagctgtggggcccgaccgggagcagctcatttattgagcagacatctgccgggcagtgccccctgcacccctcatggggctcacaacaccccatgaggtcgctggatgcagcccgtcccacagatggggaacggaggtacagagcagcacatcacgtgtccatggcccctggtccacgcccagccgactctgccttggggcctcactgaagggtggctgccaccctgaaggggccactgttgggccattcctcagagccagggtctgcaggtggcatgccccagccaggcctcgagtcatcggtggaacttgagggtcacctccactggaaagtggtcgctgatggcaagagcctgtggggacagagtgagcctcaggggaaaagtgcaccccacccacagggatgggaggggccggtgaggcctgggtgcccacccctgctgctgcctgcggtggggcaggggcaggggccggggcagagggtgtcaccattggccctttgagggaaaggcaaggtaccctgcctgcccagagctccacatggggtgggccgggctctccagggtccttggaaacgagccctggtgcagggaggaagctgaggtggccctgccttgggcgctggaccctccctgctgcctgcgtgcgcccgggcggtggggacccaagaccagcaccgccccacggcccactcgcctgagtctggtccaggccgaattcctcctggaagtcgtgcacggtggccgactggggcttcaggctccggcgcaggcgggcgccacaggccacaatgcggtcgtaggcgcagtctgagttgcccaccgtggtgtcggcgctgtcagggatgagccacttgaagacctcactgctcctcagacggatggcggcccagtcctgcgcccgcacatagctgcagtcggcgttgaagtcgcccaggaacagcatgtcctgcgggcgccgcggagccgtgtctgagccgccgcaggagccgtcgaggtcccgccctcatgaaccagacccccggggcgcgcctgcagggaccccgggaccgaggggtgggcttacgtcggtgccccacttgtcgatcacgtccaggtacacgtcgtagagcgcgtcgatctccgccacggcttgatgcggcgccgcgtgcagcgggatcagcaccaggttctgtgctgctgcgggaaggggtgggggcgtcagagctcggcgggaggggaggggcggggcccgctcaccggtgccgggggccgagaacttgaccacgaagggctcgcggctgaagacgtcctcggggtctgggtacaggtaggtgtccacgaccgacaccgcgtctttcctaggagatggggaggacccgctgagcccccgacctgcggccccgcgcgcccctccctgcggcccgcccctcacctgtacacgaacaggtacatctccttgtactggtcccggcccaggggctggctgctcacaaagctgtactcgtgctcggacacgctgcggagacaggggcccgctcagggtcggggcgccgcgccggggcgagatcccggcggggggtcgcgacgaggggccctgcccaccacacctgttgatctgctccatgagcgcggacacggcgctgaggtctgggtctcgcacctcctgcaccagcgcgaggtcatagccagccaggatctggggaggagcggcgggtgcgggggtcagcgcggtcagcacccctaaacgccgccccgccccggcccgggccccaccttcgcgatgatgctgccgcaagcggggtccgacactttgctgtcaccgaagctctgaatgttgaaggctccgatgcgaagcgcggcggtcccggcggcttccagcgcccagagtgcggccagcagagcccggggcccgcccatggcgcggagcgagaggctgggagggacagacgctgccgcctacgcagacccgctgtcagacccaccgacccaccccttccctccgcggccgccccttgacggccagtgcgacgcggaatccgcccctgcgttctgcaggctcccagggcactgctgggctctcagggaccgctgycttctcactgcgcgggaagctgcagccggaatggagggtccggcccatccagccccagctcagggcarccgagagactcaccttggatgtgggtgcagaggcccgaggctcagagatcctagggggatggggatcccgggtccaggctgcgggcgtgtccgacacaggactgcactgactccctctggcagtagctctggcaccaaggcaggggccggtatttgaggtcctgggccagggaggggccgggctgcactgggtcccgccccctcgactcagctgggtgcctgatgaactcctggctttcattcccatggagacccccagggtaaggggtgggagacctgcctgagccggttctggtgccccagacctgtcccaaaaccgtcccagaagcccctgccagccccctaggagggaggtagacggtcagccacatcccggtgcggctgtgttcttgtcctcgcccctagaaattaggtcgcctagactctgcctccctgagcagaatcccttcagggaaagcaaggcagcgcaggtaggaccagccacactccctacccagcatctcctgctgctgctccacctgctcaccctgcggtggaggccgaggctcccagatctccctgtccccgtccctggtcctcccacccacccacaggcctcaggcagcgcagctgggggcacagctccagctgggcagggcaggaggctgttggtcaacatgccaatgacacccacacagcaccaaggcgccgccagggctggcagaagcccctgggtggggcggccaggcacgtgagtctaggagtggcctgggaggcaggtgctgctgcgggggcctgggcaaaggtggtggcaccagccgcggaggctgccactgccacaacatcacaagctgcaggttctcatgttttattgtaaagcaacaagaaactcttatgtacactgtccgtcttggggcgcctccatcctgtgccatcttctctaccaggccaggcaggcatgggtggggcgctcagagtcctctgccctgtccctgcccggccaggaccccgcagacctcatgctagacgatgaccgtctgcacctccagctggccctccggcgaggcgatgaccagctcgcctgcatgctccaggatctcgatgtcctctgatgacaccatggtcacagtggcctgttcagtgccacttgtccctgcccgggcggcaagcacagtgccctcgctgatggccgaggccagcgtcatggccacctgctctgtcaggctctcgggggtggcgatggtgatggtgtcggcggcagccgcctctgggcccagcgccgtctcctcgtccatggtgacgttctgcacgatgatctggtggccggcgctagcctggtgcacgatctgctgcaccaccttcatgatgtggctgtccacctgcagggccacggctcagcaagagcggctgtgccagggagcctccccgcccccgcctgccctacccctcacctctgtctgggtgccctcgatgatctccgtggcctcactggtctccgcatcgtccgcagtggcctgggcagatgggcagaaggacagaggtcagccttggctgcccctgggtcccagcacggccccagggccccacacccacctcgatgatatactcctgggtgtcagctaccacggacgagaactccaccaacactgtgtgcgggtcttccgtgaggacggtggtggctgccgcggggctgtcctcagacaccagcaactcctccacctccagcaggcagccccctgtgggtggggactcggtcagggctaggcaagccccggccccctcccctccccctcccacctccaccggcccagacctttggtgcgcaggtgccggttcagcgtgccgtgctcggcgaagccacggccgcacttgtagcacttgaacggcttctcgcctgtgtggtgtcgcacgtgccgcaccagtgagcccttctctcggaagccacggctgcagaactggcacacgtgcggcttctcctccaggtgtgtcctgaagtgcacctgctgtgcgttctgtggagacacctgtcagtgccagcctggccttggccacaacagactacagctctcccctcccgcctgtggcccaagggaggggctgggtcaagactgagcatggtggaggcagggaagggggtgcacctgggccacggccagggagcaggatggggggatcaggcgccagggtcctgcggccagagacccaccttagtcttgtagcgcttgccacacttgggacaagggtagggccgctcgtctgagtggacgcgccggtggccacgcacatgggcaatggtcttgtagagcttcccgcagtcgccacagcggaagcggcgctcacgcacgtgcacctcctggtgcttcttgagcaggtaggccttggggaaggccttgccacactgcgcgcaggcgaacggcctcggccctgcagccacacacagcatcaggccaagcccatcacccgcgggcccgccaggccgcctgccacctgcccacagatcccctggctccctgctgtctatggacccaccctggacacccagaagcaccccggccacctatagcccatccactgccatgggccacacacccacccatcacctaccggtgtggcccctcttgtgggcctccagggtggctgctgtcgggaaggtctcactgcactgaggacatgggtgggtcctgggcaccgctgaggcctcgctggccacctgctggggaaccacaggaaggtctccagcacccggggcaggctgtgccctggcagtaccaagaacacaaccatgggccccaccctggcaggctcccttgtggccccagggaaggcagtaaacagatcaatggacaaagtcactgcagaaagccacttcagggaggcgaaggccagcgtggggacagcccctgggatccagccctgggaggagcccgcaggtggtgctggcacctactgtctccagcggctgcacttccagtaccggcagctgcggggctgccactgccaggggctggggactggacccggcagcaggagctggctccagggcaccctcctccccagcagcgcgctcaaggacgatgccggagttctgcatggcctggtgcagcaggttctcacggctgccctcgctggagcaggggagctcctgggagacggggggctgcaggggaggcagagagaggaggctggccaggcagcctggcatccagcacccaccccatggggcagacgcacgccaggagccttgtgcaaaccctcagacccccatggcgctcccactggccctgctctccctgtgggaagcccagccctcgcctgcctggctcagacccctggagccagtgcccagaacaaagactggcaccgagcaggcagaagacagagcagccctccggggccccccgtcgcccccacctctggggccagggctttcatgcccagggacagctcctgcatctggacgtggacttcgtggatgacggtgcccttggcatctgtcaccaggtgaatcacgggtgaagtctctataggctcgcctgtcaccgatgatgtggctgtccccaagccggcagctccagctccagaaccttcaaggtggagtgagggagtgaagatccctcacacaccccagtggcggctgcgtccacagccagcccccaggaccaggcagctgcccgcaccatgctgacctgcacgtgcgtcctctttgctgacaaccacgtccttgctcacactgaagcggattttctctgtgcagggggtgagagacttgaggtgccgggtcagtgcacccgactcccggaagctctttccacacttggagcacttgtaggggcgctcatctgcagagagaacctagtcagccccgggcagccccagcaggctggcgacaaggtgacaaggcgaaggcaggcaggggcccccgcctcatcccccaaagctggggaatgcgaggctggggcaccccagggccaaccatcggggtgctaccgggctccagcccgaggtgcggccagctcacccgtgtgccgccggtggtgccggatgagtgagcccttggtgcggaaggaggccccacagagcttgcactcgtggtccttgcggctgctgtgagtgaccatgtgggccttgaggatgctgccctgtgggggagggcgtggcagctcagggccctcctgggggaacaggagggggcctgccacccacacactggctccccgcacgccggctcaccgtcttgaaggtcttgtggcacagcgcacacacatagcggccatccttgttcaccagtagcttcacctgggcctgctcaccctcccctgcgagccccagcccctgctggtgggggctgcccggggcctcggccatctcaccgtctcccagctccgcctcagcagccacgatgacctctttgatgtgcccaccacctaggagaagcatctgggcctaagccccaggacctgcccctgtccagagaccccagagactgctggctccaggggaggggacctgctgctctgagccacaccctggacccaacctgcactgagccctcaacacacaggtccgagcaacagccaaggtcccattcacctctccaggtcagagtgagaggtggagagacacctcccgactctgtcaggctgcccagagatgctccagggcccctaaatgtgtccacagggagacccaccatggagcacagatgccccatccccaaagccaggaggacgtgcgaatcctggtgacaaggtccttgggtgaagagacagccgcctgtcctgctcgctgccactgctcctgccactgctcccaccaacatagggaggatgtgcgtccggggccactcttccatcggaggagatgggctgggccactgcagcagggcaggcaggcctggccagagccccgtcccaaggcaggcttggcctgggagagtgaacgctctccagacacccgggacagcctgaggcgaggaagctgggcttttgcacttctggaggatgctgggaaaaatctgacaatgtgcaaagctaggttgtaaacacagttcaggttttctgctcataaagatgacaagtgggaaacagctgtgaagccactgcttagaaaccacctcagtccggctggcgtcttgttttgacaagctgttctcttgaaacacgacaaaagcgtggtgactcagaaacaattaagagcctctcctgcccgagcccttacacgctcgatgccccaggagtgatcttccaaaggacagaggcctctgatggggaggacctgggggaacatggctgctgcgaggccagaggagacgcgaactttttccgcgaagcggcaggagggcctggaggtgggttccaactgcccacacagctgaccgcacccctgcacccgcaaagacaggacctggcacgccccagcccttggccaccagcaggcaggaccctgtgccatctccactagaggccaacaggagagctagcagccctggactaagcccaccgggcctgctgactggccaagggcacacacagagtacccaggatgcccgcaaaggggaaaatcccaggggtgccagagtggcaggggtgccaagaggggctgctgaagcacagggaggggtgctgagcctagggctggaggctgctagagtttaggtgggtggaaaggggcctggctggccagagacccagcccagagaccccgccagaacctaaggagttcatgctcccaggtgacgccaccatcccagaaaccaaacgccaggtcaaggccagagcccgccccacctcccacatgaacattccgagctctgagtggcattgatgagtgtcttggtcgcaggaatgccagggaaaggcagcacggaggtgagacaggtgccctggctgcctcctggagagcagcctgctcacaggtgcccttcccaggccccgggttggcctccgccacggctcctccaccccctcttcctgctgcagccagtccccagggctgcccaaggccaggttccgcctggtgcccaaacctacttcctgtccagctgcccactccccgcctgcctcagccccggtccagcaggctccccaggcagcagccatgccccgccccacctcccacagcatcaggtccctagacagctccttccctcgcgtctgcacacctagccactcgcccctgccgcacccccaaccccagcagcccctagctccctcaacctgcccaggccctggctgcctctgaatgcccccctgcacaagcatctgtccccgatgagagcttgcccatccagacc

SEQ ID NO: 96976 - DNA, 61461 bp, Homo sapiens
  misc_feature (1)...(61461): n = A,T,C or G
gattttattcatcaattctactctttcttttttttttttttttgaggcccagcctactctttcttttaaagtaactaatttctgctctttactttctaatttccttccatcttttttggggggtttattttacaggtgtttttctagaatgttgaaataaacacttaatttatatattggtttgattcttcatgctaactaataaaaacaagtgaagttatccgtttctctccatgtataactttgactgcatccccatagattttctatgatgtttgctcattactattcatttcctttttttttttttccttcttttttgagacagagtctcgctctgtcacccaggctggagtgcagtggcatgatctcagctcactgcaacctccacttccagggttcaagtaattctcctgcctcagcctccctagaagctgggattacaggcatgtgcccccacgctctgctaatttttgtatttttagtagagacagggtctcaccatgttggccaggttggtcttgaactcctgacctctggtgatccgcctggcttggcctcccaaagtgctaggattacagtcatgagccaccccacccagcctattcatttctatatgctctactttttatttatttattttttgagacacggtctcactctgttgcccaggttggagtgcagtggcacgatctcagcacactgcaacctccccatcccgggttcaagcgattctcctgcctcagcctcccaagtagctgggaatacaggcctgcatccccacacccagctaatttttgtatttttggtagagatggggttttgcgatgttggccaggctggtcttgaactcctgacctcaagtgatccacccacctcggcctcctgtagtgctgggattacaggcgtgagccaccgcacccagtccatgatttccatctttacctttcagtgatctgggctgtcagggtgtccagctgtcctgtgaccctctgcggatggttcttccggcctctctactcaggtgggagtccctgaattaggctgtgcttgtgggagcttcagttttgatctggtttcaagatttgatgcagtgagcaagtgaaagtacccaagagagcctctagggggcggtggtgtttaaggccacgttcttttttttcttttcttttcttttctttttttttttgagatggagtctagctttgtcaccagactggagcgcagtggcgcgatctcggctcactgcaacctccacctcctgggttcaagctattctcctgcctcagcctcccgagtagctgggattacaggcacacaccgccacacccagctaatttttgtatttttagtagagacagggtttcaccacgttggccaggatggtctccatcccctgacctggtgatccactcacctcggcctcccaaagtactgggattacaggcgtgagccaccgcgtccggccaaaggccacgttcttatctaagcttttcctctgaccttgcctaacatctgtaatgccaaaatagttaacacgccctgttttgtgtacaatacagcttattaactgtgctactcaaagtctctatatctttactgacataaaaaaattgtctctttggccgggtacggtggctcacgcttgtaatcccagcactttggaaggccgaggcaggtggatcacttgaagccaggagttagagaccaacctggccagcatggtgaaaccctgtctctactaaaattacaaaaattagccaggtgtggtggtgcacgcctgtaatctcagctactcaggaggctgaggcacgagaatcacttgaacctgggaggcagatgttgtggtgagctgagatcgtgccactgcactccaacatcctgggcaacagagcgagattctgtttcaaaagaaaaaaaaaattgtctctctctctttctttttttttttagacaggatctcactctgtcatgtaggctggagtgcagtggtgccatcatggcttactgcagccttgaccttctgggctcaagtgagcctcccacctcatcctcccaaataactgggaccacaggcgagctccgctatgcctggctaattttttgtttgtattttttgtagaaatggggtctcttggctgggcgcggtggctcacacctgtaatcccagcactttgggaggccaaggcgggtggatcacgaggtcaggagatcgagaccatcctggctaacacggtgaaactctgtctctactaaaaatacaaaaaattctccgggcgtggtggcgggcgcctgtagtcccatctactcgggaggcgaggcaggagaacggcgtgcgcccgggaggcggagcttgcagtgagccgaaatcgcgccactgcactccagcctgggtggcagagcgagactccgtctcaaaaaaagaaaaaacaacaaacaaaaaaaaagaaatggggtctctctgtgttgtccaggctggcctcagtgatcctccttccttggcctcccaaagttctgggattacaggcatgaaccactgtgtccagacaaaaattgatctgtaaactttttgagacagcatctcaccctgttccccaggctggagtgcagtggtgtgatcatggctcactgcagcgtcaacctcctgggtctacttgatctgtaaacttcgagggaaggtgtaataaaccctcctgcaatgtctttgtttttcaaaatctttgtatttcacagtttagcttcgtgggttgatgttctattttgtttttgtgtgtgtgtgtgtgtgttttgtgtttttttttgagacacagtcttgctcttgttgcccaggctggagtgcaatggtgtgatcttggctcactgcaacttccacctcttgggttcaagagattctcctgcctcagccttccgagtagctaggattacaggcgccgccaccacaccccgctaattttgtatttttagtagagatggggtttctccatattggtcaggctggtctcaaactcccgacctcaggtgatccgcccacctcagcctcccaaaatgctgggattacaggcgtgagtcaccgcacctggccaatgttctatttttgagaacacaacagttcataatatattctacatagaccatacctgttatgtgtagataaacagactcttttcccatttaacaccttttgccttaggtttatttttctggtatcaatactggcacacttactttgtttgcagtttcctgtcttttttttttttttttttttttttgagacagagtctcactctgtcacccaggctggagtgaagtggcgggatctcggctcactgcaacctctacctcctgggttcatgcgattctcctgcctcagcttcccgaatagctgagaccacaactgtgtgccaccatgcccagccaatttttgtatttttagtagacacggggtttcaccatactggccaggatggctcaatctcttgacctcgtgatccacctgcctccgcctcccaaagtgctgggattacaggcatgagccactgtgcctggcctttttttttctttttgagatggagtctcactctgtcacccaggctggagtgcagtggggtaacctcaggtcactgcgacctccgcctcccgggttccagtgattctcctgcctcagcctcccgagtagctgggattacaggcacccaccaccatgcctggctaatttttgtatttttagtagagacggggttttgccacgttggccaggttggtctcgaactcttggcctcatgtgacccgcctgccttggcctcccaaagtgctgggattacaggtgtgagccactgtgcctggcctggctttcttgtttcttttctcctcttctagtttcccccttttaggctaacaattattcactgttaataaaaaccctcaggtctgtattttatcaagaaacatttccctcacgtcttcttccctgaaccaaacaagatctctggcacattttatttgctctgtctcaccacatggattttgtttttttgtttctttgttttttgagatggagtctcactcttgttgcccaggctggagtgccatggcacaatctcagctcactgcaacctccacctcctgggttcaagcgattctcctgtctcagcctcctgagtagctgggattacaggcgcgtggcaccacccccagctaatttttgtatttttagtagagacggggtttcaccatgttggtcaggctggtctcgaactcctgaccttgtgatctgcccaccttggcctcccaaagtgctgggattacaggcatgagccaccacgcccggcccccatggtttttcaaatagtttagaatttcatttccaggtaactaatttgcttctttaaacatatgtcttttctatttaagaaatcctttctaaacaattgcattttattccacaaccgccttcaaacaatcattgagacttggttaatctgttttgctcatttggcagcagtttcttgtggctgtttcttccctccactggagtccttgaatcttaagtctgtcatttgactgcaattaaaagctgggtttggaatacaatcgcagccttaccatccacctgctgtgtgacctggtaaatttctttttttttttttgagacggagtcttgctctgttgcccaggctggagtgcagtggcacaacctctgcctcccaggttcaagcgattctactgcctcaggctccctagtagctgggattataggtgcctgccaccatgcccagctgatttttgtatttttagtagagatgaggtttcaccatgttggctaggctggtctcgaacttctgatcttgtgatctgcccgcctcggcctcccaaagtgctgggattacaggcatgagccaccactcccagccagttctttttttcttttttccatttttttttttttcgagacaggatcttactcttttgcccaggcgggagtgcagtggcacaatcacggctcagcgcagccactgcctactgggctcacacgctcctccggcctcagcctctcgagtacctgggactacaagcgtgagccagtttggctaattttggctaatttttgtagaaacggggtctcgccatgttggccaggctggtctccaactcctggactcaagggatccaccttcctccccctctcaaagttctgggattaccggagtgagccactgtgccctgctggcaaatttcttaaactgtctgtgcctcagtgacctcatttaataaagggaataattgtagcacactttttctagagctgtgaagattcaatggaataaataaggcaataaatgaatggatggggaatgaaggatgtgggtttcctccctcttgtctttcaataagctctcaccatcaacctcccattgcctgttctctctcttccccctctctccctctgtctctctctcagccaggaaacctggggtagggaggcttggagccagcgggtgcgtcgggaggctgcgggtactgactcgggccgcgcacggagatcgcgggagaaggatccacaccgcggaagaaggatcagggtggagcctgtggctgctgcaggaggaggaacccgccgcctggcccacaccacaggagaagggcggagccagatggcaccctgcccaccgcttcccgcccacgcactttagcctgcagcggggcggagcgtgaaaaatagctcgtgcgcctcggccgactctgcagtgcgacgggcggagcttccagacgctccgccccacgtcgcatgcgccccgggaacgcgtggggcggagcttccggaggccccgccctgctgccgaccctgtggagcggagggtgaagcctccggatgccagtccctcatcgctggcccggtcgcgctgtggcgaagggggcggagcctgcacccgccccgccccccctcgccccgtccgccccgcgccgcgcggggaggaggaggaggagccgcggcggggcccgcactgcagcgccagcgtccgagcgggcggccgagctcccggagcggcctggccccgagccccgagcgggcgtcgctcagcagcaggtcgcggccgcagccccatccagccccgcgcccgccatgccgtccgcgggccccgcctgagcygcggcctccgcgcgcgggcgggcctggggacggcggggccatgcgcgcgctgccctaacgatgccgcccgccgcgcccgcccgcctggcgctggcccwgggcctgggcctgtggctcggggcgctggcggggggccccgggcgcggctgcgggccytgcgagcccccctgcctctgcggccyagcgcccggcgccgcctgccgcgtcaactgctcgggccgcgggctgcggacgctcggtcccgcgctgcgcatccccgcggacgccacagcgctgtgagtagcgggcccagcggcacccgggagaggccgcgggacgggcgggygtgggcgsgttccctggcccgggacgggaagcaggacgcgggccaggacgctcccagggcgaggctccggcgcrgcacrgcggccctgctaaataaggaacgcctggagccgcggttggcacggcccsggggagccgaaaaaccccgggtctggasacagacgtcccacccgggggctstgcrgacgccagcgggggcggggcscggaggccgcgctcagctgggaggacaaacagtcgctaattggagaggaattgggatkcgscctggggctgcggggtacccggagagrtggggatggytgtagggggckgcagggaagagttccaggaggtgtctggamaaggatttgatggatgtgcaagaattgggctgatgcttaggaaggggcgatgaggtgggtccagaagaaggggggtgaacggtgtgagcaaagaccrtgaggctggaggctggccacgggaggtgtgaggggtaggggcagggtgggaggtgggctcgcgggtgggctggggtcatgaagggcctcaggcgctctgctattgggttccaaggctatcctgagaacaggggtgagggsggattkccgtggggggttaaagccttgtcatgttcgctttcgggagataaaaacaacaggtggcctttatggagacgctgcccagagccaggtctktgccaggctcctgttgggggtcgtcatgcggaatcctgactctgaccatccgaggcatagggaccgtggagatttgcatttcacagatgaggaaacaggtttggagaggtgacacgacctgtcccaggcatcacagccgggatgtgcatagcaggggtttggaactatgaggtgcccaggacccagggttggattgaaaagggcgsaggggactaagataagcagacagttgtccccagcgctggggagagtcttgggaccagtctgatgccttgtatttcccaggctccaggctcctcgccgggacagtgtctcyttgggtgcgtgctggatccctgggggacgtggcacatccccaggcttkctaaacattggrtgggttctggcatttggttttgtaacgtttctgggtcactcccgcctgtggccacccttccttaggggagccgtgtgtccttggggctttgctgggtggtctcgagggtgggagaagaatgggttctcctggaccaatggagcccgtgcccctcggggccacattgctcctgcgctccctgactgcggacgcgtgtgtctcgcggctgtctctgtggagatggcctcctcctgcctggmaacagcacccacagaattgcatcagacctaccccacccgttgtttgtgatgctgtagctgagggctcctctgtctgccaggcyggtcactggggactctgtccaggkcctggtggttcctgcttcccagcacctgatggtgtccatgagagcagcccctcrggagctgtccgggagagaagggcgctggtggctgctgagcggagagcaaggcccgtgttctccaggcccttggcacagcagtggarcccccgcccctgccttgtgttgtcctcttaggctctggtcctggggtttggaggagggggaccctgggrgttggtggcctgtcccagcctgagctggcaagattccgaatgccaggccccycaagtgtgcaacagggcacagggtgacctcatgtgggcaggtgggtgctgttctgtacacacctggggccgccgctgggagagttctggaaggtggggtgaggggacccatggsaaactagggccytaggaaggatgtgaaggccctggctggccccccaggccaccctctgtgctgtggggcagcccagccattttgctgtctaccctgsaaactcctcctcggggagacggctgggttttccccagggaagaggggtcaagctgggagaggtgaaggacacagatcacagctgctggcaggtgttyaagggtccargagcgttgctgtctggstgtcaccagtagccttcctggggggctcacgcaggtgcctctccacttgtggctccctggctgctgaagctcagcagggacagctgtgtccagttccaggtggaggacagccggggcttctgaggccacagcctgccttgggttaakgatgctgccgagaggtggtggcttttggaaaagatggcgtactgcaaaacgtgctgctctgcrtggctcgaagctycgtggggagacgtgggcagagccgtggctgactcacagaccccccaccccagagcctgccctgccctccctgccccgacccttctccctcctgacccatgtgttttttttttttttttttttttttgagacagagttcactcttgttgccaaggctggagtgcaatggcacgatctcggctcatggcaacctccgcctcctgggttcaagcgctttttcctgcctcagcctcccgagtagctgggattacaggcgtgcaccaccatgcctggctaattttgtatttttagtagagacagggtttctccatattggtcaggctggtcttgaactcctgacctcagatgatccgcccgcctcggcctcccaaagtgctgggattacaggcatgagccaccacgcccagccctgacccatgttttgaaccaaattccagccacccttttatctgcaagcattttggagggcatcgcaatacygcagacccacctaacacaacagacarttccttcatgccaccgaaggcctggtgtgttcacatttttggtttaatagtttgaattaagagccaaataaggtccacacactgcaattagttgatgtctttttttttttctttttttttttttttttgagacggagtcttgctcttgtctccaggccgcagtgcagtggcatgatctcagctcaccgcaacctccgactccctggttcaagcgattctcctgcctcagcctcccgagtacctggtagctgggtttacaggcatgcaccaccgtgcccagctaatttttgtatttttagtagagacggggttttactgtgttggccaggatggtctcgatctcctgacctcgtgatctgcccacctcggcctcccaaagtgctgggattacaggcgtgagccaccgcacccggccaatgtcttttaaaaatatatactttttttttttttttgagacggagtttcgctcttgttgcccaggctggagtgcagtggcgcgatctcacctcacggcaacctccgcctcccgggttcaagtgattctcctgcctcagcctctccagtagctgggattacaggcatgtgccaccatgcctggctaattttgtatttttaggagagacggggtttctccacgttggtcaggctggtctcaaactcctgacctcaggtgatccgcctgccttggcctcccaaagtgttgggattacaggtgtgagccaacgcgcccagacaaaaatatatgtgtgtctttaaggctggtcaagcaaagcagtaggactggagaaagaatgaagaattctacctggctgtgatcaattcgttgtgaacaccactgtgcttggaccagctagctgatgtcttttgttttgttttgtttgagacggagtctggctctgtcacccaggctggaggacaatggtgtgatctcggctcactgcagcctccatctcccgggttcaagcgattctcctgcctcagcctcctgagtagctgggattagaggcgcgcgccaccacgcccggctaatttttaaaaatatttttagtagagatggggtttcaccatgttggtcaggctggtcttgaactcttggccttaggtgatctgcttgcctcggcctcccaaagtgctgggattacaggtgtgagtgatgtattttatttatttatttatttatttatttttattatttgagatggagtctcactctgttgcccaggctggagtgcagcagtgccatctcagctcactgcaagctccgcctcctgggttcacgccattctcctgcctcagcctcctgagtagcctggactggtgcccgccaccatgcccagctaattttttgtatttttagtagagacggggtttcaccgtgttagccaggatggtctggatctcctgacctcgtgatcctcccgcctcagcctcccaaagtgctgggattacaggcttgagccaccgcctgtcttttaaatgtccgatgatgtctaggagcttcccttcctctctttttccttgtgcaatttgttgaagaaactggctcctgcagcctggatttctcgctgtgtcttgggggtgccacctccatggtgtcwcctccgtggtgctgtgagtgtgtsctttgtgtttcttgtaaattggtcgttggagccgacatcccattgtcccagaggttgtcctggctggcastgrcctaggtgtagatgtcatcagctcagggccccctgctctaaaggccacttctggtgctggttgccactcaccctggctgggggtcacctgggtctgctgctgtctcgcaaatgctggggtccaggactgggcacatcgagggacttggtaggtgcttggttcactgatgtaaaatataggagcacccggggccttgccctttcccacctgcatccctgaatgacaggagagtgtgggagagtgtagggacagcaggcgcagaccccggggcccctgcctgggattgscgtcggggaaracagkcattctgsascgacccctaggcctgatgccttagagcgcaactgccasagacacagcttccttggggggctggccaggccacggaggggcccctggctcccatttctggtccctggatcctgagagcraggactagggattgtcaccaaggcctccatgagccctcagcagaaggagggccaccctcgagggctccgttatcactggagcccgcgttcaaccaacacgcagatgattctccaaggacagagatggatgatggggagggggctggcctggaaggacccccagtgcaggtgacattgaagccaggtttcaaagctcccacagggagytgcccagagagagtccccaaggggcaaggtgactcgggggcaggggtagggcctctgtcaggagagcctaggagaggcctgtgtcttctaggaagagccctggcagccgagcggaggcagtggtgaggacctgcatcctgcatgtscagctggcctcacccggggtccctgagccgggtcttacgtkgctcccgcactcgggcgttcagaacgtgcctgcgtgagaaacggyagtttctttmttagacrcggatgcaaactcgccaaacttgtggacaaaaatgtggacaagaagtcacacgctcactcctgtacgcgattgccggcaggggtgggggaagggatggggaggctttggttgtgtctgcagcagttgggaatgtggggcacccgagckcccactgcagaggcgactgtggagacagagagcacctgcaggtcatccatgcagtatcggcttgcatccagatcatacagggaacactatgattcaacaacagacagggaccccgtttaaacatggacaaggggtcactcacgcctggaatcccagcagtttgggaggccagggtgggtggatcgcttgagcccaggagtttgacaccagcctgggcaacagggtgagaccccggtctctaaaaaataaaagaacattggccgggcgtggtggtatgcatctgtggtcccagctattcaggagactgaggtgggacatcacttgagccgaggaggtcaaggctgcagtgagctgtgatcacaccactgcactccaggctgggtcacagagcaagaccctgtctcaaaaaaaaaaaaaaaaaaaaaaaaaaatcacaggatctgaacagagatttctccaaagaagacgcacagatggccaacagcgtgtgaraagatggtcggcctcattagtcatgagggaaacgtaaatcaaaaccactgtccasccgggcscggtgcctcacgcctgtaaycccagcactttaggagagcagatggcttgaggccaggagtttgaggccagcctgggcaacatagcgagaccaataaatagatattagtggtggcgcctgtagtcccagctagttgggaggctgaggggggaggattccctgagtctatgaggttgagactgcagttagctgtgatggtgccactgcactccagcctgggcgactaggaaacggtctttaaaaaaaaaaaaaaaaaacagggtgggcgcggtggttcacgcctgtaatctcagcactttgggaggccaaggtggggggatcacaaggtcaggagtttgtgaccagcctgaccaacatggtgaaaccccgttctactaaaaatacaaaaattagcgaggtgtggtcgtgggcgcctgtaatcccagctaattaggaggctgaggcaggagaatcacttgaacccgggaggcggaggttgcagtgagccaatatcacaccactgcactctagcctggtcaacagagcgagactctgtctcaaaaaaaaaaaatgctgagcgtggtggcgcatgcctgtagtctcagctactttgggggctgaggcaggagaatcgcttgaacctgggaggcagaggtcgcagtgaggcaagattgcaccattgcactccagcctgggagacagagtgaaactctgtctcaaaaagaaaaggtctaggaagagtccgcaccctctccccgcggtggccacgccgggctccgcgctgagccctctgtgttcttgtctctccatacctcatcacggcaccgcagggttgcagccactcctggtctcattttacacaccaggaaattgaggctctttgagaagccgtggtgatgatttcatcagcatgctctggggcagacccctgcagccgcacagggtgcctggggcccacactagtgccctggtttatagacagacagaggtggcagtggcgcttccgagtcgggctgcgatgtgcttgcactccccgaggggctgaggggccctgcgcccaggtgcagctgcttgggtgctgccagcccctcccacctctccctccctgccagcccctcccacctctccctccctgccagcccctcccacctctccctccctgccagcccctcccacctctccctccctgccagcccctcccacctctccctccctgccagcccctcccacctctccctccctgccagcccctcccacctctccctccctgccagcccctcccacctctccctccctccagcccctcccacctctccctccctgccagcccctcccacctctccctccctgccagcccctcccacctctccctccctgccagcccctcccacctctccctccctgccagcccctcccacctctccctccctgccagcccctcccacctctccctccctgccagcccctcccacctctccctccctggctcatccctgctgtgtcccttctctctagtttcctgttcagtttcaggaaggaggctgggaacccagatgtagggaatttgcgccctggagtcagacctgggttcacgtcccagcgcctccacctctggtgtgaccttggtccagtctctcagcctcagtttcctcacctgtaaagtgggctccatgattagatgcaccctgcagggcagtgtagcagtgacctggctcagccactggcagccccaacaatcataccttgttaaagtagctctgtcggttccctcaggggttccgggggcccattcccctgtcctccatgcactgtgagacctgccctgccacagagcagagtgtaacagcctgagggtgagagccagacactgtgcctgtgcttagaccagacactggacgacgggagccagtgcagcctgggcgggtggactcctatggacccctcagcacccagcctcggtgccttcagcgcagggccgcgtggctgtgggggctcacaagacccggcccactcctgcttgtgcctacatctgggtgtttgcccattggtgccttttgacgcgttctggtgtgtgtgagacgtgcggggctgggaagtgttggcagagccgcgagtaccgtcctcactccttttgttcttttgacgtaagctggcgagtggcactgcctgagttccgctcagtgcccgccctgatgtgcggaccccgctgcattcttgctgttaggtggtggcggtgtgcgctgtcgctggtgggcaccgagagtctttgggagctttggggaggttgtgccaagcctgagcctcgacgtcccccttcccggctttctgttggctcttctgaggccagggcatctctrtgagggcctcctgctggagccgtctctgtggatctcctctgccatcctggcccatgagtgggtgatgcgctggccaccatctsgtgacagtggccgggcaccgctsccaaatgtgggtcccgcatctgcaagcccctccctgggtcccctagggtatggggtggttctgccactgccctcgctcccccaccttggggtgcctctccccctgctcgtgggggagaccctgcctgggatctgctttccagcraggaayatactttggagggagacacacrtgttcttttctggagctctgcagtggccacggcagcccagcccgccaagcaccctggaatgaaaacakcccgctgctgtctgggcctggcctgcactctgctgcctgcgctccagctggctgaggccgggcacgtctgcgggcacagcagcgggggcgccacagtctccctgcagagtgagcgcagctggaaaatgcagctcacgccctttcccagaacacctcgctcttcatggcttggcagctgtccttgcctaggggccagggtgcccaggcactggtggcaggagaagggctacatctggggctgaggcgggctgggtccttttctccctgcagctcccgaggcccagccmtggcccagcctggcattcctgaccttagcagcgccatgatctgaagacaggctggcttctgtgaggccacctcagaaagggctttgtgcccaggcagaggcggaasccagctcttccttctggttgaggcaggaatgaggccagcgctggggcaagcccatgcccagggaacgtcacagctgtgggagtacaggggctccgggttctgagcccgtccactgtgcatcgtggccctggcctcaggatggctcgtaccatcattggctgtgcccacagccgagtgggtgatgggattccggctgccccgctggatctgtgctgctgccctctccagggcactgctgtgcccgcacagccgggcgcagatggccagtttgcttgcccccccccccaccatccctcttcctaccttggcttcctccattgacacactggaccctgctggctgcccggggaggtgtttgggggatggtgttggggraggaggagggccccttgagcctcagtgtgcccatcaggagcgtaaggtcagtgcagcacctgcccacacaggctgtgaagggtgggagtggagagggatgcaagggggtcacaacgcctggctccatgtcagctgcgtgcaggggcaccaggagccggccctcattctccccttgaactggaagggtggccccgaccccagcggcaggtagcatacgtatgaagcgctctccttcctacaccccacaggtgggctcgtctccagacggccctttttgagctggctgtgtttttccatctgtgtaggcaaggacatcgcagactcccctttctcatctccctcgttcagcctccgaggccggagtctccatccctgtgcctgcctgtgggtccckggaggacctgaggctgcccatgtcacccccggcatctcatcctggggacagttcagccgtgggagggatctgtaaggacagaatgccgctgagcctggggctccccagctagtctcacaccccgtgtctgggacccagagaccctcgtgcagggctctgttgcttggggcctggcagcctcgtcctgtatcagaggctgcaacccccacccctcgtggggccagggttgtggccggcctccctggccctccccatggaagtggtaggcggagccagcagccatctgcccagcccggggctgcactgttttttttcaaatgagcaccgtcccaaactgcagcccgttaatttaaacaggatcatttccggccctggaagccgcctcactctccttaaatagaaaggagcacagcgcagagggaaacagatgaggtcatggctcggctggcccagcgaggaaggggccgcagtgggggtggcactgccgcctgtcccctgtcctctccagcgcccacactgcagcccatttcctcaccctgggcctgctctcgggagggacgggcctgggggtcctcttgctgggcggaggggaaccagctcctccaggagaggacggggcctggcagggggcatggggcctccctgggtctggcgtcctgtcctgcccctgccgagggaggagcggttacataagctccgcaggcggcccctccgagccggtccccccagcccagtttccagtgaggcggccagcgcgggcgggggtgccgggcctggcgcacacccgctgctgaccacacgtgtctggaatgtgcagatgtttctttgggggctccgtccggcccccagaccccactcagcatctggtctggggagtgggcgcctggggcactcagctctgagtgtgagactctgaggcaggtctggtttgtctggggccattccctctgctgtggattgggagggccccgggagctgccccacacccagggaagttctcctcagtcccactgttgcattccccgascccggctcccccggcccaggagcgcctgtggggcagaaggcccagccmcaagacttcccggccctgccagcctcaggcttcacccaccctcgcgccaactgtgggcagagcccagggggagggcaggagagccagcgcctggctgggaacacccctgaggggccgaggctccagggcgagggggcccgacctggggttcacacgcccgggtggcgggcagacccgctgcagcatgagacacgtstcagmtacctcgggccggcaggctggccctgctgcccacagccctgggacgtggccccacctgtkacgggtgtggaggggcagcctccaggcctggccacaccctctgctgttgctgctcctgctccaggattggcaagggtgctgggaaggggtgaagacccgtactgtggccacacacctgggacttccttctccacccagtggtgccccagcagccgctaaggagcccgctgggtcccacgctaggatggtcctaactcctccygccttccagatcggacgctcggcgctggggrccccttgtgtcccggggctggggcaccgtcctgccccccatgggggtgtactyctcccracaagcttggcttcagcttccctgggagcacatcctggccctcgggcacccatcaggctgtccctgtgcacctggctcccacccttccagctyatagcaggaactggggtgaggagtgcgtggggcagcaagggcytggraccccagaggaccctgcactctgctctgtgctcttgcctggscttagggccgctcggtggtcctgctgccagatgcctgggccctgctgtktcccccatccttgcagggaaccagaacgtgggggcagggcatcagacagcggcgatgatgtcacctggcgggtgcagaggaagcccgaggggcggggtgggggggctggcgcgaggctgcctggctaggccttggcgttcccccagaacggcgatggcaaaagcagatggagacgtgaaaaagtacgggagcaagcgaggtgaggactccacggggacccctgtgctgttccctgtccctgaagcccacacctgagtcctgcccagggcagatgcttccacacccagggggcacctgagtcctacccagggcagacgcttccacaccctgggggctgggggactgcacctggctcctgtctgggccccagcttcattccactgccctgggccctgggagctcggccgagcggggtccccaagaccttgctgcatttctgggccttgggctggggtgagggccgggagaaggagccagcctggagcctggcacgcagggagtgcatggccagaaccggtgacaggcagggctgcctgctggcrtggaagaagtgtccatggcacccccaggcctggttcacagtgggatgggcggggagccggggggctctggggtcctcggctgacctgcccccacccctgccctggcttgtcagctcccagcagcagccactcttgatggattttccagaaaatgaggtgtggccaaacatcttcaggcttttccttctttcctttctcccgtggcctgggtgggagctgctccccatgcctgggggcaggtgcgagagcctgtgcccctccctggggcagtttcacagctgtgtcccttccagggggcctgcctgtgttcaccgtggcctctgcagcacctctcgccccttagggctcctgcgcctcgggtcccggtgcctcatttctccctaaagcattggttctgctgccgccgcagccgctggaaagtccctcctcaggtctaactgcagttcctcacggcacagtgttccccctcgggcatggtgcttgggcagtgggtgtgagtccagctgcctcaccctgtctcgagaatggcctcttgctggtctcccagccaccaccctgtcccaccccacggcggggatggtgtggatgcctagcagcgcggctgtgggcccacccatccttatgggcagtggggagcacctcagcccgtgtccctaccttggtgtagaggaggggacggcagagaagcagggttcagttaggggggaagtggtggccctgccggaggggccgttccctgtgtgcctggcccccagatcctctcccctcccggagcccagggcacaggcataggctctctgagtgtcccacagcccctgggggaagggaactgcacccccaaccgtgccctccatccgcagatggaacgagaagctccgggagccagtgcccagcgtctcatctgtctgggcacccagcccaggtgagggcctggctccaccgtccgtggctggtgctgcttcctggcacggagaaggcctcggctgctctgtcccctcagctggggtggcctctggtccccttctttgttggttcccttctcaagctcttgccctggccccgggccccaccgggcagcctgtgtgtgcgtctctcctgcsccgggtaggctcctgtgggagcggagctccggtgggaggagcagggctggaggctgrcaggggctgggcgggtgttcagggatggaggccsccccggcttggggctggctgccgggtggtcattgctgggaagagcaagtctaggcggaggcacctgctgggtcactcgtggggagggtgacacctggggaagtagaggcccgtggcaggaggtgagrcctcggggtcctggggagcaggggggtggtgtgcagacctgcggagccatagtccctgtgccaggagcactactgggagtgcgtgggaccaggaggggtgcccagggtgggcggcagagtgacccccgaggtgcttgaggccgaggggaggtggagttctcggtttgccccagctctctgtctactcacctccgcatcaccagctccaggacctggtttgtaactcgggcagctctgaaaagagagacatgctgccgccctgtggtttctgttgctttttcttcactgactactgacatgggatgtttttcctacggctgtgaccaattgtgcttcttctaattgcctggtttttctttttttgtttttggagttttctctttctttcctccctccctctcaccctccatcctttttttttttatttttattttttgagatggagcttcactcttgcaggatggggtgctggagtgcaggggtgcgatctcagctcactgcaacctctgcctcgcgggttcaagtgattctcctgcctaagcctcctgagtagctggaattacaggtgcttgccaccacgcccgactaattctgtagttttggtagagacagggtgtctccgtgttggtcggtctggtcttgaactcctgacctcaggtgatgcgcccgcctcagcctcccaaagtgctgggattacaggcaggagccattgcacccggctctttccccttctccttttcttctctctctcctccctttctttcttttcttttcttttttttttcttttgagatggagtctcgctctgtcaccaggctggattgcagtggcgtgatcttggctcactgcaaccttcgcctcccgggttcacgtgattctcctgcctcagcctcctgagtggctggcactacaggctcccgccgccatgcccggctaatttttgcatttttagtagagacagggtttcaccctgttggccaggatggtctcgatctcttgatctcatgatccacccaccttggcctcccaaagttctggcattacaggagtgagccaccgtgcccggccatctttctttccttgctttctctttgttttctttcgagaccgggtcttgctctgtcgcccaggctggactgcagtggcacaatcatagctcactgcagcctcgacttccctggctcaagcgatccttcctcctcagccccccgagtagctggaactacagttacacactaccatgcctggctgattctttttttccttgtagagatgggrtcttgctatgctgtccatcctggtctcaaactcctggccttcccaaagcactgggtttacaggcataagccaccacacccagtttccttttcttctttttaactggaatagttgackttttctttattagctgtgtgtcaggagggtatttttggcctttagtatgtcgtstaagttgctagtgcttttctgagattgtagtttgttttctaattttatttatattttgcgtagaagttgtgtattttagatggagttaggtcggctggtctttgatgttttatttattaattatgtatgtatttatttatttttgaggtagagtctcgccgtttcaccccagctggagtacagtgatgcgatctcagctccctgtagccttgacctctctgggctcaagtgatttttctctcctctacctcccgagtacttgggaccccaggcgcatgccgccatgcctggctaatgtgtatttttttgtagatacggggtctcactgtgttgcccagggtggtttcaaaatcctgggcycaggcgatccttccgtctcagctcccacggtgctgtgttaccggcgtgtgccccagtgcctggccgtcttggaggtcttgtttctctgggtttatgcctcraggtggcgcctgctccsctgtgctccctggtagcctggtagtgagcctgcttctcayacagtcatacctggttgtggtcccacagtgggaccaccctgttgggttcagaacaggagatgggggcccctcgagtctgtgtgggggctgtrgacagggttgggagaccttggctctgtgggggactgtggacaggggatggggggccttgkccctgcgtgggatgggttgggggtccgtgcccttcctgrccctgggtggacaggtccakgtggcactcggcatagggctgagatgggtgcagagggctgaggcccccaggcctctccyggcttggtttccccagrtgagtgttcatttgggtcttccatcagaaagkcccctcctgacctctgggagtggggagctcaagggtgggaggccwtagcttggggatgctggmaatgtgtgggatgggcccagggawggcctctggcctactargggctctggccctgacccacggccaytcactcctcagagacgtctcccacaacctgctccgggcgctggacgttgggctcctggcgaacctytcggcgctggcagagctgtgagtgtcccccagtcgtgccagcatgcggggctcactccgggtgggctggcggcaccgcctcttgctgctcagctgtgggggcttccgtcagctttgccgaatcccccstctcttccagggatataagcaacaacaagatttctacgttagaagaaggaatatttgctaatttatttaatttaagtgaaatgtaagttgtggttctttgggtggggtcctggctggaccccaggcccccagtatcccttctgccctcccagttggtcygtgtccccttccaggcttgagaccagatcctgggggcagttcactacctgcttggagccccccagtgccggcttggttggggcaggggaggcrgtgctgtcagggtggctccagggcctggttgccagtggggggctggcatagacccttcccaccagacctggtccccaacacctgcccctgccccgcagaaacctgagtgggaacccgtttgagtgtgactgtggcctggcgtggctgccgcratgkgcggaggagcagcaggtgcgggtggtgcagcccgaggcagccacgtgtgctgggcctggctccctggctggccagcctctgcttggcatccccttgctggacagtggctgtggtgagtgccggtgggtggggcagctctgtccttcccagccaggtgggacctgggccctgcagacactgggcagggctcaggaaggcctctctggggggggcctccgggccaagggaacagcatgggagcctgtgagtgcggcgggcggatgtgggggcgtggggtggagccaggaggagcagaacccggggtccagtggctgcctcttctaggtgaggagtatgtcgcctgcctccctgacaacagctcaggcaccgtggcagcagtgtccttttcagctgcccacgaaggcctgcttcagccagaggcctgcagcgccttctgcttctccaccggccagggcctcgcagccctctmsgagyagggctggtgmctgtgtgggkcrgcccagccctcyagtgcctcctttgcctgcctgtccctctgctccggscccccgscacctcctgcccccacctgtaggggccccaccctcctcyagcacgtcttccctgcctccccaggggccmccctggtggggccccacggacctctggcctctggccagctagcagccttccacatcgctgccccgctccctgtcactgccacacgctgggacttcggagacggctccsccgaggtggatgccgctgggccggctgcctcgcatckctatgtgctgcctgggcgctatcacgtgayggccgtgctggccctggggrccggctcagccctgctggggacagacgtgcaggtggaagcggcacctgccgccctggagctcgtgtgcccgtcctcggtgcagagtgacgagagcctygacctcagcatccagaaccgykktggttcaggcctggaggcygcctacagcatcgtggccctgggcgaggagccggccygaggtgagtgtctkctgcccactccccttcctccccagggccatccagatggggcagagcctggtacccccgtcttgggcccacactgaccgttgacaccctcrttcccaccggtctccagcggtgcacccgctctgcccctcggacacggagatcttccctggcaaygggcactgctaccgcctggtggtggagaaggcggcctggctgcaggcgcaggagcagtgtcrggcctgggccggggccrccctggcaatggtggacagtcccgccgtgcagcgcttcctggtctcccgggtcaccaggtgcctgcccccaccccccgaggggccataggttgggagatctctgaagcastggggcagagmctgsggstggggagtctcaggaggarggaggtgggagctgggccggccctggtgagcaggtggcgccggccggtggggccgttcctgtcagctctgcagatgcagaggtggacrtgagctgggggcagcctccggacactcctgggcacgccatacgggaggtggcctgcrcggggatccctgccrgtrcccacaggccycgtgggtgggtgctgctgtgagcctgggstggtgggccctgstctccgggctctragcctcagtttccccatctggaaagggggacagtgatggggctcccagygggctsctgtragggtgggaggatggaggagtgccctgagccccctgscatcccacacccgcccccaggagcctagacrtgtggatcggcttctcgactgtgcagggggtggaggtgggcccagcsccgcagggcgaggccttyagcctggagagctgccagaactggctgcccggggagccacacccagccacagccgagcactgcgtccggctcgggcccaccgggtggtgtaacaccgacctgtgctcagcgcygcacagctacgtctgcgagctgcrgccyggaggtgtgcsrggggccaggcaggggcctgagacgctggctgtggttaggggcctgccgagcgcccgcggtggagcctgggctgaggaggaggggctggtgggggggttytcgggcggctcggtccccagtctgttygtcctggtgtcctgggccctggcccggcgcctcactgtgcactcgccaccccaggcccagtgcaggatgccgagaacctcctcgtgggagcgcccagtggggacctgcagggacccctgacgcctctggcacagcaggacggcctctcagccccgcacgagcccgtggaggtagtcggccccccacgttctawaacctgccctcctgcctgcccctggaggccttgcctgccctgcccactgtgggtctcsccaaaaaacttgggggccttaatgttgcttgtgcccagtgaagatggttgggaaaatccagagtgcagagaggaaagcgtttactcacattaccyccaggccttttctctgagcgtgkgtgagttattcctgaaaggcaggtcaggggtcctgccccccatggacagtttccaycggagtcttcctctcgagcgacaggagccaggcctgtgggggtctgatggctcgctctccttccctcccctcttcctgsgaagttcgggtrgggggagtctgggcttcaggctgggatggggtctgtggagctgaggcggccccctgcccaccaggtcatggtattcccgggcctgcgtctgagccgtgaagccttcctcaccacggccgaatttgggacccaggagctccggcggcccgcccagctgcggctgcaggtgtaccggctcctcagcacagcaggtgggactctgggtggtgggtggtgggtggtgggcgccgcaggactcggggtggcctctctgagctttcacgtctgctggtcctgtggccaccagagtggttcccagtcttaggtggacagagcaggggttccagagacaccagctcattccaggtgtcctgggggtggattgggtggggcctgcctgggggccggcctgggtcagtcgsctggccggagacggacgcagcactgggctgggagtgctgcccaggtggggagacctgtcctcacagcaagrccaggattgctggtgcagrcagttgggcatctctgacggtggcctgtgggcaaatsagggccccaacaccctcccctcctcacagggaccccggagaacggcagcgagcctgagagcaggtccccrgacaacaggacccagctggyccccgcgtgcatgccagggggacgctggtgccctggagccaacatctgcttgccgctggacrcctcytgccacccccaggcctgcgccaatggctgcacgtcagggccagggctacccggggccccctatgcgctatggagagagttcctcttctccgttsccgcggggccccccgcgcagtactcggtgtgtggccctgacctgggtctgttccctgcatctcctcaggccaccttcctgtctgctgcccagggtctgggtctgtgcaccagacacacccagcctgcaggcccctcccacgtccttgccacctmtgacctccgacctctgcagtgccctcggscctctcccagtgggagaagctctcgcctgggcccttggcacgagctgtgcctcctcttcctctctcccagcacagctgctccttcctgtctgccaggtcttggcctgtgtcctctccccgtgtgtcccccggtctgcaactgtcctgcctgtccttgtcacgagcactgtggggaggctccttgaggtgtggctgacgaagcggggagccctgcgtgtccaccctcatccgtcgtgcrggggtccacgggccatgaccgtgaggacgtgatgcagccctgsctccctctccacaggtcaccctccacrgccaggatgtcctcatgctccctggtgacctcgttggcttgcagcacgacgctggccctggcgccctccygcactgctygccggctcccggccaccctggtccccrggccccgtacctctccgccaacgcctcgtsatggctgccccacttgccagcccagctggagggcacttgggsctgccctgcctgtgccctgcggctgcttgcagccacggaacagctcaccgtgctgctgggcytgaggcccaaccctggrctgcggmtgcctgggcgctatgaggtccgggcagaggtgggcaatggcgtgtccaggcacaacctctcctgcagctttgacgtggtctccccagtggctgggctgcgggtcatctaccctgccccccgcgacggccgcctctacgtgcccaccaacggctcagcctyggtgctccaggtggactctggtgccaacgccacggccacggctygctggcctgggggcagtstcagcgcccgctttgagaatgtctgccctgccctggtggccaccttcgtgcccrsctgcccctgggagaccaacgataccctgttctcagtggtagcactgccrtggctcagtgagggggagcacgtgrtggaygtggtggtggaaaacagcgccagccgggccaacctcagcctgcgggtgacggcggaggagcccatctgtggcctccgcgccaygcccagccccgaggcccgtgtactgcagggagtccyagtggtgagtatggccgaggctccaccaccagcccccaggcaggtgcctgcagacagggtgctcacacagggcktgaggcctggcttcccagtgagggcrgcagcccagttactggggacgtcggccccgggcaggtcctgctggctggctcctcgggctacctggtgggctttaaattcctggaaagtcacggctctgacagyggctccgcyaactcattccacygtctcatttcacaaaatgaatttaaaactmygctccctgacctcacacgagcccccgtgagtctctcacgccctctgctgtgttctcgcctggctaaagcgagtggcttttgaggtgragtctgaacccctgatgggaaactgcgggctgcccgcggtgccaccatgctgggtacatgggggacagggctgtctccatcttgcgggtacctgcctcttcaccaggggccttgggaggggccatcagaaatggcgtgacctgtgcagcctgtcctgggttctgtaagccagtgtaggtgcctcccctcactgctccgagctctctgggtgaggagctggggcargagcgccgggagggtctgagaagactcagagagaggtggactctttgtagctggtactaggtttgctttacagatggggaaactgaggcacagagaggttgaggcattagtagtactacatggctggctggagagccggacagtsagtgtcccagcccgggcttggctcycatggcatgcagagccccggscacctcctctcctctgtgccccgcgtgggactctccagccygacgggagktgtgtccaggaggcgacaggctaagggcagagtcctccacagagcccaggctgacaccaktccccccgcagaggtacagccccgtggtggaggccggctcggacatggtcttccggyggaccatcaacgacaagcagtccctgaccttccagaacgtggtcttcaatgtcatttatcagagcgcggcggtcttcaagctctcagtaggtgggcgggrgtggggaggggaggggatggggcggggcagggcgggggcgggctccaccttcacctctgccttctgctctgcttcatgctgcccgaggacgctgccatggctgtgggtgagtggagggagggacgcyaakcagggccaggcctctcacctgccacctgggcycactgaygcctgtccctgcagctgacggcctccaaccacgtgagcaacgtcaccgtgaactacaacrtmaccgtggagcggatgaacaggatgcagggyctgcrggtctcyacagtgccrgccgtgctgtcccccaatgccacgctrgcactgacggcgggcgtgctggtggactcggccgtggaggtggccttcctgtgagtgactcrggggccggtttggggtgggcaccaggctcttgtcccagcyccagcctcagccgagggacccccacatcasggggttgcttttctgagcctcggtttccctrtctgttgggaggtaactgggtgcacaggagccctgaggctgcacgggagccgggagaggcctcagcacagccgggtgggccctgaatggaggcccggggcgtgactgcagagtggagcctcggctgggtcccaagcaccccctgccccgccaccgcccacccctgtcccggttcactcactgcstcccaccgccccggcaggtggamctttggggatggggagcaggccctccaccagttccagcctccrtacaacgagtccttcccrgttccagacccctcggtggcccaggtgctggtggagcacaatgtcaygcacacctacgctgccccaggtgagggatgagggggtgagggggccactkcctttcaggctctgagcacggggtccccccagyyccccagtcaagctgccccscttcctccccaacagccctcactgtgacctcacctgggctgatggcttaggcccctactggggtgagggaggggccaggcgtkggrggagtggacagggaagctgggcccctgaactgcgccccccrccctccscgggcctggctcttgctgctctgctgccccgagtgcagctgcacttggaggcggtgccgtcctcgccaggcagccctcagtgctgctacacctgtgctccgtcccgcacgtggcttgggagcctgggacccttaaggctgggccgcaggtgcagccgttcaccccgggctcctcaggcggggggcttctgccgagygggtggggagcaggtgggggtgccgcggctgccccactcgggcctgtccccacaggtgagtacctcctgaccgtgctggcatctaatgccttcgagaacckgacgcagcaggtgcctgtgagcgtgcgcgcctccctgccctccgtggctgtgggtgtgagtgacggcgtcctggtggccggccggcccgtcaccttctacccgcacccgctgccctcgcctgggggtgttctttacacgtgggacttcggggacrgctcccctgtcctgacccagagccagccggctgccaaccacacctatgcctcgaggggcacctaccacgtgcgcctggaggtcaacaacacggtgagcggtgcggcggcccaggcggatgtgcgcgtctttgaggagctccgcggactcagcgtggacatgagcctggccgtggagcagggcgcccccgtggtggtcagcgccgcggtgcagacgggcgacaacatcacgtggaccttcgacatgggggacggcaccgtgctgtcgggcccggaggcaacagtggagcatgtgtacctgcgggcacagaactgcacagtgaccgtgggtgcggscagccccgccggccacctggcccggagcctgcacgtgctggtcttcgtcctggaggtgctgcgcgttgaacccgccgcctgcatccccacgcagcctgacgcgcggctcacggcctacgtcaccgggaacccggcccactacctcttcgactggaccttcggggatggctcctccaacacgaccgtgygggggtgcccgacggtgacacacaacttcacgcggagcggcacgttccccctggcgctggtgctgtccagccgcgtgaacagggcgcattacttcaccagcatctgcgtggagccagaggtgggcaacgtcaccctgcagccagagaggcagtttgtgcagctcggggacgaggcctggctggtggcatgtgcctggcccccgttcccctaccgctacacctgggactttggcaccgaggaagccgcccccrcccgtgccaggggccctgaggtgacgttcatctaccgagacccaggctcctatcttgtgacagtcaccgcgtccaacaacatctctgctgccaatgactcagccctggtggaggtgcaggagcccgtgctggtcaccagcatcaaggtcaatggctcccttgggctggagctgcagcagccgtacctgttctctgctgtgggccgtgggcgccccgccagctacctgtgggatctgggggacggtgggyggctcgagggtccggaggtcacccacgcttacaacagcacaggtgacttcaccgttagggtggccggctgsaatgaggtgagccgcagckaggcctggctcaatgtgacggtgaagcggcgcgtgcgggggctcgtcgtcaatgcaagcyscacggtggtgcccctgaatgggagcrtgagcttcagcacgtcgctggaggccggcagtgatgtgcgctattcctgggtgctctgtgaccgctgcacgcccatcyctgggggtcctaccatctcttacaccttccgctccgtgggcaccttcaatatcatcgtcacggctgagaacgaggtgggctccgcccaggacagcatcttcgtctatgtcctgcagctcatagaggggctgyaggtggtgggcggtggccgctacttccccaccaaccacacggtacagctgyaggccgtggttagggatggcaccaacgtctcctacagctggactgcctggagggacaggggcccggccctggccggcagcggcaaaggcttctcgctcaccgtgctcgaggccggcacctaccatgtgcagctgcgggccaccaacatgctgggcagcgcctgggccgactgcaccatggacttcgtggagcctgtggggtggctgatggtgrcygcctccccgaacccagctgccgtcaacamaagcgtcaccctcagtgccgagctggctggtggcagtggtgtcgtatacacttggtccttggaggaggggctgagctgggagacctccgagccatttaccacccatagcttccccacacccggcctgcacttggtcaccatgacggcagggaacccgctgggctcagccaacgccaccgtggaagtggatgtgcaggtgcctgtgagtggcctcagcatcagggccagcragcccggaggcagcttcgtggcrgccgggtcctctgtgcccttttgggggcagctggccacgggcaccaatgtgagctgrtgctgggctgtgcccggcggcagcagcaagcgtggccctcatgtcaccatggtcttcccggatgctggcaccttctccatccggctcaatgcctccaacrcagtcagctgrgtctcagccacgtacaacctcacggcggaggagcccatcgtgggcctggtgctgtgggccagcagcaaggtggtggcgcccgggcagctggtccattttcagatcctgctggctgccggctcagctgtcaccttccgcctryaggtcggcggggccaaccccgaggtgctccccgggccccgtttctcccacagcttcccccgcgtcggagaccacgtggtgagcgtgcggggcaaaaaccacgwgagctgggccyaggcgcaggtgcgcatcgtggtgctggaggccgtgagtgggctgcagrtgcccaactgctgcgagcctggcatcgccacgggcactgagaggaacttcacagcccgcgtgcagcgcggctctcgggtcgcctacgcctggtacttctcgctgcagaaggtcyagggcgactcgctggtyatcctgtcgggccgcgacgtcacctacacgcccgtggccgcggggctgttggagatcyaggtgcgcgccttcaacgccctgggcagtgagaaccgcacgctggtgctggaggttcaggacgccgtccagtatgtggccctgcagagyggcccctgcttcaccaaccgctcggcgcagtttgaggccgccaycagccccagcccccggcgtgtggcctrccactgggactttggggatgggtcgccagggcaggacacagatgagcccagggccgagcactcctacctgaggcctggggactaccgcgtgcaggtgaacgcctccaacctggtgagcttcttcgtggcgcaggccacggtgaccgtccaggtgctggcctgccgggagccggaggtggaygtggtcctgcccctgyaggtgctgatgcgrygatsacagcgcaactacttggaggcccacgttgacctgcgcgactgygtcacctaccagactgagkaccgctgggaggtgtaycgcaccgccagctgccagcggccggggygcccrgcgcgtgtggccctgcccggcgtggacgtgagccggcctcrgctggtgctgccgyggctggcgctgcctgtggggcactactgmtttgtgtttgtcgtgtcatttggggacacgccactgrcayrgagcatccaggccaatgtgayggtggccccygagcgcctggtgcccatcaytgagggtggctcmtaccgcgtgtggtsagacacacrggacctggtgctggatgggagcgagtcctacgaccccaacctggaggayggcgaccagacgccgctcagtttccastgggcctgtgtggcttcgacacaggtcagtgcgtggcagggccgtcctccmtgcccctcacccgtccacacccatgagcccagagaacacccagcttgccaccagggctggcccgtcctcagtgcctggtgggccccgtcccagcatggggagggggtctcccgcgctgtctcctgggccgggctctgctttaaaactggatggggytctcrggccacgtcgccccttgttctcggcctgcagagggaggctggcgggtgtgcgctgaactttgggccccgcgggagcagcacggtcaccattccacgggaryggctggcrgctggcgtggagkamaccttcagcctgaccgtgtggaaggccggccgcaaggaggaggccaccaaccagacggtgggtgccgcccgcccctcggccacttgccttggacagcccarcctccctggtcatctactgttttccgtgttttagtgctggtggaggccgcacgctctyccctctctgtttctgatgcaaattctaygtaacacgacagcctgcttcagctttgcttccttccaaacctgccacagttccacgtacagtcttcaagccacatatgctctagtgrcaaaagctacacagtccccyagcaataccaacagtgaggaagagccccttcccaccccagaggyagccactgtccccagcccatgtccctgttgctggatgtggtgggccggttctcaccctyaygctccccwctctggaccggccaggaggcttggtgaccctgagcccgtggtggctgctcctgctgctgtcaggcggggcctgctggtgccccagagtgggygtctgttccccagtccctgcttycctcagctggcctgattgggggtcttcccagaggggtcgtctgaggggagggtgtgggagcaggttccatcccrgctcagcctcctgacccaggccctggctaagggctgcaggagtctgtgagtcaggcctacgtggcarctgcggtcctcacacccmcacatacgtctsttcycacacgcatccccccaggggccctcagtgagcattgcctgcctcctgyyagggtccagctggstccagtacaccagaacrcacactccagtgtcctctgccctgtgtatgcccttccgccgyccargttggaaggtggcaaaccggatgagtatcctgggagggrgtgagctcaccggcagtggccaggcccctgggaaacctggagtttgggagcagcatcctccaygggtcccccagwccttccagcaggccaaatagacctgtgttggaggtaaccccactcccacgccaggtgctgatccgsagtggccgggtgcccattgtgtccttggagtgwgtgtcctgcaaggcayaggccgtgtacgaagtgagccgcagctcctacgtgtacytggagggccgctgcytcaattgcagcagcggctccaagygaggggtgagtgttgarcggggtgtgggcggrytggggatgggtcccatgsccgaggggacggggcctgcaggcaraagtggggctgacagggcagagggttgcgccccctcaccaycccttctrcctrcagcggtgggctgcaygtacgttcagcaacaagacrctggtgctggatgagaccaccacatccacgggcagygcaggcatgygactggtgctgcggcggggcgtgctgcgggacggcgagggatacaccttcacgctsacggtgctgggccgctctggygaggaggagggctgcgcctccatccscctgtcccccaaccgcccgcygctggggggctcttgcygcstcttcccaytrggcgctgtgcacgcyctcaccaccaaggtgcacttcraatgcaygggtgagtrcaggcctgcktrgggggagcagcgggatcccccgactctgtgasgtcacggagccctccygtgatgcygtggggaccrtccctcaggctggcatgacgcggaggatgctggcgccccgctggtgtaygccctgctgctgcrgcgctgyygccwgggccactgcrargagttctgtgtctacaagrgcagcctctccrgctacggagccgtgctgcccccgggtttcaggccacamttcgaggtgggcctggccgtggtggtgcaggaccagctgggagccgctgtggtcgccctcaacaggtgagccaggccgtgggagggcgcccccgagactgccacctgctcaccaccccsctctgctcrtaggtctytggccatcaccctcccagagcccaacggcagcgcaayggggctcacagtctggctgcacsggctcaccgctagtgtgctcccrgggctgctgcggcaggcygatccccagcwcgtcatcgagtactcgttggccctggtcaccgtgctgaacgaggtgagtgcagcctggsaggggacgtcacatctgctgcatgcgtgstkgggaccaagacctgtwcccctgcctggagctttgcagagggctyatcccgggccccagagataaatcccagtgaccctgaagcagcaccccgaccttccgctcccagcagccacacccaccgggccctctccggygtctgctttccacaatgcagcccccgcccaggagggcccatgtgcttaccctgttttgcccatgaagaaacagctcagtgttgtgggtcartgcccgcatcacacagcgtctagcacgtaactgcaccccgggagtcgtgggcatctgctggcctcctgccggyctcctgcgctgctgacagcttgctgtgccscctgcctgccccagtacgagcgggccctggacgtggcggcagagcccaagcacgagcggcagcrcygagcccagatacgcaagaacatcacggagaytctggtgtccctgagggtccacactgtggatgacatccagcagatcgctgctgcgctggcccagtgcatggtaggatggccccacctgctcwcccygccccgcatgcctgccagggcactgggttcasccccccagggcagacgggcagcttggccgaggagctgagcctccagcctgggctccttcmtgccatggcgttcctcggtctctgacctgcttcagtagcctcagccwttctgtcctgtgtgaacgcagggtgcctctcgggggacccagggtgtaaagaggggcccagatgtggggagggactaagaagatgctgctctgtgccctccactctcccctcccctcccctcccccttccctcccctagcccctcccctcctcccctcccctagcccttcccctcctcccctcccctagccctttcccttcttcccccccagcccttcccctcctcccctcccctagcccttcccctcctcccctcccctaccccttcccctcctcccctcccctagaccttcccctcacctcctcccgctgagcccctccactcgtcccccagcccctccctcccctagcccctcccctcccccttcctcccctcctccccctcccctcctccccctccctcttcctccccctcccctcctcccccttcctcccctctcctccccctcccctcctgtcccccctcctcccctcctccctcctcccctcctcccccctcctcctccccctcctccctcctccctcctccccctcctcctcctcccctcctccctcctcccctcctcccctcccctcctccccctcccccctcccttcctccccctcccccctcccctcctccccctctcctcctcccatccctcctcccatccctcctccccgttcccattctctcccctcccccttccatttctccctcctccccctgccctcctctcctcctcacctccccttctccgctcctttcttctcctccctccctttctctcctccctccccttctccccttctcctcttctccccttctcctctcttttcatccttcccttcttccctcctttcctcctcttttccctcttctcccccctcctcccctccttcctcctcccattccccctcctcccccctcccattccccctcctcccctccttcctcctcccattacccctcctctcctcccctcctcccacccccctctcctcccggctcctctcctcccctcctcatccccctcctctccttccctcctaacccccctcctctcctcccctcctcatccccctcctctccttccctcctcctatcccccctcctctcctcccctcctcctattccccctcctctcctcccctccttcctcctcctctcctcccatgccccctcctcccctcctcccatccccctcctcccctcctccctcctcccatcccatccccctcctctcctccccttctctcccctcctctcctcccctcctctcctctcctcctctcctcccctcctcccatcccccctcctcccatcccccctcctctcctccccactcctctcctccccactcctctcctcccctcatccccctcctctctcctcccctccccctcctctccttccctcctcctttcctcccctccccctccttccccctcctccccctccttctccccatcccccttccccttctcctcctctcccctcccccttctctttttccctcctcctcccttcctcctcccctcttctccccttttcccttttctcttcctctcctccccttctcccctcctgtcctccctccctttctctctttctttcctccctttccttctcccctgttctcctcccttcccttctccccttttcttccctcctcctttcctcccctcctccttttctctgtttctcttcctttcccctccactttccccttcctttcccctctcctttctccttcctttcctctccccttctcttccttttcctctctccccttcttttccctcttcccctcccctcctcttcccctcccctcctcttcccctcccctcctcttcccctcccctcctcttcccctctcctcctcttcccctcccctcctctttccctcccctcttctcctcccctcctctcccctcttcccctcccctcctcttccctccccttcccctcccctcctcttccctccccttcccctcccctcctcttccctccccttcccctcctcttccttcctctcttcccctcccctcctcttccctcccctcttcccctccccttctcttctcctccccttctcttcccctccccttttcttccctctccttgtcttccctgccctcctcttccctcccctcctcttccctcccctcttcccctctcctcctcttccctcccctcttcctctttcctcttcccctcccctcctcctccctcccctttcccctcttcccctcccctccgcttccctcccctttctcccccttctctcccctcccctctccccccttctctcccctcccctctcccccttctctcccctcccctctcccccttctctcccctctcctctcccccttctctcccccttctctcccccttctctctccccttctctcccccttctctcccctccccccttctctcccctcccctctcccccttctctcccctcccctctcccctgtcctctcctctccacccttctctcccctcccctctcctctcccccttccctctcctctcccccttctctcccctcccctctcctctccccccttttctccactcccctctcctctctcccctcctcctccgctctcatgtgaagaggtgccttgtgtggtcrgtgggctgcatcacgtggtccccaggtggaggccstsggtcatgcagagccacaraaaatgcttagtgaggagrctgkgggggtccagtcaagtgggctctccagctgcagggctgggggtgggagccaggtgaggacccgtgtagagaggagggcgtgtgcaaggagtggggccaggagcggggctggacactgctggctccacacaggggcccagcagggagctcgtatgccgctcgtgcctgaagcagacgctgcacaagctggaggccatgatgckcatcctgcaggcagagaccaccgcgggcaccgtgacgcccaccgccatcggagacagcatcctcaacatcacaggtgccgcggyccgtgccccaygccacccgcccgccccgtgsggccctttcctctgcctccctcctccccccaaccgygtcgyctttgccccatcccatcttcgtccccctcccctccccccaattcccatcctcatccccctcccccaattcccattctcctccccctcccccttccctattaccatcccttttctccatctctctccccttttctccatttccccccccgtcctccccgtccttttgtccattcccctcatcttcctcatccccctcatcccccttcccctcccttatcccccttcccctccctttccccctgctcctcttcttctcccttctcttttctctacccttttccttcctttttcctccctctccccatcatccccctcatcttcgtcctcatccccatcaccttccccctcccccctccaccactctctctccagcttcccccttccttctgcctgcacctcgctctctgccccctcaggttccccctttctcccagcccccaccctccggctccccctttttgcctgcccccaccctccctctacctccctgtctctgcactgacctcacgcatgtctgcaggagacctcatccacctggccagctcggacgtgcgggcaccrcagccctcagagctgggagccgagtcaccatytcsgatggtggcgtcccaggmctacaacctgacctctgccctcaygcscatcstcaygcgctcccgcrtgctcaacraggagcccctgacrctggcgggygaggagatcgtggcccaggrcaagcgctcggacccgcrgagcctgctgtgctatggcggcgccccagggcctggctgccacttctccatccccgaggctttcagcggggcccyggcyaacctcagtgacgtggtgcagctcayctttctggtggactccaatccctttcyctttggctatatcagcaactacaccgtctccaccaaggtggcctcgatggcrttccagacacaggccrgcgcccagatccccatcgagcggctggcctcagagcgcgccatcaccgtgaaggtgcccaacaactcggactgggctgcccggggccaccgcagctccgccaactccgccaactccgttgtggtcyagccccaggcctccgtcggtgctgtggtcaccctggacagcagcaaccctgyggccgkgctgcatctgcagctcaactatacgctgctggacggtgyrtgcagcggktggggcacacgcggccccctggccttgttcttggggggaagscgtttcycgtagggcttccatgggtgtctctggtgaaatttgctttctgtttcatgggctgytgggggcctggccararaggagctgggggccacggagaagcaggtgccagctctggtgcagaggctcckatggcctttcaggcccgtggcagagggtgggctcaggagggccatcgtgggtgtcccccgggtggttgagcttcccrgcaggcgtgtgacctgcgcgttctgccccaggccrctacctgtctgaggaacctgagccctacctggcagtctacctrcactcggagccccggcccaatgagcrcaactgctcggctagcaggaggatccgcccagastcmctcyagggtgctgaccaccggccctacaccttcttcatttccccggggtgagctctgygggccrgcctggcagggcagggcagggcatcatgggtcagcattgcctgggttacrggcccyatggggacggcaggcagcgaggggactggaccgggtatgggytctragactgcgayatccaacctkgcggarcctggrctcacgtccgctrccccttccctkcccaggagcrgagacccagcggggagttaccatctgaacctctccagccacttccgctrgtcggcgctgsaggtgtccstgggcytgtacacgtccctgtgccrgtacttcagckaggaggayrtggtgtggcggacagaggggctgctgcccctggaggagacctcgcccygccaggccgtctgcctcacccgccacctcaccgccttcggcrccagcctcttcgtgcccccaagccatgtccgctttgtsyttcctgtgagtgaccctgtgctcctgggagcctctgcagagtcgaggagggcctgggtgggctcggctctatcctgagaaggcacagcttgcacgtgacctcctgggcccggcggctgtgtcctcacaggagccracagcggatgtaaactacatcgtcatgctgacatgtgctgtgtgcctggtgacctacatggtcatggccgccatcctgcacaagctggaccagttggatgccagccggggccgcgccatcccyttstgtgggcagcggggccgcttcaagtacgagatcctcgtcaagacaggctggggccggggctcaggtgagggscgcagcggggtggcagggcctcccctgctctcactggctgtgctggttgcaccctctgggartgagtctcgtcgcaggcgtcagaacaaggcagtttttgcagtrctgtgtgaagggctcgtgtgttcatcctgggaatgacctcgtgagcactcactgtccctgaggactaggacagctcctagctggaagtaggtgccagtcagtcagggtgggcagcccacgttctrcacagtagcgtrgccccacaagtkacrtgagcatcrctaccactgtgggagactgtgcatccacccgcgatcctgactgcatagctcgtctctcagacggaggygccagcaccctcmccgtggctgtttcttcagtacctccattttcctttcattggaattgcccttctggcattcccttkttgttttcgtttttctttttttagagacggagtctcactctgttgcccaggctggagtgcaatggcatgatcttggctcacagcaacttccagctcccgggtttaagccattccccttaagcgattctcctgagtagctgggagtacaggtgcacaccaccacacycagttaatttttcaccatgtcagccaggcgaactcctgacctcaggtgatccgcctgcctcggcctgccagagtgctgggatgacaggtgtgagccaccacacctggctgtgttcccattttttatctctgtgctgctttcctcttcattgcccagttctttcttttgattacctacttttaaaaactgtcggccgggcgcggtggctcacacctgtaatccgagcactttgggaggccaggcaggcaaatcacggggtcaggagatcgagaccatcctggctaacggtgaaaccctgtctctaataaaargtacaaaaaaattagcccggcgtagtggcaggcgcctgtagtcccagctccttgggagactgaggcaggagaatggcgtgaacccgggaggcggagcttgsagtgagctgagattgcgccactgcactccagcctgggtgacacagcaagactccatctcaaaaaaaaaagaaaaaaaatactgtcacctgggtctgtcactgggagaggaggtgacacagcttcacgctttgcagtctgtgcatgaactgagggacgggtgtgtggtgcgggtcaccggttgtggcatgactgaggcgtggacaggtgtgcagtgcgggtcactggttgtggtgtggactgaggcgtgtgcagccatgtttgcatgtcacaagttacagttctttccatgtaacttaatcatgtccttgaggtcctgctgttaattggacaaattgcagtaaccgcagctccttgtgtatggcagagccgtgcaaagccgggactgcctgtgtggctccttgagtgcgcacaggccaaagctgagatgacttgcctgggatgccacacgtgttgggcagcagaccgagcctcccacccctccctcttgcctcccaggtaccacggcccacgtgggcatcatgctgtatggggtggacagccggagcggccaccggcacctggayggcgacagagccttccaccgcaacagcctggacwtcttccggatcgccaccccgcacagcctgggtagcgtgtggaagatccgagtgtggcacgacaacaaaggtttgtgcggaccctgccaagctctgcccctctgcccccgsattggggcgccctgcgagcctgacctccctccygcgcctctgcagggctcagccctgcctggttcctgcagcacgtcatcgtcagggacctgyagacggcacrcagcgccttcttcctggtcaatgactggctttcggtggagacggaggccaacgggggcctggtggagaaggaggtgctggccgcgagtaaggcctcgttccatgktcccactccgtggraggttgggcarggtggtcctgccccgtggcctcctgmagtgcggccctccctgccttctaggcgacgcagcccttttgcgcttccggcgcctgctggtggctgagctgcagcgtggcttctttgacaagcacatctggctctccatatgggaccggccgcctcgkagccgtttcactcgcatccagagggccacctgctgcrttctcctcatctgcctcttcctgggcgccaacgccgtgtggtacggggctgttggygactctgcctacaggtgggtgccgtaggggtcgggrcagcctcttcctgcccagcccttcctgcccctcagcctcacctgtgtggcctcctctcctccacacagcacggggcatgtgtccaggctgagcccgctgagcgtcgacacagtcgctgttggcctggtgtccagcgtggttgtctatcccgtctacctggccatcctytttctcttccggatgtcccggagcaaggtgggctggggctggggacccgggagtactgggaatggagcctgggcctcggcaccatgccyagggccgccactttccagtgctgcagccagagggaaaggcgtccaccaaaggctgctcgggaagggtcaacacacttgagcagccttagctagactgaccagggagaaagagagaagactcagaagccagaatgrtgaaagaacgagggcactttgctaagcagacgccacggacgactgcacagcagcacgccagataactcagaagaagcaagcacgcggctgtgcacgctyccgaaatgyactccagaagaaaatctcagtacatctataggaagtgaagaggctgagttagtcccttagaaacgtcccartggccgggccgggtgtggtggctcacgcctgtaatcccaacacttcaggtggccgaggtgggcggatctgagtccaggagtttgagaccagcctgggcaacatagcaagaccmcatctatataaaacattaaaaagggccaggcgcggtggctcacgcctgtaatcccagcactttgggaggccgaggcgggcagatcacttgaggtcaggagttcgagaccagcctggccaacacaatgaaaccccgactctactacaaatacaaaaacttagctgggcatggtggcgggcgcctgtagtcccagctactcgagaggctgaggcaggagaatggcatgaacccaggaggcggagcttgcagtgagccgagattgcgccactgcactccatcctgggcaacggagcaagactccrtctccaaaaaaaaaaaaaaaaaatcccacaaagaaaagcycaggstcagagccttcacgatagaatttttctaagcagttaaggaagawttaacaccaatccttcacagactctttccaagawtacagcaggtgggaacgcttcccattcatacggaaacgggaggccgcaccccttaggaatgcacacgtggggtcctcaagaggttacatgcaaactaaccccagcagcacacagagaaggcgcataagcygcgaccaggaggggttgctcccgagtccgtggcaggaaccagaggccacatgtggctgctcgtrttwaagttaattaaaatggaacgwtggcygggcgyggtggctcacacctgtamtcccagcactttgggaggcsgaggcgggcagatcacttgaggtcaggagttccaagaccagcctggccaacacagtgaaaccccgtctctactaaaaatacaaaaaatyagctgggcatggtggcaggcacctgtaatcccagctactcaggaggctgagccaggacaatcgcctgaacgcgggaggtggaggttgcagtgagctgagattgcgccattgcactccagcctgggtgacagcgagactccatctaaaaaagaaaatatgaaatttaaaactctgttccttagctgcaccagtctgctgtyaagygttcagtggcacacgtcgcgaggggctgccatcacggacggtgcagatgtcccatatatcyagcattctagracattctgtmagatggcaccgggctctgtcctgtctgctgaggaggtggcttctcatccctgtcctgagcaggtctgagctgccgccngctgaccactgccctcgtcctgcaggtggctgggagcccgagccccacacctgccgggcagcaggtgctggacatygacagctgcctggactcrtccrtgctggacagctccttcctcaygttctcaggcctccacgctgaggtgaggrctctactgggggtcctgggctgggctgggggtcctgccgccttggcgcagcttggactcaagacmctgtgcacctctcagcaggcctttgytggacagatgaagagtgacttgtttctggatgattctaagaggtgggttccctagagaaacctcgagccctggtgcaggtcactgtgtctggrgtgccgggggtgtgcgggctgcgtgtccttgctgggtgtctgtggctccatgtggtcacaccacsygggagcaggtttgctcggaagcccagggtgtccgtgcgtgactggacgggggtgggctgtgtgtgtgacacatcccctggtaccttgctgacccgcgccacctgcagtctgstgtgctggccctccggcgagggaacgctcagttggccggacctgctcagtgacccgtccattgtgggtagcaatctgcggcagctggcacggggccaggcgggccatgggctgggcccagaggaggacggcttctccctggcyagcccctactcgcctgccaaatccttctcagcatcaggtgagctggggtgagaggagggggctctgaagctcacccttgcagctgggcccaccctatgcctcctgtacctctagatgaagacctgatcyagyaggtcmttgccgagggggtcagcagcccagcccctacccaagacacccacatggaaacggacctgctcagcagcctgtgagtgtccggctctcgggggaggggggattgccagaggaggggccgggactcaggccaggcagccgtggttcccgcctggggtagggtggggtggggtgccagggcagggctgtggctgcaccacttcacttctctgaacctctgttgtctgtggaaagagcctcatgggatccccagggccccagaaccttccctctagggagggagcaggctcatggggctttgtaggagcagaaaggctcctgtgtgaggctggccggggccacgtttttatcttggtctcagagcagtgagaaattatgggcgggtttttaaataccccatttttggccgggcgcggtggctcacacgtgtaatcccagcactttgggaggccgaggtgggcagatgacctgaggtcagcagttcgagaccagcctggccaacatggcgaaaccccgtctctactaaaaatacaaaaaattagccgggcatgctggcaggcgcctgtagtcccagttactcgggagactgaggtaggagaatcgattgaacctggtaggtgaaggttgtagtgagccgagatcgcgccactgcactccagcctgggcaacaagagcgaaactccgtctcaaaaamaaaaaaattcctcaatttcttggttgttttgtaacttatcaacaaatggtcatatagaggttaccttgtatgtagtcacgcacatagtcacgcacatggcagccggcggcggagcgcacccacggcgtgttcccacgcgtgtgaccccgggctctgccatgccctcctatgctcaggtgtgctgaggtccacacggccctgccgttgcactgcagctgcctgcaggattcagtgcagtggcatgcrgtgcaggtgcggtgccccggagccacaggccacaccacagggcctgcatgcacaggggctgcggtgtctgggtttgggtaactacgccctgtgacatttgcacagcaacagaattacctaatgacgcatttctcagaacacatccctggcactaagtggtgcgtgactgctgcttttgcatccacatctagtttgatttgtgtgttattcctttgagtgcttctcattgttaagcaaccaagaactaaagaggtatgaactgcccctggactcaaacaaaaaggaaaacttcctgatttacaaaaggcagataaccatcacatgagggcatctttatgaataaattgctggttggttttaaaaatacagagtatggggaaatccaggggtagtcactacatgctgaccagccccaggtatctccggcccaaagctctgtgaaatccagattcagtgcttccgcggggatttctgacggcagctcagactccgcakccacacagagcgcgtggccctcaccctcccggcttcctcaacccttggccgtcccttgctcggacagtgcttcgggctgaccaggtcggaggcttgggtttgtcctggacccctctgcgtccttcctcactgcagcctccagcgcgtcccgtggctcctttcccaacgcagagcacggccttccctgcgcctgagcctgcaccctccgtcctggcggcgcctctgccctggcattccctgccactccatgcctccctattggccattctccgtctctgccagcgagagcctgctccctgagtcagaccctgagtcatttgtgttgctataaaggaatagttgaggctgggttattttttatttttatttatttttttgagatggagtctctgttgcccagactggagtgcagtcgcatgatctcggctcactgcaaagtctgcctcccacgttcaagcagttatctgcctcagcctcccaagtagctaagattacaggcgcccgccrccacagccggctaattttttgtgtgtgtgttttagtagagaggaggtttcaccatcttagccaggctggtcttgaactcctgacctcgtgatccacccatctcagcctcccaaaatgctgagattacaggcgtgagccaccacgcctgacmaagttgaggctaggtcattttttaattttttgtaaagacagggtctcactgtctccaactcctgagctcaagtgatcctcctgcctcagcctcctgaagtgctgggattacaggcttgagacactgcgcccagccaagagtgtcttttatcctccgagagacagcaaaacaggaagcattcagtgcagtgtgaccctgggtcaggccgttctttcggtgatgggctgacgagggygcaggtacgggagagcgtcctgagagcccgggactcggcgtctcgcagttggtctcgtcctccccctcaacgtgtcttcgctgcctctgtacctcttctctagcagctctgggaccgggcatatcagcatggtggcccgatgcagtggcacagcctcggtggtcactggctcctggagacacaagcagatctctggcctcagggagccctacacactgttgggatttgaaaggcattcatatgtttccttgtccagaagttaattttaggccataaacctgcatgggacagacacactggcgtctctagattgtagagatgcttgttggatggttgaracccaatcatagtttgcagggttraaggggggctcattgcaccctgagagactgtgcactgctgtaagggcagctggtcaggctgtgggcgatgggtttatcagcagcaagcgggcgggagagggacgcaggcggacgcctgacttcggtgcctgsagtggctcttggttccctggctcccagcaccactcccactctcgtttggggtagggtcttccggcwttwtgtcggggggaccctgtgacccaagaggctcmagaaactgcccgcccaggttaacatgggcttggctgcaactgcctcctggaggccgggatgaattcacagcctaccatgtccctcaggtccagcactcctggggagaagacagagacgctggygctgyagaggctgggggagctggggccacccagcccaggcctgaactgggaacagccccaggcagcgaggctgtccaggacaggtgtgcttgcgtagccccgggatgcccctagcccctccctgtgagctgcctctmacaggtctgtctctgcttccccaggactggtggagggtctgcggaagsrcctgctgccggcctggtgtgcctccctggcccacrggctcagcctgctcctggtggctgtggctgtggctgtctcagggtgggtgggtgcgagcttccccccgggcgtgagtgttgcgtggctcctgtccagcagcgccascttcctggcctcattcctcrgctgggagccactgaaggtgagggggctgccaggggtaggctacaggcctccatcacgggggacccctctgaagccaccccctccccaggtcttgctggaagccctgtacttctcactggtggccaagcggctgcasccggatgaagatgacaccctggtagasagcccggctgtgacgcctgtgagcgcacgtgtgccccgcgtacggccacyccacggctttgcactcttcctggccaaggaagaagcccgcaaggtcaagaggctacatggcatgctgcgggtgagcctgggtgcggcctgtgcccctgccacctccgtctcttgtctcccacctcccacccatgcacgcaggacactcctgtccccctttcctcacctcagaaggcccttaggggttcaatgctctgcagcctttgcccggtctccctcctaccccacgccccccacttgctgccccagtccctgmcagggcccagctccaatgcccactcctgcctggccctgaaggcccctaagcaccactgmagtggcctgtgtgtctgcccccaggtggggttccgggcagggtgtgtgctscmattaccctggccaggtagagtcttggggcgccccctgcmagctcaccttcctgmagccacacctgccgcagccatggctccagccgttgccaaagccctgctgtcactgtgggctggggccaggctgaccacagggcccccccgtccaccagagcctcctggtgtacaygctttttctgctggtgaccctgctggccagctatggggatgcctcatgmcatgggcacgcctaccgtctgyaaagcgccatcaagcaggagctgcacagccgggccttcctggccatcacgcrgtacgggcatccrgtgcactggtctgtcttctgggctttagttttgcctttagtccagccagaccctaggggacatgtggacatgtgtagatacctttgtggctgctagaactggaggtaggtgctgctggcatcagtaggcagaggggagggacacaggtccgtgtcttgcagtgcacaggacgggcccatgacagacaactgtctgccccagaacatccccaggataaggctgagaagcccaggtctagccgtggccagcagggcagtgggarccatgttccctgggtctctggtggccgctcactcgaggcgggcatggggcagtaggggctggagcgtgtgactgatgctgtggcaggtctgaggagctctggccatggatggcccacgtgctgctgccctacgtccacgggaaccagtccagcccagagctggggcccccacggctgcggcaggtgyggctgcaggaaggtgagctggcagggcgtgccccaagacttaaatcgttcctcttgttgagagagcagcctttagcggagctctggcatcagccctgctccctagctgtgtgacctttgccctcttaacaccgccgtttycttctctgtatatgagagatggtaacgttgtctaattgatggctgctgggagggttccctggggtggcgccgaaccagagctcaggcgagctggccagcaggaaacactcctgttgggttttgatgaggccctggccccggcctggggctctgtgtgtttcagcactctacccagaccctcccggccccagggtccacacgtgctcggccgcaggaggcttcagcaccagcgattasgacgttggctgggagagtcctcacaatggctcggggacgtgggcctattcagcgccggatctgctggggtgagcagagcgagggccccgggcgtctacgccaaggacaagggagtagttctccaggagtgccgcggcctcctgaccagcctggctccggggtgccggaagggctggggtgcggcacccacgccacccctctccggcagggcatggtcctgggsctcctgtgccgtgtatgacagcgggggctamgtgyaggagctgggcctgagcctggaggagagccgcgaccggctgcgcttcctgcagctgcacaactggctggacaacaggtgggagctccctcccctgccctctccggggtggccgcagtcaccagccaggagcccaccctcactcctccggcccccgctggcctaggcggcttccacagcccctcagccacgcctgcactgcgcggtccccgcagctcccgccctgccacccgctcctactgacccgcaccctctgcgcaggagccgcgctgtgttccyggagctcacgcgctacagcccggccgtggggctgcacgccgccgtcacgctgcgcctcgagttcccggcggccggccgcgccctggccgccctcagcgtccgcccctttgcgctgcgccgcctcagcgcgggcctctcgctgcctctgctcacctcggtacgcccgtccccggccagaccccgcgcctcccaccggcagcgtcccgccccctcgcggggccccgccccggcagcgtctcacccctcgcagsgccccgccccctcgcagcgtcccgccccctcgyagggccccgccccggcagcgtcccgccccctcgyagggccccgccccggcagcgtcccgccccctcgcagggccccgccccggcagcgtccctcccgccctcctgaccgcgccccccacaggtgtgcctgctgctgttcgccgtgcacttcgccgtggccgaggcccgtacttggcacagggaagggcgctggcgcgtgctgcggctcggagcctgggcgcggtggctgctggtggcgctgacggcggccacggcactggtacgcctcgcccagctgggtgccgctgaccgccagtggacccgtttcgtgcgcggccgcccgcgccgcttcactagcttcgaccaggtggcgcasstgagctccgcagcccgtggcctggcggcctcgctgctcttcctgcttttggtcaaggtgagggctgggccggtgggcgcggggctgggcgcacaccccagggctgcaagmagacagatttctcgtccgcaggctgcccagcasstacgcttcgtgcgccagtggtccgtctttggcaagacattatgcygagctctgccakagctcctgrgggtcaccttggrcctggtggtgctcggggtagcctamgccyagctggccrtcctggtaggtgactgcgcggccggggagggcgtcttagctcagctcagctcagctgtacgccctcactggtgtcgccttccccgcagctcgtgtcttcctgtgtggactccctctggagcgtggycyaggccctgttggtgctgtgycctgggactgggctctctaccctgtgtcctgccgagtcctggcacctgtcacccctgctgtgwgtggggctctgggcrctgcggctgtggggcgccctacggctgggggctgttattctccgctggcgctaccacgccttgcgtggagagctgtaccggccggcctgggagcccyaggactasgagatggtggagttgttcctgcgcaggytgcgcctctggatgggcctcagcaaggtcaaggaggtgggtacggcccagtgggggggagagggacacgccctgggctctgcccagggtgcagccggactgactgagcccctgtgccgcccccagttccgccacaaagtcygctttgaagggatggagccgctgccctctcgctcctccaggggctccaaggtatccccggatgtgcccccacccagcgctggctccgatgcctcgcacccctccacctcctccagccagctggatgggctgagcgtgagcctgggccggctggggacaaggtgtgagccygagccctcccgcctccaagccgtgttcgaggccctgctcacccmgtttgacygactcaaccaggccacagaggacgtctascagctggagcagcagctgcacagcctgcaaggccgcaggagcagccgggcgyccgccggatcttcccgtggcccatccccgggcctgcggccagcactgcccagccgccttgccygggccagtcggggtgtggacctggccactggccccagcaggacaccccttcrggccaagaacaaggtccaccccagcagcacttagtcctccttcctggcgggggtgggccgtggagtcrgagtggacaccgctcagtattactttctgccgctgtcaaggccgagggccaggcagaatggctgcacgtaggttccccagrgagcaggcaggggcatctgtctgtctgtgggcttcagcactttaaagaggctgtgtggccaaccaggacccagggtcccctccccagctcccttgggaaggacacagcagtattggacggtttctagcctctgagatgctaatttatttccccgagtcctcaggtacagcgggctgtgcccggccccaccccctgggcagatgtcccccactgctaaggctgctggcttcagggagggttagcctgcaccgccgccaccctgcccctaagttattacctctccagttcctaccgtactccctgcaccgtctcactgtgtgtctcgtgtcagtaatttatatggtgttaaaatgtgtatatttttgtatgtcactattttcactagggctgaggggcctgcgcccagagctggcctcccccaacacctsstgcgcttggtaggtgtggtggcgttatggcagcccggctgctgcttggatgcgagcwtggccttgggccggtgctgggggcacagctgtctgccaggcactctcatcaccccagaggccttgtcatcctccctkgccccaggccaggtagcaagagagcagcgcccaggcctgctggcatcaggtctgggcaagtagcaggactaggcatgtcagaggaccccagggtggttagaggaaaagactcctcctgggggctggctcccagggtggaggaaggtgactgtgtgtgtgtgtgtgtgygcgcgcgcacgcgcgagtgtgctgtatggcccaggcagcctcaaggccctcggagctggctgtgcctgcttctgtgtaccacttctgtgggcatggccgcttctagagcctcgacacccccccaacccccgcaccaagcagacraagtcaataaaagagctgtctgactgcaatctgtgcctctatgtctgtgcactggggtcaggactttatttatttcactgacaggcaataccgtccaaggccagtgcaggagggagggccccggcctcacacaaactcggtgaagtcctccaccgaggagatgaggcgcttccgctggcccacctcatagccaggtgtgggctcggctggagtctgtgcaggggctttgctatgggacggagggtgcaccagaggtaggctggggttggagtaggcggcttcctcgcagatctgaaggcagaggcggcttgggcagtaagtctgggaggcgtggcaaccgctctgcccacacacccgccccacagcttgggcagccagcacaccccgctgagggagccccatattccctacccgctggcggagccgcttgatgtggcggagccgggcaatccacttggaggggtagatatcggtggggttggagcggctatgatgcacctgtgaggccatctggggacgtaggcagggggtgagctcactatcaggtggcacctgggcctgtcccaccagctcacgcctggacccacccccactcacatttgcgtgcagggccatctggcgggccacgaagggcaggttgcggtcagacacgatcttggccacgctggtgtccacaaggccctccatgtctggggagacttggtggtcacgccaggcccagggctcttggcgccacactgcagggccccacccggccctacctttcctgcactgcagggccccacccggccctacctttcctgcactgcagggacaccaggttgcactcgtagtccagcggggtgacgatcacgtggacaaagttgaactggccctgcccggacaagagaaagggtcatccccgcacacagcgtgtgctgaaggctgatctcggctactgcctggttgcactgctagacacctgtcagctccatgggcagcatctgcccctgaactttcccctctggcagcggggctgtgtttgtctggcctcccccaggccaagccccctccacatctgggcgcagcacccacatatgctgcagccacaggcaagacacctctaattgctggggcacctccactcactggggcccccagggtgtctgcagccacacgtccgaatccgtctgcccagccatgaagtgagccgtgcaccccatctcggcaccaccacaccctcctcagccgcccaggtgcccccccccccccaactggttgtcttggcatctagcagagcccacctccctatgctcctgcccctcctggactctgactaccagccccggggttttggttcagtggctgcctcagcatcctggggcccttggagtgaggcctccagcctatctgccctgcctgggccatgccagctctccccgccatgctggggctcacccggaccgtgctgtgacactggccgacccagcccacctccaggaagagggtgacgctggttgctgcctagtggtgcgtggcgataaccaactgagcagcctgacagctgccactggggagatggtgggggcccaagggccgcgccggacagacaggaagcaccaactacactgtgcccacccagcacacccagtctgcacttgccagttactcctgacagacactcagcagcaggcgccacaggcttcagggcacagaggacacaacgcaggctcggggtgaagctcgtgcccacggggccctgagcactgcggcctctcctcctgctcctcgtgaccgaagctcagggaggaggacctgccaccaacccgggacacagcagtgggcacctgcctggggcccagcctcactgacggcccctcactcaccttgatggtgccaagcttgaagtcctcaccggagtcattgtagacaatggacacaaagtcgttgcccaggtggcgcttcttgtcgcagcggtgcttgtccacgtccttggtgggcatcagggtggcgatgtggaagacggctgagggtgagcagggccggatgggtttgtggggccagtgctgaggccctctgtgccttgcactggggcacctcctgattactccaggggctctgggggcctgcggggaccacgtcctctggtgcctggccagtggtcctcggctctccccaggggcagggctttgggacgcaaagccaccagccccatcactgcctccatgcccacgctgttaggctcggaacctgaggcgtggggagctggagcaggtgggggtgccagggccatgccccagggcgtggggtagcaggactggatgggagccgtgccctgaggcctggggcagcaggagcgggtaggcgccaggccgtaccttgcatgatgtcatcgtgccagcagtaggtgaactggccgtcctcaccacacacgtccaggcctcccaggtacaccttgtccggctggcagtccttcagctcgatgagccggcccaggcccgtcaggaactccgtgtacctgtaggagccatgctcattggacaggatggcgagctcgctgttgctctgtggggagaggggagaggcagggtggcatcactcccgggccgggccctgccccgcagagggtgggggtgcccagcaggctctgccgggagccccactctgatccctgaggcagacaagaccatccattccagcagccacccaggccagacatcgggtgtcatccttgactccctctcttccctcagccccgtgtgtgcctggccggcaaaatcagggagctccacactcaaagcacacccggggccctggcccctcagcagcctgcccccaggggcctaccccactcccacgggaaccatcaccacccacctcctcgagccacacagcaggagggactcactgagactgggcggagtcaggccatgtgccctctgctcagaagcagcccaggccctgccctttcccttgggatgaaggtgcagcctatagggcgctgaggctgcccatcctgtcggctcccgtgctcgcccagcaccagtgctcaagctgggcagggtgcgcccggcccccgctgctggtgtgtgggatgcccccaccccttatgcaggctccccctgcccgctccctcaccactcagctgtcagctcactgaccaacagcgccctccccagccctgcgaccggtgccacccgcccagtccttcccactccttggtgtgccgggtgctcccacgctaacctgtcactcgcaccggggtccccagcactcagagcagcacctggcacagagctcaatgagcacttcatgctgtaggggacccggcagtgttgagctctgtggggcgttgggggcccagactccctacccactgcaggctgaggcccagctggccctgtccaggcacctaggccggccccgcagcctcacctggccttctccaacatacaggacggcgatcttgtgggtgtcgtatgatgggatctggtcgaggagctgcaccgaccgctcaaaggactgtgactgtggcacacagagccctgcctgagccccagacgcccgtccacaggaggccgccccacccaggccggtcacggcaggctgccacagggagcttaggccagagccctctgcaagcctgagctcccagcagcagagctgggccccccaccattcacccgagccacacagctccagcggatgcaggagagggaggccacgcctacctcattgggcagcaggattggcttgtttgactcgtcgccaaagaagggggaatggtagagctgcaggaacacgaaactgcacagggaggggatggtgggcacccaggtgagggcctggccagggcagccacagcccacagggaggaacacagagcctggccatctcccactccaccgccctcccaggggttccagccagccctagggcacaggcgaggaccccaccccagcccgctcggcctggggcaagtgaggcaccaggttcccgcaggagaggtgtcaggagccccgcccggaagcaagaggcccacctggggttgatgcctggcactttctctgcattggaggctgtggctctgctctttaaggcgtccctctctactctcttgcccctgcgtgatggggccgagtcggagatggtgtaacctcggggccggaggccactgggcgagcggggggagctggaaggcaagggaccctcgggctggccccgactgtcttcgcccgaggccgaccaggcagcactttccccgtccagggtccctgactgtgaccgggccttaacctcagggctcagccggcccacgtcggccttgtccccagggtccccgaggatgtcctgcagagtctgcagctcgggagaggagctggacttgctcaggggctgcgagggctggaaggagaggtccacagagggccggccaccctccgaggagacgactcgctcgatggggatgcccctgccaaccagctcctccgcgtggagcgacttctcctcctggctggagactgaggacgactagaaaggaccatcccaaagagaacccctgtcagcaggcaccctcgagcccacctggggttgacctggaggtggtgaggccctatctgtcctccatcccagggccacagaccagcccgagcaccaggctacggcccccgcccgttgacgcagcagcactgccaccagctgtgccccacactgcgtgagcagaggtatcagcatcccctgagaccacaggctgcccagcagccagggccggcccaggtggatggctgcaaagtgcagaccgtctgtgcacgagggatgtggaagaacatctcccccaagttcagagccagttcccagggtgcaggcacacccacgcagagccctgcctcccctaaggagccccccgaggtcagcagggtccaggctctgagccacactcaccctgctgtaggcatccgtgcgcctgtccatgcctagcgctgcctcaacgtcctccaaccctgggggctccaccagcacaggaacctcgcccggacttccctcctccatgaccacggcggagtctgggaggacacagacggggctgctggatgtggggctgggccaggccctggccctgacgtggcctccgagaaccagccttctcctgaccagagggacagcagccctgcgagcctccccagggctctgcttactgctgccatccaccgagcgggcagggaggacgctgggaaggcctgcacgtgaccccgacacaggcctctcctgcatgagtgcccgggggttgggcaggcaatcggctctgcccaccctagtgtccaccagcagccacccctgtgcctccaggtaggcaggggcaagacgctctccgcccgacgggcctcagctctaaaagagcgggagcctgaaaccagccctcgtaaccgaggagagctgcggagactccgtgacgtgggggaagtccctgtttgcaaacagactgctcccaagagcagaggctcaccctccaactccaagccagacccacagctggggacgctaaggagagagggtgggaggtcccaaagcagcatttcctgtgccagcgtcaggacagggggagaggaagtagaagcagcaacagaggggaccatcacagcccccgggcgccccacagccctgcacacgcgcagtcagccaccccagggcccgtcccacgcagcccttccaaaccagctcgtctgcacgtggagacctggcaggggagcaccatgcaggtcacagcactccccaccagggcttgggggcaacaggcagaggtcggtctgcagggcccctggtcaacctgggacttgaggcagccccatctgtgggttccagaggccaggggagccaccaaaggccagggcaaggcccgctcggtgcaggcccaggggtgggcttccccctaaacagctgccacccatcagagtctgcagctcagctgatgtcaccatggagactcaggccacccccacccctcaggcctgaagctgggccgggagtgctcgcacagcgtgggaacagggctca

SEQ ID NO: 96977 - DNA, 14811 bp, Homo sapiens
ccgaggccggtggatcacgaggtcaggagttcgagaccagcctggccagcatggtgaaacccagtctctgctaaaaatacaaaaattagcctggtgtggtggcgggtgcctgtaatcccagctactcgggaggctgaggtaggagaatcgcttgaacccggaggcggaggttgcagtgagccaagatcgcaacgtcactgcactccagcctgggcgatagagcaagactgtctcagagaaaaaaaaaaaagtaactgggccagtctgggcatcatggcgagaccctgtctccacatacacacacacacacacagaaaatttagtaggggtggtggtgtgcctgtagtcccagctactctggaggctgaggtgagagggctgcttgagcctgggaagctgagtttctagtgagctgtgattgggcctctgcactccagcctgggcaacagagaccctatctcaaaaaatagaaaagaaaaaaatgaaaaaacgaaagtaactgagaaggagaactgagaagtatgatcagggaaaatctctgagaggagagatatttgagggaaagaaagtaggccatcatggtggctcacacctgtgatcccaacactttggaggcaggaggatcacttgagcccagaagtttgagaccagtctggataacacagtgaaaccccatctctaaaataaacacaaaaattagccggcagtcgtggtgcgtgcctgtagtcccagctactcaggaggctgaggtgggaggattgcttgagcccagggaggttgaggctgcagtgagccgtaatcacgtgactgcactccagcctgggtgccagagcaagacccagtctcaaaaaagaagaaaaaggtattctgtctatggagtagccattcttgtattccccttatttatttatttttatttatttattttttgagacagtctgggtctgttgcccaggctggaatgcagtggcgtgatctcggctcactgcaagctccgcctcccgggttcacaccattctcctgcctcagcctcccgagtagctgggactacaggcgcctgccaccacgtctggctaattttttgtattttttagtagagacggggtttcactgtgttatccaggatggtctcaatctcctgacctcgtgatcggcccacctcggcctcccaaagtgctgggattacaggcgtgagcccccgcgcccggcctcgttttttgagacggaatcttgctctgtcgcccaggctggagtgcagtggcacggtttccgctcactggaagctccgcctcccgggttcaggccattctcctacctcagcctcgcgagtagctggggctacaggcgcccgccaccatgcctgactaattttttgtattttttagtaaagacgggatttcactgtgttagccaggatggtcttgatctcctgaccttgtgatccgcctgcctcggcctcccaaagtgctgggattataggcgtgagccaccgcgcctggcctatttattgatttatttttatgagacggagtctcactcttgtcgcccaggctggagtgaagtggtgtgatcttggctcactgcaacctccacctcccgggttcacaccattctcctgcctcagcctcccgagtagctgggactacaggcgcctgccaccacgcccagctaatttttgtatttttagtagagacggggtgtcgccatgttggtcaggttggtctcgaactcctgacctcaggtgatccacccacctcagcctcccaaagtgctgggattacaggcgtgagccacccacgcccggcctccttcctttgaaaaagaaaagatgaaagagagcaggcaaatgcctggagagggcagcagggatgcaccggtgacagttgtgagggccgcaggcacagaggcaggcaggccgggggtctgcttttatttacctatttacaaggtatgttggccctgggctcccccaccacctcagccccaacgttgccttctggggcagcctcggcctcctcctgtggggcaccctccagcagagcggtgtcttcctccaggaagttgctgagctccgccagctctctacgaacgacactggtggcttggtccagccagcgcacacgccgcaggagggacagcagcaggggccgacggcgctcctggcgcacgctccaggcgttgtgcagctcccggtagcagttgtggcgagcacgctcggccgggtccagggtggccccgcagcccagggggcagcgctgctgggacccttgctggcaatgctgccggtgctctgccagggtcccacgcggcacctgcgaggtgcagccctcgttggggcaggccgttagctcaaaggggcatgagtcctggtgccccttgcgatgggccagggggcatgtcactatgcagccagcgtcggcgttcttgcactgagggtgaaggagaacgtgtgaagaaaccgggcaggacacccacggaatcccccacccctggctttccattcgccaggaaccagggaaccgggagcctcccacgcttttctgactctggtgagttggtggagagaacactggggcaaatgcctagacgtgggaagaagctagaagttccaggggagagggtgaggcctgagtcttggggaactggaaggtacacagttgggttggtctggtgagtggtatggatgccaggctttcctttttaacctcggtttacccatctgtaaaactaggggactagagagtagtggcaggcacactgggcacttgatcctctaaaaatcctctgtaatctccattttaaaagtcctctaaaatctccattttctaacccaggggcttggaaaagttaggtgacttgcctaaagtcacacagcaactaagcagtagagccacgatccaaactcagctatgtctggtcgtcccaaggctgcacttgtttctctctgaagatgggattctcctgccttctctcctagccctgccccacccctacaagggtgagaagggttgagggtcaggggagtgggtactttgagctaccttgacttccaggcggccaatggttttccggagtttattcatgtggacaacctttttccttttcacctctttcctacagcacggacaggtcttttgtctggaaggaggcatgagtaggggtgagtgttgggagtgggaagggagccctggtcaagccctcactcggtgacccaggtggtcccttcattagctggatgaggcattagggcatattacagggcgctctcagctctgagggtggggccggggtctgcagacactactgagtgagggtacacacattttagtttagggagatttggtggctgagtcttttggctgactttcccctctgttctgggccacagcaatggcccccagtctcactcctgccctcccagccccttgggtacccgctggcacctggctagccaccggaggatgcactttttgcagaagatgtggctgcatggcaaccttgctggcctcttgagaaccccatggcagacggagcacacgaagttgctgtcaggagggctggcgaagaggttgagatcatacccgccaccctgcaaaggccaggtgtcagcacctggctgggacagtgatccagtccctggtccacataccgagcaagagagcccagcaagcttttggcagggaggtgggccacagaacttcaagtaaaggggttggctcagcgcccactttgagggggcagctgtgggggttagggccccccaccccaggactactaatctctggctggagacgggggccttagcctggaattagacctagccagagccttccagaaggtttccttgtaccatatgggggtctgcaacccattgcccaccctttccgagtggagtggggtcgatccctggacaactgggcaggtttctggagttgggcacacatctcagggctggaagcaagagggccccaggctcaccatgatctgcgtctagacagcagctccacaggcccccagagctcaggagcctgcatttcacagtgggtgtgggctgacatcacaatagcattgtccagctcaagccagtcacaaccctggttcaggacccagagaccccgtacagcccagcccttgcccccttctctgaaggatcacaggtagccaggcgcggtggctcacacctgtaatcccagcagtttgggaggccaaggcaggaggatcacttgagcccaggagaccagcctgggcaactcagtgagaccccacctcttaaaaaaaaaaaaagccatacggctagctgcagtggctcatgcctgtaagcctaacactttgggaggccgaggcaggcagatcacttaaggtcaggagttcgaaccagcctggccaacatggtgaaaccccatcgctactaaaaatacaagaaaattagccaagtgtggtggcagttgcttgtagtcccagctacttgggaggctgaggcagaattgcttgaacccgggaggcggaagttgtagtaagctgagatggtgtcactgcactccagcctgggtgacagcgagactccgtctcaaaaaaataaataaaataaaataaaaataaaagagagcagctcttgacctgagataggtctatgaagcgcctggggcttgagagtggctgacagcgtttccccagaagcactgggtcagaaccaagcttcatggagctgtctcccccaggccagggcttcagtgggatcacagggattgccaccctcttctctccaatactgcggcccaggtggctggagatcctaaggcttaggggttttaggcattgactcactgggggtcttcacttaggatctgatactcaggtgctagctccacggcagtgacaactaaactcccgggtaacctgccgccccagagcagggggcccagcctcccaaaccaggtgtctgatccactccagcctagcaccacgggggcgctgagttcatctaggcctagttggtcaaatcctttagaatctcacctggtctcacaaggaagccactggaagcctctgagcttcccatccttgctagtgctctgctggctccacctggagccctttggaccaaggcattttacctgccagtgtagttcacttgagatgcgcatggccacaagactgttcgtagtctggctcctccacttaagaggcgtcggaccttacacatcacctgccaacctcccatatcctacccttgtgtccaaagccaggaaagaagaggaggcatctcgctagggttctccccgccacagcgtgaacatatgcacttgccaggctgataggcgagtcggggccccaagaacacccgcatgcagtgagttagacaaaacagctttatttgaaagacgtgggacagccaagttcccccaaccccgcggtcctggcgacgtcggtgtcaggcgtgggaggaccagtgtcctgcggagaaagaacaaggttaggggtctgcagtcggggtcaggagtcaggggccagacctcgcgagcgaccgcacccgggggggaggcggcagcgcctgtcggggcctgggtttcaccgccgcacatggggcagcgcgcggtgagctgaggcccccgggggctctgggcgccgaatctcacccgcggccacggccaaagccgggggcgattttcaaccaacgccggtctcgaagaccaccagcgagacgccagtggtcaacgcggcaggacctacctaagtgaagaggagagcgcaatggaggcgcggacgtttatagccactcttcgggtggattcccgagccgcggctggggacggaggcgccggcgtttatagtcgcttttcgggtgacgtagattcccgggccgcggctggggccggacgggaaagagcactcagagcccggtgaggacggggcaccgcggagccaatcacaggttgtcttataggagctcggcccgctcccgcttggggcggggctgcggagatctcgcggcgcttggcgtgctataaaagctgcttcccagtaggyctcgttcttcttttccgacaaaacacgtgagtcctgttggtcgctgcagcgggcctctgcgtgggcggcgggaatccgcggacatcgggtcgggtctaggctcccgagtccgcgctcctgggcgggagcccttgtctgggtctcgcggggggctgccagatgcgtaggccacactgactagttccttcttgtcgcttttcccagcaaatggcggatgacgccggtgcagcgggggggcccggrggccctggtggccctgggatggggaaccgcggtggcttccgcggaggtttcggcagtggcatycggggccggggtcgcggccgtggacggggccggggccgaggccgcggagctcgcggaggcaaggccgaggataaggaggtaggtatcagccacgctcggggtcsggcccctgggcggcgccggagagcggtcctggtcactggcgccttttctccctttagtggatgcccgtcaccaagttgggccgcttggtcaaggacatgaagatcaagtccctggaggagatctatctcttctcyctgccyattaaggtacgcgtcggtcgttggggcgttgagcaagtgcgaccccggagtcatttgggctggggttggaggattagcatctgccattgactcgcattaaagggcccagcgtctcgcgtgagaggttgaggttgtgttgcgggctggctgaggagaggattccacttagaggttggatggatacctgagcgaagccagagccacaaaaggcatttcagcgcatcttcccacattcgcagcgaattcatttcsaaagaactgaaagagaagcagcgcttggttcatgccatccgagaggatgatgaagttcaggttgtgggaggacactgtaagggttagcaaactgtcatagtccgcgtgtacgggacagctgtcatctgcatccagcgggtgcagtggggaaaggctaatggcatatttgtcatgtgagcgttcgccctagcaaggtacggtggtcatggctaggccaaagctggacaaagcaaaaggaaatctgagtggaaagccacatctcaccaaacaagagaaaaagggcaaataggaagaaacgattgagatgcagaaatagggtaaccttacatacaagcttccaaaaacgaaacgaaggggacagatcggggggaagccaggtgagggggttcatgacttcttcggttttttttgggcggggtgggcggttacacagtttcgccctatcgcctaggctggcgtgatctcggctcactgcaacctccacctcccaggttcaagcgattctcctgcctcagcctcctgaatagctggggttacaggcgcactccaccatgcccggctaattttttgtgtctttaatagaggtgsggtttcaccaygtggccaggctggtatcggactcctgaccttgtgatccgcccacctcagtctcccaaagtgctgggattacaggcttgagccaccgcccccggccgtgactttggttcttgaatakcrtaatggtattaagtttttttttaatgctctccctacaattttcttgtttgtttcaggaatcagagatcattgatttcttcctgggggcctctctcaaggatgaggttttgaagattatgccagtgcagaagcagacccgtgccggccagcgcaccaggttcaaggtacccggctgtcctggagggggctgcgctgggcttgccgggactctctcggctctgcatagttgcacttggcttcacccgtgtgactttcgtaacggggagagagagaaaagatctcctcaggacctcggatgggccttactgtggcctctctttccttgaggggtgcaacaggccctgggcggtgggcagtgattgggtgtagggccaccagctgcctcacacacatcttttcgcaggcatttgttgctatcggggactacaatggccacgtcggtctgggtgttaagtgctccaaggaggtggccaccgccatccgtggggccatcatcctggccaagctctccatcgtccccgtgcgcagaggctactgggggaacaagatcggcaagccccacactgtcccttgcaaggtaggctggtggcaggtgatgggcctgccgtggggcaggctccctcgggcccccgtctcctgactccttccctcaccaggtgacaggccgctgcggctctgtgctggtacgcctcatccctgcacccaggggcactggcatcgtctccgcacctgtgcctaagaagctgctcatgatggctggtatcgatgactgctacacctcagcccggggctgcactgccaccctgggcaacttcggtaggtggtccacacatggggcatagccatggtctctcagctccgcttaaccacacgggtccagtgtgtgcttggcgtgttttcagggaggcagagaaaggctctcctaatgcacgacagacccgcccagaatggcctctctgttcctaggagtgcgacaatttttgggttgggggacttgcctcaagcacaccactgaccctcctggggttcttttgttttgcagccaaggccacctttgatgccatttctaagacctacagctacctgacccccgacctctggaaggagactgtattcaccaagtctccctatcaggagttcactgaccacctcgtcaagacccacaccagagtctccgtgcagcggactcaggctccagctgtggctacaacatagggtttttatacaagaaaaataaagtgaattaagcgtgttactgtttttttcccgtgtcctgcatggttagtggtggtttgaatctggggcgtggggccaatagatcacaccagacacacaggcaggttgcagggctttatatttcagcaacagtcatacagagccacacagcaggggcacccacagctgcctcaggaggtggcagcggcggcctcttttgcagcttttctctcttgcagcatcctctgcctctgtttggccaggcacttcctggcagaactgtaggcccccaggtcctgatctggggaagcaatggaaacaagctgggaaccgaggcctctgctacatgcaaagggggcaaagtcaagtgagcacaagggaggggagggaagatttgcaatggttctggcccccaggcctcaggaggatggtggggggttgggggtgggtggggcacgcacagcggtcctggtaggccttggccacctgggtgaactgctccacttccttgatacagttctgctggtagttctgtccttccctctgctgacaggctttgagccgatcctgcataatgttgataatttcttggtcgactttgctggtggagaaaaggagcaagagaggctaatcacaaggaatccttttcctgtaccctgtgagaacaattgaaagcaagagccctggggtctggctcctcccatgtcacccctaaaatctgggcatgccaccctgtggcatcccagggactagtgtcccagcagcacacggtgcagatctccacactcccagcatggctcacgtactagtccctcttccactgcatttcggcttcatacatgcacatgatgtcctcctccttgcactcagtgatgtctggcacgcggcggtactgccggtggtagtagtaatacctgttctttgcgtgctgccgctctataaattctgcaaagacaaagccacagactcaaacgcctcatcggtttggacaggcttttagctttcttatttctcataagccctttggaggggagagaggagaacttcctgagtgttccagcgtttagaaaacagcaattcgtctctctaagggatgtggccagccaggcaggcctgtgaaggcctaggctacagctgatggagagctcccgagtaccaggcatcatcctcagagttccacatgcattaccttactctgtcccccacacaagcctacaggcagctgcttctcacagatggcaaggactgggacgcagctctgccagtgcacctcccccagctgcacagggaccctgctgggtgcgcaaagaggctccaacagggagcctccagcaagcagaacttaccaccttacggcctcagcttcctcactgggaaatgaacgagctaaaaggagagctcgaacatccagacacataggacagacatgctctacaactgctacaaaagagagggagctgggtccgctgttgcacggtttccagatctttgggggtttgatttggagacttcaccctcttacggaagaaccaccagagcatgctatgcaccccaagtgttcaaaaagaactgaaccaggctggacacggtggctcaggcctgtaatcccagcacctgggggccaaggtgggaggatcacctgaggtcaggagttcgagaccagcctggccaacatggtgaaaccccgtgtctactaaaaatataaaaattagctgggcgtggtggtggtgcgcctgtaatcctagtactggggaggctgaggcaggagaatcgcttgaacccggggtggggcagaggttgcagtgagccgagatcgcgccactgcactccagcctgggcaacagagtgagactgtctcaggaaaaaaaaaaaacaacaaaaactgaactgggcattttcccggttcgttccagagatggtgaatttgggcatctcggccatcaccccgacacttggtcatctggcagagagacatttgagagaggcctgaggccagcggtgcagtggaggggtgcccggggcggcggggggcggagagcagtgcggggtcctggggcagtgggcgctgggtgcggcagggagggaagagtcctgggaagaagcggggcatcccggggtgcaggggagagtaagggatcctgggaggtgaggtccggggtgcagtgggaggccaaaggaggcgacggagctcggaggtctccgggggtggggagttgtccccggggtgcagcggggggcggtctcaggcagacgggaccccggaggcattggaggatccaggcagggtgtgggatccaggggtccccagaggccggcgagggagccccgggctggggcttcgtacctctcacgagggtcacgggtcggtccacgatgaggtcgaacgctttcatcatgtagacgatgggattgggctgcaccggcgtgcggcgcgggggctcagggtacacatccttgtcccagctgtccggcatggcggcggcgggcgcggactccgctcccggacgcgctgccctggcctctacctccgtccgggtcccgcggcctaggtcgcccgctacagaggacgccgagggcggctgcgtctgcgcgctggcgccgcgatgcaccatgggacttgtagttccccggctccgccgggcgcggccgggacccgcctcgccgcagggcgcccccgcgtggggcctccgttctcggtctgtgccgagcgcctacgcggtgctggtcgctggtctgggcgcctgggaagcagccgcgaaccggacagattcctgcttacgatgaaagaaacagacaaaaggcaactgacataaggaataggagggggtcattcggttcccactgcgcgccaggcactgtgctgagtgcagcagggaataagataaactgtgatggagaacacaggccgttagagcgcacacgacaaagtgaacaaatagcacgcgattccaaacaccctactcctccaggaagctttcctggattgcctagtccctacagacttctctgggccccgctctctacaagggcccctcatggactggctggtgccagttaacttgggagcctgtctgggggagggcagggagcagaccaggaggcagggcttgcccttaggcggctcatagggagaaggcacctaccctgggcacagggccctctggccggctttgatggttccatcctggccctggggcactctggtgcttctaggcagctccactgagcagggtcctgctggccacatcttcagtctccacacctggcacggcccctggctgctatccaggggggacactggtcatgtcctgtcctgaggttgaggccagcgacacagaaccatcaaccctacagacaaacagtgagaggtgacagcgtgctggcagtcctcagagccctcgctcgctctcggcgcctcctctgcctgggctcccactttggcggcacttgaggagcccctttctgggctggccaaggccagagcgggctccctcagcttgcggggaggtgtggagggagaggcgcaggcgggaaccggggctgcgcgcggtgcttgcgggccagcgcgaattccaggtgggtgtgggctcggcgggccccgcactcggagagcctggccggccctgccggccctgggcaatgaggggcttagcacccgggccagcggctgcggagggtgtgctgggtcccccagcaggccggcccaccggcgctgcgctcgatttctctcgccaggccttagctgcctccccgcggggcagggctcgggacctacagcccgccatgcctgagcctcccccactccgtgggctcctgtgcggcccgaacctccccgacgagcgccgccccctgctccagggcgcccaatcccatcaaccacccaagggctgaggagtgcgggcgtacggcgcgggactggcaggcagctccacctgcagcccccgtgcgggatccaccgggtgaagccagctgggctcctgagtctggtggagacgtggagaacctttatgtctagctcagggattgtaaatacaccaatcggcactctgtatctagcacaaggtttgtaaacacaccaatcagcactctgtgtctagctcagggtttgtgaatgcaccaatcgacactttgtatctagctactctggtggggacttggagaacctttgtgtggacactctgtatctagctaatctggtgaggatgtggagaagctttgtgtctagctcagggattgtaaacgcaccaatcagcgccctgtcaaaacagaccactggactctaccaatcagcaggatgtgggtggggccagataagagaataaaagcaggctgcgggagccagcagtggtaactcgctcgggtccccttccacagtgtggaagctttgttctttctctctttccagtaagtcttgctgctgctcactctttggggtcacagtgcctttatgagctgtaacactcaaccgcgaagatttgcagcttcactcctgaagccagtgagattacgagcccactggcaggatgaacaactccagacgcgcggcgccttaagagctgtaacaccgcgaaggtctgtagcttcattcctgagctagcgagagcgcgaacctaccagaaggaagaaactccgaacacatcggaacatcagaacgagcaaactccggacaccccgcctttaggaactgcaacactcaccgcgagggtccgtggcttcattcttgaagtcagtgagaccaagaactcaccaattccggacacaacaggatctacggtcacagaaacgttcggtcttcacattatgaacttttttttctttttttgtttttgtttttttttttttttttttgagacagttctctcgctctgttgcccaggctggagtgcagcgcgtaatctcggctcactgcaacctcctcctcctcccagtttcaagtgattctcctgtctcagcctcctgaggagctgagactacaggtgtctgccactacgcccggctaattttttgtatttttagtagagacagggtttcaccatgtttctggtctcaaactcctgaccttacgtgatctgcccacctcggcctcccaaagttctgagattacagacatgagccactgtgcctggccaaagtcttggaaagaaatatgaaccatgagacccaaacaatcttgacattttagtagcctagaatcttagtatctattgatgtaagaaccacgtatcttagagatgtcataggcctgaaaaactctagaattccactgctatagaactttacaactggctgggcggggtggctcacacctgtaatcccagcactttgggaggccgaggcgggtggatcacctgaggtcaggagtttaagaccagcctggccaacatggcaaaaccccatctctactaaaaatacaaaaatcagctgggcatggtggcacacacctgtaatcccagttactagtggggctgaggcaggaggatagcttgaacccaggaagcagaggttacagtgagccgagattgtgccactgaactccagcctgggcaacagaatgagactccatctcaaaacaaaaacaaaaaaaacaaaactttacaaccatagaatctttgaattgaaaaagattttgaggggcgcagtggctcacatctgtaatcctagcactctaggaggccaaggcaggcagattgcttgagctcaggagttcgagaccagcctgggcaacataatgagatccccatctctataaacaatacaaaaattagtgaggcatggtggtaagtgcctgtggtctcagctactcagggggatgaaggcaggaggattgcttgaacccaggagactgaggctgcagtgagctattactgtgccactacattttagcctgggcaccagagagaaaccctgtctcaaaaaaaaaaaaaaaaaagaaaaaaaaataagatttcaaccccctcttcattcaaaacttaaattcaaaatttaaatttggccaggtactgtggcttatacctgtaatctcagcactttgagaggctgaggcaggaga

SEQ ID NO: 96978 - DNA, 13462 bp, Homo sapiens
gtagaacttcctgtggagatggaataattctatttttgcactaatacagtagccactggccatatgtgacttttgagcacttgaaatgtgacaaatgcaactgaggagctgaattttaattttatttacttttaattaaaatttaaatggccatgtatttagacagctctgaactgcagtaactttaggctctatttgaaagtgtttgattcagtaactgttgctgaaataaattgaaactcatacaacagtaaaagctgtgttactcagcaagttatcactgtgaaagctctagaaattgtttgagtttccaatgcaaatccttttcaaaaagccgctgttttaatagcacatgaagcataaaataggttcatagcagagcgcagcacagagcaacatggagcaactgttatgacctggagtgtctccagtccagcatgcaggtgataggtctcagcgtttttgcacgcaggttaatgatggtgcagacggtcacttccttctctcaacagtcttcctggtcacgagcaccattgtggctcatgtgtgtggggctcttttggcttagctctctgcacgagtttgctccttgagttcccagagctgacccttgaaatgagtgatattactcctgttttgtagacagaaaactgaagccttgacagtctgacgtgacctggcaagaggtgctgcagttggaaatgtgaattcacggctgacatctgggcactttactcctaacagtgttcagtgaacaagacgtcgctaacatgcgggggatggaacctagcaactcattctacaaacatggttcaaatatgttggtgcagggccttttgctttgttttcctaaagagattagattcagatgtggtggggtgctttgacagccaccgcaggacaaagttgatagctgtggggttgcggagtgttgaggatttcatagggaagccagtcctgcgcagtagtacgctcaggttcatgctttcttgaggtgttccagaactggcctggagggaggctgcagtgtggaagcgggatttctgtcacctggagtattcttagaagttgcattctatgaagagtggagcatctgatgagctgtttactcgctgtttcatctgacggcagttgaaagacaaggcaggactggcagcgcagctgcctcagtcagcactgctgcactgggggcttgacctgcagtctcgcaatcctggactataactcattttgaagagagaaaaattaagcattaagtgattcaagcgtcttgcccaaggcgctactagaaaataaaggcactggtgcccagatgcaggtctgcatggtatgcaagcctgggcttcttcccacctcccccacagagagggcactggtatgttggagtgaagagccacgcaagacctctgtgaatgggcagagatgggccagtgacgcaacacagtaaagtgtattttggttataggcatcgtctctaaacttatgtaaaacattattaaaaaatggaaggacaacgatgaaatgatggccaaaaatatagaaaaggataccttgcatgtcctgtgaaatgcaaaggaattctaaagtgtcattatgagttacctcatggaagaaagcaaaaggtgaatctatctagagtttgtggttctgactcacaagagactgatgttcatgctgaaggacgagtgtgacaggtggaaggatagagcaccgagaccacactctaaagggtaggaatctatgggaactattcagggagatgaaagcatggaatgaactgaagcttgcagactcgttgagtaaaaagcgcgttttaggattggttttagaataaaataacaaggcctgtggttggggaagatgacttgctgttcacagagcctcccttaataggtggggacctcagcttttcctctgctgccatcaggtgagtggtgtacagtcctagccacagtagtaatcaccactggcctgactgagccctcaccctttatacagtgtctcctgccaccctcctgggagaggctgttctcggcacagctggcctggggtcacacagctggtaggtgtaaagcaggcattggagtccaggtagtctcactccgtagcctgtctctttagccactggaaatgtagagcaaagcgagaattgtccaaagagataagctaataaagaggaaaacaggctgggtgcaatggctcatgcctgtaatcccagcactttgggaggccaaggagggcggatcacaagttcaggagatcgagaccatcctggctaacacagtaaaaccccatctctactaaaaatacaaaaaattatccgggcgtgatggcatgcacctgtagtcccagctacttgggaggctgaggcaggagaatctcttgaatccaggaggcggaggttgcagtgagccgagatcacactactgcactccagcctgcgtgacagagcgagactccgtctcaaaaaaagaaaaaaaaaagaaaacaattatgctgagttccagagaagtgatgtctgtcttctcaggagagatgccgatgctgtctgagggcctgcccagtctccacatgattcagagactccagagatggacagctagtgccctgattttcccaagaggattctgagggtgacttctgtcaaccaaacaggaggacctggtgctgtcatcaccagttgtagagaggctgcggaccacctgctgtgtgtgccatcttacactgccatttgctgattgcttcaaagctagaggttgtttctaagagtgcttcgtgctaactaactaaaacataatgacattgtttttgtaaaactgatccgtggtttgttttttaaagcagaaagctctaaagtcactcagtcccaccacccagaagcacaagcaggtggctgccactgtaggacctctctctctaggctcgtgtagatggacacatggattggtcagtagaaatacttttattaaaagtcttatctttacataaatttgccaaattattaattttgcttgaaagggaaaggtgtccaacttcagttggaaatactagtttctaagagatactgctgagactaagagcataaaacatgatgaaaaccttaagtggctaagtgcagcaacgtcagagtaaaagctttgatgaagtcttggtttgcttgggctgtgtaggttggaggctcagcctttgtttctccctcctctggtgcccagtggtggtgtttgtgtccgtgaattttcaacctctgtagtttgtttgtagttatgaccactgttgcaccgaacccttaccgagggccaggccctgtgctaagcacttgccagtgtggatttattaagtcttcatgacagcaccatgtagggggagctgcgtccctgtgttgtacttgggacgcgatctgacctcaggcacttcaggctcctgaagggtctgcagtctcgtctctgcctgggaaaccacgatttgcagcatattccacagacctcatgctcatcatcaggaggcttcccgggactgctgcctgagatttctaagttcctaatgtggttcatgcttctggtgagtttctttgaggcgacgccccctgcgttgcctctggtcagctcagtcctgtggtcctgcagggcatcctacagtgtcctctgtctgtgacttgtgccgcgccaccttgacctggcatccactgtcctctaccgcgtttgcagataggagccactgttggtgcctttttgtcgtgtgtgttgaatggtcagggtcccaaatagctgattgggagcactctccttgaatctgccatgtgcctgggtctcaggtgactgggcccctccttgcttcagaacccacgtgcgttgcctgtcctctctggcttggagggttgtgtggaatcagaggtgagacccagtccccagggatgggcagttgcctttgattgcccagctgtcctcagcgccctccctcctgcgcccaactgctgtctcagttgcttgcttgaggatccggatatagactgaggtcggccttagcgtggcggggggttttctcttgagtcttggatactttgttaccggtcccatcttcctgtgggtgggagtgtctgtcttgcttggcccagcctcccagagaccttagctctcttagtacatgggctctgcctaccttgatccccagctcaccaccctagtgcagttgcttcttcgctcttgttccactccttgtcgccatccaccctgtgctttctcgatgtgtccttactcggtgtttctgtggagcagggcatcctgggcttcctttctgatccctggctcctgtgatcttccgtgctgggctccctcttcccttcccttttccactgtgttgccctcacacagctggcatgccatggatgtcgctcacccaagcccttcctaatgttgctcaccaaaacccctcccaccttgcccctgggaccttctccccttccaggctgcatgcaggccgagggcctggcgtctcagcaggaggcagtggggcctttgctggcacctgggctctgcatcctgaccttctgagggcttggtcctttaggtccatcttgaatctcctccaggcttcggactctctgctctgtagctggcccatggagacgggtacactcaggcctggtcttagactccgctgcttgggctgtgctggtgcctttggtgccctcttagtccatcccacctgggggccctgtcctgctgtccattgtgccagagtgctgtccccttgtctttccgtaactggctgctcgttacctttcccatctcagcctcagtaccagccacttggtatcagggaggctctccctgaccaacctaaagttcacagccgtggttgccagtttaaatttctgcatagcaactttttggtttattttggctacttatcttccccatcatgccccctgtccctcccatataaactcagtgagagtaggggccacatctcatcatcctgcccacagctctgctgtctgtatcagccagggtatgctgtgcagaggctcacggtaaatagctgcagaccacgaatcccatctgcttgctgtgctttaatattggcttacatctttggatccagtgagttcttttctctgtctccctctctctcactcgctcatacttactttgtgtaattggtgatttccagccttttgtatagtcctttctcgaatagttgttttctgtcatcttggcgggggcctcaaggggttgactgtacggagggcaggggctgcagagctgcagctgctgcctggggtctcacggcgcccgtgaggtgtaggcaggtgctttgcctctgagctgtctgtagaatggggtgacggcggtttcatcagactcagtgaagcatgtcatacagtgagtgtctggtcacagcaggaagatggtgaatgtcagctaatgagtattcatcaccaatgaatagtaacagttttttttactaaggctatgtaatgtagcctcagaatcccactcagcacagccccctggcagcggtgcctctgagagctggcatgatggagagagcctggttggccttactggtgtggttggggcacttgggagaacgccttcctcacaaagctcatctggagggttttcggacttgtaggatagctttttcaggggccttgcctttggcagggcagggacgtgtactgctgcagtctagggtatgggataactttctaaaccagacccagaacttcatggccgaaggggccttttagccatgcggggctaggagctgacacagcgtcagcagcatgagggcctgtggtgctgggcggcagagcccagagggagcccctgctggtgtgactttagtgtaaaggctgggggataccagattcttacagaagacttaagacgggcacagtgatgtctgctctttgacccttgcagtatgaattagtaaaactgaaattattacatttcctttattaggattataaaagcaatgatgacttattgaagaaaatttggaaaatacagaaactacctrtaatttttccattgttaacatttgagcatatttcttgtcacttttaatggtgctttaaatatgtagcaaatgtatcatttcgtattttaaaaaaatgctaggtaagcatttcctcctgtccttaaaaagctcttttaaacaactttaaaatattgtatagatagatgtacacaattttctgaataattggagttatatttacatcttttcactctttaggaaaggactggcctgtttctgtgttgggttccttcctgagtgtggcttccagctcagtggctcagacttcaagatgaagacttcagtcctggttgtgtatggtcttgggccagttaccatatgtctaatgaatacttagttttgtcatctacaaaatgaaaatagtaatatttgcctcaaagactattatttgggaggatctagtgcaaatgttagtaatgtggatattgtgtagtgtcccaggatattaatgtttttagcctcttggcttttattctgtattgttgccccaaaagatgatgctcacttatctttcatccagtgtaaggatatctggaaagacaacagaaagtatagctgttttcatttcaaaagtgatcagctgcttgagctagcaagcaaggcttgcactagcttccaggcgcagtcacgcagtttcacagcaggcgcggttccctcggagcacccagagctgccctgyggtagtcagcagttgtkctgtggctgcactgccaggctgggtggcaggtggatcggagccagcagatgtggctcaggaagtgccttcttggcctctccttaatctctttcagagtctgtgggcccttgattgcactgtgggttgtttcagactccagtattaggagactgaaccccttggtggttttttkgtgtgtgtgtgctgagctgggttgaggacatgttaagcaggtggggtgcctcccctgggtttgctccgggtggtacctgtggtgtggggtggttctgagtagttctggccccactgctggagtatctgcccactcagtttgtgagatggcagggcttcatcctggtctggtgcctcattttcttctttagcagtgggcttagaaccaatgcagattcccaagttaagtattttttctgtagcttaattattacaggcttctggtacctaagccctttcttactttctgttctgaggggaagagaagataatgttgtttctccgcccccccccggagtggccccaggaccttgcatggcatttgcagcatttgcagcgtgcttgggtttgctttactagggtgaaagtgttgcaccccccagcacccacaaaggcacctctgctcacmctccggtgaggttctgactggccctgggacatcacctgctccaggatcctatgtggctcatcccaggagagatgtgggagggaaggggaaaaaaggcttacatttgctgagtggaattcatgtagatctgagttccgcattgattcctaagctgcagagcccttatgccttggctgttttgtgaatgttagtcggtcttaacctttttcaccgagttagcattggctgtctcaggaggctcacagctcctgctcctcctccaggggagtgcgccctcctcctctgtcggtagctgtcaggtgcccctttcctctgcagcagactgtcctgggtccttgcctggccttccccttacacgtgagcctgcagcttcattcacagcccctgtgtagaaagataggcacatcgataggtccctccctgcccagagtgggcggaactgaggcaggcactaaaagcagctgactggcagccctagaaacatgaagggtttcatttatagtttcagtccttttccttctttcgagccttaatttaaaaaaaaaaaaaaaaaaagccttgaagtcctgcttctgagttttctaatttgtgcaggtattagttgccttgtaacataatcaaaaataaataaaaatgatttataattagcttattaactgtatcagtaaatggatactttaaagaggatcattgatccctcaaaatagaagcaatgcagtcattccctcattatgctttacttgtgatttgcttacaacccactcttcctagttaaagttaaatattaatccagaccctatcagtgcgatgtagtagtgtctgaatcagttgttgttttggtgtaatcgtatcaaagcatgttataaaatctacaaaattgcagggttaactccaaatattttcactaaggtattgtttttttgggcaaaaatgcatagtgaacattgtggagctgaagtgagggaacttcgatttctgagaaaccactagttttaagggttttgaaggaagagttggaggaggagaggaagagaataaattcacagttaatgagtttccagtattttctgtcgcattttacgttgtaatggaaaagactgggaactgaactcacatgcagtttgtcaaatcactttttccctagaattcaggattgatgagattaacggggtgttaaaggtaaactgaggcacataattaacatggacagaactgtagacctgagtgttgagagttgggaaatttcagtgagttgggaagactggaagcacctgttcttcagagtgcaggtcctcatattcagtgggtttaaggtgctgaaactttttttttttttttgagatggggtcttgcactgttgcccagactagagtgcagtggtgtaatcaccactcactgtagcttcgaatcctgggctgtcagcctatcctcccacatcagcctcctgactagctggactgcaggcctgggccaaaactcctggcttgaaacttcttgtaaccagattggaggaggagggcatgttcattttcgtgacgtttcctttcccttaaacatccagtgaaatctgacctttgaccatcactttgcttaaaagaagctactggatttaaagtctaggagaatgtcctagacaagcccatagtatgttcctgtatgttccccacccagagacctgcgttatgaagtgtttggtgtgcttcttccagccccactgttctttctaaagtgttttattttacatacgctgtcctggcttctgggctatgacctttgccttttttgccgtttagttcctttgccctttacctactgcagtgcagctgcctgtccttgggttgactacaaagaagtcacctttgaacaacttagaaattgtgccttttggggaaggcagggcagagccttggggctgagatgggggaggagccagctctgccctgggagagatacaaagcgcctgcctgggtgaggcagtgcacgggtgggcttgcttcacctctttggccccagcttcaaaaccagccagtcctccctggctttggctttaattcacatttacaagcttgaaaaccagttaatcccattagctcagcttctaaagctgaaaatcgtcccctaaatgggtcacctgttgtcatcaatagctttattagctatggaataatatagttttgttctctaactgtaggatccttcttttgctcttaaaatagctcagtaagttgggtctcataaatacatacagcaagcatataccagatactaaaatacaaaaacattgctgatcttgcttttcagtactaaaagcagaaaatcgggaatttactaaattgagaagtcagtcattacctttcgatgggtttggactcttgcaaggcagtgattgtaaacgagagtgatcttttgttgtttttcaatgaactttattctctaatttttagtaaagcacactaggaaataatgcttcagaattctgttttcgagtagtttcctgactaaaataaaaattcactaaaaaaaacctctgctgtcaccatttccttttttcttaagataactaggaaatgaatcattaagagtttgctccgtggcaatggatcgggaagctgaccctgctctctgtggggctggagccttgctaatgtcccaggatttcacttcacagagacaagcatcagaggcttgcttcatttatagatcctacttcttttctacaccacagccaactcaaaatggtgacagaatctaagacgaggctagaagtcaccacggagcagttggaagctctgcttccggttctgggggcagtgttcctggcgttgtgtcctttggccccacctcagtttgtccgtttagctcctcagctgagaatgagatgtgtatcatataggagtttcctgggccactcacagccccaagctggagagtgccagcctaatgtgtcaggagtagggggtgaggccagagggctgtgtgccaactcctccctaagaagcctcctgggaaagccctcccaggcacttcccaggtctcactggccgcctgaggctgcaggggaggatggtcaggccgcctcttggctggcactgcttcccggcgtgccgccagcctttctcatggggaggggaatgatggcatgcctggggggcagcagggccccagggctgcctagggctctcactgtgtcctcctggttctgagatgccacctttgtgatccactgtagagggatttattctattatgatcaatgcatagaaatttcttcgatttggagactgaacactagtgagcagaactgaaattgagctttaaaagatattgatgacgggtctgtggataggagactttagtgtggtttttatgcagacgtcctgccagctgtaaattccctggaggtttggtatgtgagaacataagactaaacttatttctattttgttgaggagaaatgattaaaacttttcattgatgtacttctgtggcagacttttggagaattgaaccagcgggcatattcagtatttgaagtcatagatgagtaaaggaggtatgttgtagtttgcgctggcggcgtggcctgtggtcggcagggcttatctgtgaaggtatgtgcacagcttcctaaggcagtgaaaagtcctggcagtgttagtattgaatgagataatccaaaaaatgtaaaaatgtttacatttttaaagggatagttggcgatttaaatggtttctgctaacaaatcaaattattcattgcagaggtaaaatattttcagaatgttaattttagatgtcgtagagagtgtacatcagcaatgacaaggtcagcaaaatatcttagcaaaacttgattgattgattccatgcacaggcaagcgctgttctgggcaccggagacggagcagtgcgctgttgcgtccatccacagatggcctccagagtcatgcggttgcagggaggccgaagggccagggaggccgctgggtgggcacggctgggcggtgccctcacgtgggttttgttgggctactcttactgtgcactttttctcagtttggtcagtgttccgccttgctgcctggcccccaaccctcgccctctgagggcctcacaaagagccaagcagaaggcaggctgggggcttttcaggccagcccagaggatgtaatgatgatggttggcactgtcccacggccgccaccagtctcacactgcctcgtgggcagtcctggagtcgtgcggcaccttgctggtccctgctctccttgaagaagggccagtggggcacttcgccagagccttcttgtctgactccgtcatccaagaggcatggatggccgggcccccggcagtttccattctattctgagaaggcaaaacaaaattattcctgtctcttattatctaatatttgttacagcagttgctcacttttaggtgcattttattacagatttcagacaggtgtggttattagtgcagcttactgtttggacacaatgccaaggtcaggaggacagtgttcccctgagcaccacttctgctaggagcatgggcaggccatgcctcgccattaatctctcctgatttaggggaggaataccaggccaccccctcttctccctgtgcaagggaacagacatttgacaaaaacggatgccatgttacgctgattttgtgtgtctaaggcagactgcagcaggtgttatctccgtgctcttcctttcctggagtgttgagcatctcttgatagtaggggatgcccctgagggtggtgaatgtggctgcacaggtcctgaaagctatttgatgttgccgttacttcaggtagaacttaaagttgacagtacattctactctgcaggtggaaatgtggagtgccattttgacaaattggaatgccctgtttacaatatgctttaatgagttaaatctgggggatgtggatagaattttagtatcctagctttggcattcttccatgactttgggccaattatttaataattccaagcctgcatctttgttagaatctctaaatttctctactcctgttattatcctcagaacaggactgtgaggtgcagtaggccacatggtgtagtggtttaggtggacagacttgccagtgctgttctcatggatagcctaggactgtccctagctctctgcagtgacagtgatagtgactggtgaaggtgaagggatccacccagacgttcttcctgatggagagaggctggcctgtggctcttccctggggtggatgttaacctgctaacgtgacatatctagtcctgcttacattactaagtggtaggaaattttaggtaacacctcagactttaaagtggcctactgagctggtagaaaagtgtgtagttggtgctcagtaattgttgaaaagatagaagctttacttcaaagctcttgtagtttgatcagtttggaaaaaatattttaatgttgggctctgttaacagctggactggtggctgtctgaattgggaccatgcttggggtgaggtttttttcttacttttttttttttttttggtgagacggagtcttgctctgtcgcccaggctggagtacagtggtgcaatctcggcccactgcagcctctgcctcctgggttcaagcgattctcctgcctcagttttctgagtagctgggactacaagcatgtgccaccacgcctggctaatttttttctatttttagcagagacggggtttcaccattttagtcaggatggtcttgatctcctgaacttgtgatccatccacctcagcctcccaaagtgctgggattacaggcgtgagccaccgcatctggccacatatttttttaaattaaatgtgatacataaaattaggctgcaggcatggcctgatttgcaggtgcttcatgagcaagcgtgcacagcatttatttgctgctcctggagtctctcgtgtgtgcttgtagcctagccttaagccctctgtggacggcttggaatgcgtactccaaatgactcttttggcggggtgggaagtggcaatactttaggtgactgacagttgaaattaaccttacacaagagccaaactgt

SEQ ID NO: 96979 - DNA, 106041 bp, Homo sapiens
acacatgcccacactcacgtgcccacacacgcccacacacacacgcccacacacacgcccgcacacacagggccacacacgacacgcacacacacccatgcacacacgcctgcacacacgcctgcacgcacgcctgcacacgtgcccgcacacacacccgcacacatgcacacccgtgcacacacacccgcacacacacaaccacacacacacacacacacatgcccagcagatgtcttctactagcaggggaacgtgggcagcgaggcctgtctcctgtgttcctaaaatgtggacacacgagggcacatctttgccggcctccctcgccactcagccacgtgggctcagcagcgaagctcaccgccttcactcacattcacactcgcgtttattgagagcaagtgaataaacgtgttctgatattgcactgtaactggttagttctttttcaaaaagagggataattcagtattttattatttctgcttattgaaacaggctcttttttggctgacaccagattgtacaagcatctgcttgttgctccattccgaaagcaatgtgaaaatctggtttcttagtttttcctcatattatcactattacaaccatggcttggatttcagattcatgcatccctaagcttggaggtccatgtctggtgaagctgattagctgcagggcaacaggaactggatcctcggggataacaagaaagaaccagtctctttagaaacacagaaaaactttttgccaaaatgacagacaagttctcctgaaactgagaaagtgtgtgtgtcaccctgacaccacatcccgtctctgactcatcaagtgtttctcctgcaatccccctgttgaaagctggtgcaaggggctgtgagaagctgggagcctccaggcgaagcccagctcctgccagaccctgatgcagccgtaaccatcacagcaccatcgcggcagccctgacctggccaatgtccttccaccctcttacctgaaccccagtgtccgggccgggacaggagacagactctcagcttccggtccttagaagctcccttctgcttccatatccaggtcattgtcacacagtacaaagcctctgccaccagcagggccgagagctgcgggctctgatgttcgtcccatcatataaatgtgttcatcaaactaaagcctcagactctcctcttttgtgtgggctgacagctctgactgtacaagagaaaacggttttgccaaaaagtgaaaaataccatttacttgggagaatggtgagtcattctaactgaatttgcacggagcctgcaggggtcctacaggacagaggtcaaggaggtcatgctgcctgccggggtcatgtgctaattagtggaacagctgggaccaaaacctgccttgaatgaggcgagctgtgcagagccgctgggtcaagacccggctccaccgcgctcaggaaacgagtctgcatctctctcgccgctcaagcgccgcctcctacaacactcctccctgactcagctcgacaaaactcgtccattttccactattcagggagttaaattaaatttcttatcacttgtttcagccacactggcccatgccgggcagctcaggaccatccaggcctccctcaggccacctacattcaagtttccgaggatgctctcagaccaaggtgggcggtgaccctcatgcaccccctatttccgccccataaccatctattcagcaatgagacaaaaatcccatctgaactctattccataatatgcaaagcatatgccctaagttacaagcgctattcagttttcatacaggaaacactgtctgggtccccataacaaatagacacactctgggcctaccctgtcttttggtgagtgcttgctggttgtcctaataagagaatcttcctctcggaatattaactgctatttttattaatgaggctcttctgaacagtctttctgcaataaccattgtaacactgtttaaatagctttttgtgttaagacagggccttcaatatcacctaagtaaaccattttgatttaaagataattaaaaacctttctgatggaaaattttccccaatgtcctgtttaaaatttccactcttggtcaaatgaagtaaatgaattgatttaaccattaaaagtatttattgagtatctgccatgtttcaaacattcagctaaacagagcagtctatgagaaacacagtaggtgcattccagtctcaccacacagctttgctgaccccacagccccccaggtgcttgctggcatcctagcctgtgggcactgacctgctgccatggccaaaagccgcgtatcctcaagagaacacgagagagcatcgcgagggatgcattcttgggagaaggtgaagaacaccgcgagggacgtgctagaagctgctggcctgttttcaacccacagccccaagagccactggctcgagactcctgggctgaggggccacggggccacccctctgccttcccgcaccctgcgcactgcacggctgtccactttgcagccttggttgcactttctccagctacttgctgtggaaactataataaagtttagtcttgaaggcactgggtaacctctgttttatggtttttaaaaaatcattcctcttctttctcctctcctcaattcaaagacacctgtttcatgaagaccaagtgagaaaattagttaagtgttaaataaatgcatgtagaaactgtattagtctgttttcatgctgctgataaagacatacccaagactggacaatttacaaaagaaagaggtttaattggactcacagttccacgtggctggggaggcctccaaacatggcagaaggccaggaggagcaaatcacgtcatacgtggatggcagcaggcaaagagagagctgtgcatggaaactcccgtttttaaagccatcagatctcgtgagacccattcactaccacgagaacagcatgggagagacccacccctgtgattcaatcatctcccaccaggtccttccacacacgtgaggattatgggagctacaagatgagatttgagtggggacacagagccaaaccatatccaagaacaaatacactaaaagccaaaaccaaagcaacctctaagcctgacaagtcagctgtccaggggccactgcccccccacacccagagaagcttcctggtggcagtgagatgcctccaggacaggggaccagaagacaggagggtctggccacggtggtgagggacccccagcaggtgtctgggctgcagacagacgcctcaatgttttcaacttggggaacagagccacaccgtcaagagagacagcctttcactcactgcagccaagcctctccgtaccttcccagtcagcagcagttgtttcaagagatttcgaagaagaaacaggttcgacctcgatgccagctctacacagcagtgacagaatagccccaaggtttagtcacctaaagccagtgagagaggaagtacaggcgagcccccaaagctcctgtccaaatggacagaaacctatttgtcttggttgcctcctgatcccggcctcaaacggtgctttgtaatctctgtgttttctttggattcactgaagtgggggattgttacgcatttgtgagctgcactaaatgctacctctttcagtaacaactctcccaggattaaagacgataaaaaagccactggctggcaagcccccaagctgaacacagacctagatgtgtatcaccctccccacaagttattttttccaccgaattaaattccagatgtttacaagcacagatacctgtgtttctccggtcagaaacgtgatgtggcccattgtgtggaagcccagagaggcgctcggaggcccccatatcgtgacgctaaacgcggaaatccagtgaaatcatctttgcgaaaaactggctcactttgctttttaagatgcggtcgtgaacgggagctagggcacctccgttccccgcgaaccgaatccatctcaggtccttctagtcggcatggctgcgtgcccaaacacacccagggttaaactggggttccgccgcctgtcccgtaatcccacacgggggactttacggagggcccacgcctggcctccagtgtcggtggaaccagtcccacggcggcctcacagccctgcggcggggcccgcgcccggccttgggtcacaaacgcccgcccttctgcctgcccctcgtctggctctgcgtttctcctcagcatgttgtcacctgacacgctgtggactcgatttgatttgtgcgtcctcattctgtcctcgctaggatggaggttccacgagaacagggctttcctctggctgctgacgacggagctcccggcacctgcacgagtgcgtggcgcgtgggagcaggtgtgcgctgagtgctcggtgcagttgctggcagcgcgtgcacgtccgcagctgtgagcgtagctctagcagtgtagacacctgggaaagtcggggcccaatcagtgagctgctcctgcccctcatccgctccaaattttgagtctgtgtcacccactttgcagcttttccatctactctgatagaatcgtctcgataggacaatgcctattcctgttctgagcctaagttctatctcctgcatgggtcacaaagccgagcccctggccactgaggcctccccgttcgcctcccagaggccgccactttcttcagggctatcagatgaaggcagcaacgaaaacaccaccacaagaccaacttcaggctggagctgatgatgccacacaggtgctccagctcgccctgcccgcttcaccgctttccctgcgggaaagccccaggcattcctgcccagtagtcagggctttgctgcagccccgggggtgggggtaggggtggggacagcgaatgcgtttgtccacagaccttgctcaggtcacgttctgagcctgcttctcactcctgccccctcccaccctcctggttctgccatggacaagctgaagtctctctgagaccaggggacccgcatggcccagccaccccaccccaccatctcccaggcatgtgagaaaatatcacattctctgtgttttggagatttcttctaaatgtattttccaactatcagcgagaaaaaaggtaagtatgtgtgttcacctggccatcttaaaccaaagccacttaaccacctcatttgtttttctaagtatgttttaacactgctgtgaacaattctctctcctcttattctttcattctctctcagtacacacacacacacacacacacacacacaccccttccctacttattctttcattctctctcaggacacacacacacacacaccacttccctacttattctttcattctctctcaggacacacacacgcacacacaccccttccctacttattctttcattctctctcaggacacacacacacacacacacacacacacacacaccccttccctacttattctttcattctctctcaggacacacacacacacacacacacacacacacacaccccttccctactgaataggatcccactgctataggaacaatgtcttactctctctggtatcatttttagtttgcataggacatacgcagcatgcttgtttaaaacataaagggctctgggcctttggcagtttgatgcaactgtcccaagcaagcctagaaatccgcattgtaagagctcccagttttttctgatgctaggagttgacagcacattttgcaaaatatgctagggtgttctatatagaaggcatgctataaacatatgttgccttcttaacataaaggaactaacattctttgtgcctatttacaaacaagaaaatagactctacttagaaatgaaactcaactaaaggtaaaagttgtcaggaacatctccaagaaagccagagtcagcctctaaactttgcatcaagaacgcaatggcttccctgagggcccagggacgcgtggcagctgtgaggcagccccttctctgctgtcaaggaactggacacttctcctgtcccttcccacaaggtgggtctctgctcacggcccctccttgggggctatcctgggtgggggaggtcataagcctacccgctgcatggggaaagcctgagagctgggagagaagtcaacaatagttaacagcctctgtaacaacagtccagcaccacagtgtacagtaaacttagaaattcaactccagtgaaatcttctttactttatggaaatcatagaccacttaatatgattgaaatacattcaagatggttgtagtcactggtttcccaaaaaggatgtagttatccaatatttcatatgtattcatagtcggaaacatgtcaggcaacagaaagcaactggccaagtgctgcatgcatgtcagcatagcagaaaaatcaggccaacaaatcactgtgactctttgctgccaaaccacagctaaaggtgttcgtcagcaccacaggccccctctcagtggagctgaaggcagcagaacactttgggtgggtagaactttgatacaaatgtaaataacttttacaatctcttttgggaagcatactttcttttgtggttataatacatccaggtcattaacagccatgagacttctattacaatacataaatgtaagtggagaggccgaacaaacgcgtccaggcacagagtcctgggaactcaggaaagcaagtcactctggaggatgggggtcatgattatttaatttaaaatatgtagatgttaagtagagtcatctaactccctgttcaggtggaggttttaaatcgcaggcctggggctctaatgtttgatctgatgtggacggtgttgacaggtaacagcagatcaattcttaagactaacattgactatttctaatccactttaaggaaaacttgccattctctcatcacctttacgaggtgggtagtatttctgatgagaacaaaatgcttaatgaaattgggaagtaagcagtgcctcagccccaagcctctgacatcatcacctttccaagggaatccattcactgtgtaaaacccacagaattacaccacctccattattagtgagataattaatgcccttttcattttattattttgatatttttatgaaactgtttaaggagacatgttagcctctagaggagaaaaatcgtgtacatcagaggcgtgttcttgaattaaacggtcaatctcattcaacatggatttccaatcaaattctgagtcacaaggagaaatactgatctctggataagttagaatgtgcagaagaaatgcttgggcaaaatagatgagttttgttctgttaaactagatataaaagattcaggacgtagtgctcgtggttggggtcggggacatggcaagacaggagcggaagagagagacggagaagacgcaggggaactgcatctgcctctgctgctcaggaacagcgttgagaccggcgcagggaccatgggtgggagagtcctgatgtactcaatgtaaatacaaattgtgtttcttttacagtgaaaacgtattcttcatgttactggtgttatttaccaacatacaaaagtaaatactatatcatgctgtgttctcttaggcatatctctgtgaaggccagccaccgacacagcacaataagtaactgtatacactggaaaaaatactcaggaggggaagacatgctacgttaagcagagcaatggctgactgtaaaatccccagatcgaagtctcatggtcagcagaaagagtagaacttaatgctaattaaagcttcatttaacaggaaggataagttaacaagtggtcaccatagcaacagaaggagctaagggtgtctgcgtccccacactgcacacctgtgcatcactttatcttcacaatccattgcacagacccttacctgacagcacgttgccctctctcaaatgggtgggatcatagtggaacaaagcattttatagattatattaagaagtaaactcagaaaatactatgttcatagaagacagttcaatggactgccgatttcaaactcatgcacttcacggcccattgatggtgggcaccgtggggtgaatttactcctgtttggcagccttggcttctcagctgctcaagctccggagccccattcacagctttcagggctcacctgtggggactctggacttcacctttccttctgcagcttttctggaaggccagaaacaccacctgggcccctcctccatctttacccggctggtcccccaaaagcatcgttatccactcagctgtcccagcctcctccttttataaaataggcctttttaccatcttgtttgcatagttacctttaaaagccagcataaaaaacaaaagccttgattctgctgcttagtaaaaggtgccatcttaagtaatttaacttctctgagagcataagaataaatcagtgaatatttttttaagcagtgaaacgctttttttttcctaggtataatattaggcagaaacccaatataaaaagaaaagcagagttgttgtagattcatcgagggttggcgacctggttccaatgagccatctccctgttccgacaggggcttcctggagctcctgcaaccccaggcattagttccggtgcagttctaggatcagatcaattcactcgacaacaagagaaacaaatggagattcctacacaaagactttcaagcacaaagaaatcctgctgcctgtaaagcggagctgcctcagcccttgatgaacgacagaaaatgtaagagtagttgtcattttcataagcagtaacccagattcatattcatggaaaagataagagtaagttgtcattttcacaggcagtaacccagattcatacttgcagcagcagcgctaagtcacatgaattgattgagcagtcggtgggttcactgatgggttaaattcgtgtatattagggttgagtttggtaatatgtaccagaaaaccaacttgcagtggcttgaccaaatcaataattatcttttgcataaaatcagcagcccacaattaggcaaggcagactgaaacagcagctccacaattcattcaagtcccaacgtttttctgcttcatacaccctgggtttagcttttgtcttaatggttttaaagtggctctgatttgtgtgataagagatcgtgtgtgcagctgcccaaagaccaccctcacaattaggcttcggtgagtaaggaggcaagggctacctgcaggcaggtgtgctgaacagctgtgtgaccacagtcaggcccacatcccctggggcgctcctgtgggctaaacaggtccccaaaccttgccgcctgttctcactgctccctggagagccaccccagcacactgtctccacactggagatcacccctcctggccattccctccctcaccccttctggtctggaagtgggtggggcccctgggtgttacaacagctctgtttccctatagcctgtccctccactctgtagacgatgacatcaccagcccctcccctgagtattctggcaacaaaggagccagcagacaaaccgcttctcttccacagaccacctactgccagacctcaacgcctcacaaaactctcacccacctactgcttttagctcacattccaggaattcagatgaagtgaagtgctctcatggggaccaggcatggttatgccagtccactgccctgcaagcctcaagggaagccaactgcccttcagcaagtcacacctgccttggtggaggccttgattggaagtgccacacgctacatgtccagtcctgagcgggagaatcggtgtagggacgttctggggatgccagctgtggccagatcaggtccagctacagaagaataatgaagactccacctgagggctggaaaaacaaaacctcaagtgtgaggcagccaacctgttacctcgagggactgttccgcagcacagcggggccatgggaacagcagcagacaccccgacctcctcgctacctgtgtgtgtattaacacgccggcctcctcgctacctgtgtgtgtattaacacgccggcctcctcgctccctgtgtgtgtattaacaccccggcctcctcgctccctgtgtgtgtattaacacgccggcctcctcgctacctgtgtgtgtattaacatcccggcctcctcgctacctgtgtgtgtattaacgccccggcctcctcgctacctgtgtgtgtattaacacgccggcctcctcactacctgtgtgtgtattaacacgccggcctcctcactacctgtgtgtgtattaacacgccggcctcctcgctacctgtgtgtgtattaacaccccggcctcctcgctacctgtgtgtgtattagacaccccggcctcctcactacctgtgtgtgtattaacacgccggcctcctcactacctgtgtgtgtattaacaccccggcctcctcactacctgtgtgtgtattaacacgccggcctcctcgctacctgtgtgtgtattaacaccccggcctcctcactacctgtgtgtgtattaacaccccggcctcctcgctacctgtgtgtgtattaacaccccggcctcctcactacctgtgtgtgtattaacagccccggcctcctcactacctgtgtgtgtattaacacgccggcctcctcactacctgtgtgtgtattaacacgccggcctcctcgctacctgtgtgtgtattaacaccccggcctcctcgctacctgtgtgtgtattaacaccccggcctcctcgctacctgtgtgtgtattaacaccccggcctcctcattacctgtgtgtgtattaacaccccggcctcctcactacctgtgtgtgtattaacaccccgacctgcctgcactacctgtgtgtgtattaacacgccggcctcctcactacctgtgtgtgtattaacaccccggcctcctcgctacctgtgtgtgtattaacaccccggcctcctcgctacctgtgtgtgtattaacaccccggtctcctcgcgacctgtgtgtgtattaacaccccgacctcctggactacctgtgtgtgtattaacacgccgctctcctcgctacctgtgtgtgtattaacaccccggcctcctcgctacctgtgtgtgtattaacaccccggcctcctcattacctgtgtgtgtattaacaccccggcctcctcgctacctgtgtgtgtattaacaccccggcctcctcattacctgtgtgtgtattaacaccccggcctcctcactacctgtgtgtgtattaacaccccgacctccttactacctgtgtgtgtattaacacgccggcctcctcactacctgtgtgtgtattaacacgccggcctcctcactacctgtgtgtgtattaacaccccggcctcctcattacctgtgtgtgtattaacaccccggcctcctcactacctgtgtgtgtattaacacgccggcctcctcactacctgtgtgtgtattaacaccccggcctcctcgctacctgtgtgtgtattaacaccccggcctcctcactacctgtgtgtgtattaacaccccggcctcctcattacctgtgtgtgtattaacaccccggcctcctcactacctgtgtgtgtattaacacgccggcctcctcactacctgtgtgtgtattaacacgccggcctcctcgctacctgtgtgtgtattaacgccccggcctcctcgctacctgtgtgtgtattagacacccgggcctcctcgctgcctgtgtgtgtattaacaccccggcctcctcgctacctgtgtgtgtattaacgccccggcctcctcgctacctgtgtgtgtattaacgccccggcctcctcgctacctgtgtgtgtattaacgccccggcctcctcgctacctgtgtgtgtattaacaccccggcctcctcgctacctgtgtgtgtattaacaccccggcctcctcactacctgtgtgtgtattaacacgccggcctcctcactacctgtgtgtgtattaacaccccggcctcctcgctacctgtgtgtgtattaacaccccggcctcctcgctacctgtgtgtgtattaacaccccggcctcctcgctacctgtgtattaacacgccggcctcctcactacctgtgtgtgtattaatgccccggcctcctcactacctgtgtgtgtattaacaccccggcctcctcgctacctgtgtgtgtattaacaccccggcctcctcgctacctgtgtgtgtattaacaccccggcctcctcgctgcctgtgtgtgtattaacacgccggcctcctcactacctgtgtgtgtattaacacgccggcctcctcattacctgtgggtgtattaacaccccggctttctcaccaactgtgtgtgtattaacaccccggcctgctcactattgtgtgtattaacaccccggcctcctcgctacctgcgtgtattagacacatgtgctttatacatgtctactttaagccacctttgaatttcctgttacttgtcaccaaaatcattgctaaatctttccatttcaactttcagatcaactatggcctgagtatgatagacttatccatggtttaaacagaatatattgttttcaactttgaaaataagaatatggaaatccagatgcagaaatgtgagaagaaaagagagtaaacagagtggaaggtcaggtgaccttgcctgtcatgaatatgaaggtcaaggtgtgtgaattgtgaaatttccaagagaacctcactgaagcaaagaatgaagaaagaattgcatttggccctgggagggtgcaggggtgaatggtgcaggagctaaatctttatcatacccagaaatcaacagccactatttgaaatcatctaaattcgtgctgctaaccttcagtgtacacacgaatcacctggggatcttactaaaagctagtttctgattcactaaatctgtgtgtggtggaagttgagggcagagaagctcccgagggtgtcaagctgactctgaacccgactttgagggttaaggtcccaaatggcatcgccagcaccagggacagacactaaaattgtagaaatcgtctcaagaaatgaacagcctctaagtcagatgttgaatgtgaaagaaatcagggtgtgtacgtgtgtgtgcatttgtgtgtgcacgtgtgtgcctgtgtttgtctctgtgcatgtatgtttctatgtgtgcacatgtgtgtatgtgtctgtacatgtgtgtttctgtgtgtgtgcctgtgtgtgtattggcttagatctgttcgagactttttatttgatgagatcgatatatgccaccacttttggaaaggacaacgtatatacaaagacaatgattacttatgtaatgtgaacggagtctctcttcgaccctcaaatgttttgtagaaagtaatgatgatggtgaggattataacaatgcgtgtttcctgaataacaaaaaggagttacagtacacttttacctatttttccaaagcgctaggtcaagtttagctaaagtctgcttggaattaatgaggcttggaaatgtaaaatctcagagcagtaaacatctctttgtcctaatgttcttatgtagccattaaaacttaaatattaatactaaaataactactgtaaaataaagtaaaaatgtacgagaataatcaaaataattctgaaacacccacaaatgcttttgaaactccatttctacacagtgacataaagaaaaaatttagatgtacccaagaaataatgaatagtgattttccttacgaagtgctgatttctttaaaaataaatagacaacaggttctttaaataacaaacatccttagcacatgtgaggttcaattcaacttaaatttcacctacatttctcagggacacacataagtaattatgagcatgtcttcagggtcaactctggagaaatgctttgtaaagggtccagccagtcgctcaggagggatttctcaggggcaccaaacactgggaagcatcaggatgatgaatcctgtgtttcattttacgtccaaatgctcttgcctcatgtggcatagacaatggtattgtatataacagtttctcagaactgactgcattttaaaagaaggaggaaattataattactaaacccttgcatatgggactatttttcataaatctgttaatcataagggttcaaataaaagccaaaaatgtaatgagctctttcccttcttgtacatacaagttatactaatataggaaataagctgggcccaatgaaagctacaactttagagttttataaatttgtttccacttttgtctatgactctgtgattgcaatctgctgacaataagaacggaacttcttcctatgtttttatgcacatgaaactcaccattagaaacattcattaaggtttgaataaggacaaatcacaagcattaagaagagctgtcaaccattttaaacagccatcaactaattttggcaaaaacagtcccttgagaactgtttatttttaatacttcaactagaaatggctttaacatgacacccttcagtgccaggtgtcatttcagtctggaccttcactggattggccacatctgcgttaatgtcatggttattggtggcattgagtaagggccctacctaaagaaatcagtatcaaaggtgctgaatagtgcaagccacatttactttctgctatacaaatactattttataatataaatgcaatataagatcaattactaaaatgtgccaagcagttaaaatatatcttaatcttagtaaagttatatcaatttaaagatacaggctttacaataaaatgtcccttttaaaggtggaatctcttctccaacttaaatgttcccactttggggaaagcaataatcactcactgccatctgtcaacaccccactcatgccagatattgttcaaatctcaatgtaatgatgctagagctgaccattattattcgtagtatgaaaattttctaatgtctattttttaatgtgaaataatgattacatataaaataaaagcaatatccaggctcaccttggagattgtgcaggctcagttccaggtcatcccaataaagagatatagcaataacataagtcacccaaatactttggtttcccaatgcatacaaaagtgatatttacactataatgtggtctattaagtacacaatagtattatgtctaaaaaaagtataaacattaattttaaaatgtattgctaaaaatgctaacaatgccttcagtgagtcataatctttttgctggtggaggtctcctccacgtagatggctgatgaatgatccgggtggttggggtggtggtggcaatttctgaaaataagacaagaataaagtctgttgcatagatcgactctttttcttttttcatagacgatttctcggtagcatgtgattctggttgatataattttacccagagtagaacttatttcaaaattggagtccatgctctcaaaaccctgccactgctttatcaactaaggttataaaatactctaaatccttggtgatcatttcaacaatgttcacagcatcttcaccagaagcacattctaccccaagaaaccaggttctctgcacatccataagaagcaaccgatcaccagttaaagttctatcatgagattgaagcaattcagttccatcttcaggctccacttctaattctagttctcttgctattttcataacatctggttacttcttccattgaagtcttgaacccctcaaaatcacccatgaaagttagaaccaacttcttccaaagtcttgttcatgttgatattttgacctcctcacatgaatcataaatgttctgaatggcatctagaatggtgaattctttccagaaggttttcaatttactttgcccagctccatcagaggaacaactatctatggtagacatggcctagtaaaatatatttcttaaataataagacttgaaagtcaaaattgctccttgatccatggactgcagagtggacgttgtcttagtaggcatgaaaaaaatgtctgtcttcttgtacatccccatcagagctcatgagggaccaggtgcattgtcaatgagcattaatagtttgaaaggaatctttctgtctcagcagtagatctcaacagtaggctgaaaatactcactaaaccatgctgtaagcagaagagctgtcatcaggtgtgtcgttttatttataaagcacaggcagagcagacttagcatcattcttacaggccctgagattttgggaatggtaaatcttcacaggcttcaacttaaagtcaccaactctgttaacccctaacaagagaggcaatctttcctttaagctttgaagccaggcattgacttctcctccctagctatgaaagtcctagatggcatcttcttccaatagaagattgttttgtccatatgagaaatctgttgtttagcatcactaccttcatcagtgatctcagctggatcctctggagaacttgctgcagcttctccatcagcacttgctccttcaccttgcacttctatgttatagagatggtttcttgcttctttccttaaacctcaggaataaacctctgctagttccacaccttccttatgcagcttcttcacctctctcagccttcacagaaatgaaaagaattagaggccttgctctggatgaggctttggctgaagggagtgttgtggctggtttgatcttctgtccaggccactcaaactttccccatagcagtaatccggctgttttgctttcttgccattcatgtgttcactggagtagcactctcaatctctttcaagaacttttccttgcactcacaacttagctaactggtgcaagaagcccagctctgaacctatcttggcttttgacctgccttcctcactaagcttaatcatttctagcttatgatttaaagtgacagacataagactcttccttccactgaaatatttagaggtcattgcagggttatcaactggcctaatcttaggctgggtgtggtagctcatgcctgtaaccccagcactttgggaggcataggcgggtggattgcttgacgtcaggagttcgaaaccagcctggccaacatagtgaaaccctgtctctactaaaaatacaaaaattggttgggcagggtggtacatgcctgtaatcccagctacttgggaggctgatgtaggagaatcacttgaacctgggagttggaggttgcagtgagccaagattgtgccactgcactctatcctggatgacagagcaagactcagtcaaaaaaaaaaaaaaaaaaaaaagaaaagaaaaagaaaaagaaaagaaaaatgacctaatcttaatcttgctgtgtttgtgggaatcaggaggcctgaagagaggggagagagacaaggaaatggttattcattggagcaatcagaacacacacaacatttatcagttaaattcgcaatcttatatgggcatagttcattgtgccccaaaacagttacaatagtaacatcaaagatcactgatcatagatcaccataacacacataataaaaatgaaaacgtttgaaatattgcaagaattcccaaaatgtgacacagagatgtgaagtgagcacatgctgtggacaaatggtgctgatggactcactggatgcagggtggccacaagcccttgatttgttagaaggacactgtctgtgaagcacaataaggcaagatgtgggaaacggtgagcacctgtcgtacgtcagcacggcaaggaaggttaactcctaacgagggcatgtcatgtcccactcaggagcccagcgtcaatgtgcagacagcaggaaccaggagatcctcaggccactgcacatcttctgaaaggctttgaaaaggatcaaagggcataatagctgccatattattgtggtaattcgttcatagatggggaaaaaaggtagatataaaatgaatattttctgagcatctaagaggatatgggtggtgacaatgcacacactgatggaggttttatttatttatttatgtctttcatgaggttgactttttttattacactttaagttctggggtacatgcgcacaacgtgcaggtttgttacataggtgtacatgtgccatgttggtttcctgcacccatcaactcatcatttacattaggtatttctcctaatgttatccctcccccagcctcccaccacccccgacaggccccagtgtgtgatgttctcctccctctgtccatgtgttctcattgttcaactcccacttatgagcgagaacatgcagtgagtgagaacatgaggtgtgtggttttctgtccttgtgatagtttgctgagaatgatggtttccagcttcatccatgttcttgcaaaggacatgaactcgtccttttttatggctgcataatattccatggtgtatatgtgccacattttctttatgcagtctattattgatggacatttgggttggtttcaagtctttgctattgtcaatagtgtcacaataaacatacatgtgcatgtgtctttatagtagcatgatttataatcatttgggtatatacccagtaatgggattgctgggtcaaatggtatttctagttccagatccttgaggaatcgccacactgtcttccataatggttgaataatttacactcccaccaacagtgtaaaagcattcctatttttccacatcctctccagcatctgttgcttcctgactttttaatgatcaccattctaactggcatgagatggtatttcattgtggttttgatttgcatttccctaatgaccagtgatgatgagcattttttcatatgcctgttggctgcataaatgtcttcttttgagaagtgtctgttcatatactttgcccactttttgatggggttgtttttttcttgtaaatttgtttaagttctttgttgattctggatattagccctttgtcagatgaatagattgcaaaaattttctcccattctgtaggttgcctgttcactctgctgatagtttcttttgctgtgcagaagctctttagtttaactagatcccatttgtctattttggcttttgttgccattgcttttggtgttttaatcatgaagtctttgcccatgcctatgaactgaatggtattgcctcggttttcttctaaggtttttatggttttaggtcttacatttaagtctttaatccatcttgagttaatttttgtataaggtgtaaggaaggggtccagtttcagctttctacatatggctagctagtttccccagcaccatttattaaatagggaatccttttccctatttaataaatccttttcccattgcttgtttttgtcaggtttgtcaaagatcagatggttgtagatgtgtggtgttatttctgaggcctctgttctgttccattggtctatatatctgttttggtaccagtatcaaaactattggtaccagtaccatactgttttggttactgtagccttgtagtatagtttgaagtcaggtaacatgatgcctccagctttgttctttttgcttaggattgtcttgcccatgcgggctcctttttggttccatatgaaatttaaattagttttttcctattctttgaagaaagtcaatggtagcttggtgaggatagcactgaatctataaattactttgggcagtatggctattttcatgatattgattctttctaacataacatgagcatgaaatattcttccatttgtttgtgtcctcttttttttgttgctgagcaatggtttgtagttctccttgaagaggtccttcacatcccttgtaagttggattcctaggtattttattctctttgtgccagttgtgaatgggagttcactcatgattcggctctctgtttgtctgttattggtgtataggaatgcttgtgatttttgcacattgattttgtatcctgagactgctgaagttgctatcagcttaaggagattttgggctgagactatggggttttctaaatatacaatcatgtcaatgacagaagttttaaacctgcgagctgggggagggactgcgccgctgaaagccaggcctgttgatggtgtcagcacagcagaaatactgccaatgctccctcaaaactgtaaagaaaggtgaatttccatttgaacatatatagagagaaatacatgaactacatctgatgtattgtattgatttctgtccattcagcagcacagcctgggagtcactactgatgggggccccagattctgtgaaagcagagatgacaactaaatgggacccaaattcctgagtggtggcatatgcattgtgacactctgaatgaagttgtaatcgctacttcaccatgacaggttctaagacaacaaaaacacaaaatgttaccacataaacacagtccccgagacataggattcttaaaggaaaaccaggagtgtatttggtcaaagtcaactaaattatgaacagtatgaaaaaaaaacatagccagctgcttagtttatagagaaagtttatatttactaatttattcaatactttaaaaagacctacacactataaagaaagggagagcagccccactttgctcatgaggagattaaaaccccagagcctcagggactggctgtggccacaatgagtgtcggagtaggaatcaaaatcagctgccctggctggtcttctctgactcaaagcctttccttaactcttacacatgactggtgggagtgtaaactggtacagccactaaaaagctaaaactgagaacagagcctccatatgatccaacaatcctcctactgaatatttatcaaaggggagggaaatcacaatatggaagggatgtttgcaccccgcgattattgcagcactattcacaatagccacgatgcggattcaatccaagttgacagcaacagcaggtgaatacagaggaaatgtggctaaatacacactggaatactactcagccttaaaaagaagaaaatcctgtcatgtgcaacaacatggatgaacctgaaggacatcgtgctaagtgaaataagacagacacaaaaagaaaaacaccgcatggtctcacttatatgtgaagctaaagaagagctcacagacgtgctgaatacaacagtggttatgggagtggggtgctggcagagggagcttggttaacatgaacaaacctacaattacaaaggaagaagttctggtcttctcatagggtgagtaattgactatatattttcaagcagcagaagagaggattttaaatgctgtcaacacaaagaaacgataactgagatgatggatatgcttattagagtgatttgattattatacatggtacacatgcaccaatatatcccactgtaccccataaatacaattattacatgtcaatttaaaaaatccatggaaacaaaaagtagaatggcttttgccagagttttggggaagagagaaatgatgagctaatgtttaacgggtccagagattctggtcaggatgatgaaaagttctggaattgaacagtggtgatgatggttgtacaaaattgtgaatttacctaatgccacagggctgtactcttaaaatggttaaaattgtgagttttatgttacatatgttttatcagaattaaaaacaaaagagtacctgcattcattttgagacaaaacagaagtctcctccttcactttgaaggtgtcagctaccagcacataaagacaaagagaaaacctcagggtcatgtttaaacacatctgatttatactgaggacaaattaaagaaagtaatttatgtaatgaagagtaaacttatggaactcattgccaaaagaggaggtacagacgtagaaatattcaaagacatctacgagaaattgttcaaacctttattgacagcagcctaagagaacgtggagcacgataaggtttggagtcaccctgaggttcacatcacagcacacaaagagctttttgccccactgccactgtgccctagtgcatttctgaggactggaatagggaggtggatggacctgcaggtcctccccatggcacaaacgctgcaccttgcacacacctgggtccctgccatgtctagccctagcctgtgcacagtgaggagagtacacctggttatcaggacagagtcacctctaagacgcccagtgcctaactgcacagtgaggagagtacctctggttgtaaacacaaggtcaccccgagatgcccagtgcttttacatggtgagggcagcacacctggttgtcagcacaaggtcacctctgaaatgcacagtgcttgtacatgtgagggtatcacacctggttgtcagcactgcatcacctctgagatgccctcccgttcacgtgtgtagcaataaaaaaagtctggcttaacaactgtcattctcagctcccagtcaaagcagaatagggtgttgtgctcatatttaaagcttcattttgtattgtatctgtttttagaaattgtctatttctttgtccacgtaggctaaagttacatcttcaataagccaagtaataggaacttactttgctcaccgcagtatgtgtgcctgctcctagaactatgctcaggatgtggccggcacatggtcagtttttgctgaatggaggaaagaattaaattttggagcctacacatggtcccaagatcacggctatgttttcaatgggacttttaaatgctcttacagaaatgttcatactgggaatgccaatgtcaggatgaaacaggtgatttctaaaaaagatgattttcttaggaagccaagactttctctactctccatcctcatctccatgccccagttctgagcctcctccttttttcgcctgcatcactataaatgtggctgcatccatgctgaggtttcagttcaaataccttgataccttgtcctcagagatgattctacaaccaccttatcagacgtaggtccccttcgccctcaccatctcatctctgtctcagcatttgtctctcttccttcttccctctttcttccatgctctttttataacttcctactatttcatatagttatctgtttgctggtgtttaccttctgcagcaagtgaaccatgcaggagggactgtcacacctgcaacacctggtgcagtgctggacacgggggacacttcgcatctctctacttagtgacagcatctgacggaaggagggagggtcagaaagccccctgctcgcctgtctgcccatgggggagggtgggcagaaggaggcaggactggtctgtctgcctacggccccaaacccttttggtccatcatccatagctacctccataaaacacagatctgatgatgttggtccctgctcaaggcttgtcaatcatttaccactgcctgcaggatgaagttcagagtactgagagtggcattgagaacagcctcttgtccccttctctctcctacactctgttgcagaagggaccctcacacattccaagcgcactgtgacccggcaccttggcttctttacatgtgcattccctgcccctttcatccataaaccagcctcaagggagtggccccacaccctacactccgtccagactccaggagcacacgacacacgggacacactacaccaaacaatgcaggtttcttgtggacagaatttctcccctctgtccctgagcacccgaggactcaagcaatggctatgggatgtgtgagcaaatcaaaagttctcagcacaaattctcccttccttcctggaggtgcagactgtttctgtttgacgtccatttccaagcatgtccaacccatggcccatgggtcacatgcagcccaggacagctttgaatgtgcccaacaggaatttgcaaactttcttaaaacatgatatttctttggtgattttttttatagcttatcagctattgttagtgttagtgtattttacatgtggctcaagataatttttcttctttcttcttccagtgtggcccagggaagccaaacggttgggcacccctgcctcccgtttctcccggggccagtaactggtctgccttacactggtgctgcctgtctgctgtggtctcagcgtctgtgtctctccaaagtgcttgtgccgaaacctgatcccaagagtgatggtgtcaggaggtggggcctttgggaggtgatggggtcctgaggatggagcctcatgaatgtgattattgtccttagaaaagggaccccagagagtccccttgcaccctccaccacgtgaggactcagtgagaaagtgccatctatgaggaaggcgggcctcgtgtgaggactcagtgagaaagcgccatctatgaggaaggcgggcctcgtgtgaggactcagtgagaaagcgccatctatgaggaaggcgggccccacgtgaggactcagtgagaaagcgccatctgtgaggaaggtgggcccctgtgaggactcaagagagaaagcgccatctacgaggaaggggagcttcatcaaacacccagcctgccttgatattggactgccagcctccagaactgtgaggaatatgttcctgttgtttataaactacctgtgtatgatatattgttctaggagcacacatggactaagacagtgtctcaagcactctttgcctaatggactgcattataatagtggcaaaaatatcagagacagcagtcttgaaatgtccccacggttttaaggaagggtcaggtgagcaaaatatagactgttcttatgaattcatagccctagtatatcctagccaaccacacttatataccatcctaacagcacaggcactgggcctggggcagcagcaggggccctcacccacaggtctgaatcctactccactggactgagccctcacccactgttctgagtgctggtcacatggaaacttactaattcaggatatttcagtccacttctaactatagattttctatgcagctgtgaacaagtcaccaaattctgatgccccagacattctctaggattggataatgctctctttcatgccatattgtaagggataaaatacaggaaaaaagaggccattatgacagcagacactctgaaaggcagtaatagcaataattggtcagttaaaagaaatttaaactatactaaaaagttaacatactttatcttatttaatgtttataaaacctctgaggttgtacgtactcctgtcatttccgacatgaaaaaactgggctcaaagaagttgtcttgcccaggttcacacagatgtgagcaggaatcagaacctgagcccatttctgtggctttgaagcccacatcctttgcagtccgctatgctgcattcttgaaagaaagtggagttcaggtgaggtgactctccatctgttcctcccaccctcttcctacagcccagtcttcccagcagatccaagaggttctggggcctcctccttggaagtttgcatatgcagttccctctatccaggaggcatccccatcactgtgcttagcttatcctagaaacaaacaacaacccactttggtaggtggtgcctttatgacactttggatgtctctgtgatgaacctagatcattgtgtgtgtcacttctgatcaggatatctgatttcctgcagaaaacagatggaatgcagatatattggtgttgttactcagcatctatgactatattttgttgaaatattgtcatggataatatttttctgatatgttgatgattggtgtgttctttcaaatttattcttactacttccatcaaaagatgtcagattggtgcctccaaatggcaagtaagcatcacagtggtttcagaatttataactaaaatccagtttgaaggaacaacgtaaagtccatacttcctttaagcctttccccatgaaaagtcctctttatcttggcctggaacaataaattttttaaaaaagtaaatcagccatgctatcttatcccaaccctttaaatacaactttcacctaatttctctcctgaacatgcatagccgtgtgcatctgcagatgcaaaagcagtgttgaagaatgggaaggggtggatgaccatgtttttggaatcatcttcttcctccctagaaggggagaagtgttacatagaatgctgtacttcattgatctagaataagctgcagatatcatgcatacattatcacttgtaagagtctatatttattacatttatactaggaaaattaatcctgttagaaagcttgtcttcctaaatgctttaaacactgtctagtacgtgcctagcacactaatagcattttgatagcttaaaaaaacagaattggtaaatattaaacagtaagcaatatttgtttatagtacatgatgttatcctttatgaaaggtgatttttttctacaatacaaacttcgttagattgttaaatgattgccataatgattgaaaaatataacaattcattttaaagcatgtggttaacacaggtattttagaagtctttgagggcagctaatattcatctaaaattaaatacgtaccctctggatgaagaaaaaaaatgattgcagtcaaaacatcagaactttaacctgtttatgaattgaaaaaatcaactcacccatctcaggacctatatatagtactgttagggtagattaaatacaggtttttttcctctgctcggttttcttcctatgatccaacacagttttctcaaaaagataaccaaactaaatcaaatctagaaaaaaatttttccagtaattctagaatatagtttgttgctaattttatctcttttctttttggcttcctgcttgaaaagcacgggtttgaaggggtccacttacatattttttttcaaacgtgggtcgaaaacacagcagctggaggatgcgaaacgcacacagagggagggcaactttccgtatttgcgtgttccacaggccccactgtgagacgtgaatgtgcctggatttcggtatctgctggaaccagtcccacgctataccaagggatgactgcacacctatttctgatgactggagaactccaaggggttcgtcttgacaataccattaacttaaaaattcaataaagattaacaaatcggtggtacactctaagtttgttagtctgtaaaaattgtttctataatataaaatgagcagcacctagataattttggcagagaactttgtaaaaataaatgaacacataaattgtctgactcttaattgtaagatctcattaatccaaagaccaaccaagcatcagctctgttgctgttgattatccaccaaacctctactaacctgggcggaagtcttggcccacacttggatggtagaaagggctcattcaaggaatccatttgtcccattaaaaactgcaaaagaaaagacataatattaattactagcaaggcttcctcggtaggtagaatttgtgtgtgttgggggaaatagatcctactagcattttatagaagaaatttagcttttgattttataaaatactattctaataggtctatgtaaatttaaaataatacgtgaaatgtgttttcttctttttaccatacaaagatttttttgaaaaactgtcttacaccaagctattttacaacagtaaaatcttctcatggttctatttttctgggaactgcggtgtccaccagctgcgaggtgggcccggcaagcaggaccgggagcagggccggggagggccggttccatcgccaggcgtcgctcttgcccgtggaactcaagtgtcttcttggacatgggaaggggaaagagagaaacgaaaaatgcctccttttatgtgcctaaggtctgtttgacataaaattttactttttcctgagtgtattttagcagaaatgttcacatttcagtcatgtagcttgcaaaaagaaaaagaaaagcctcgctgtgaaatcaaaccatctgtttttcaagggagcggagagaacgcagatcccaagggcgtggggcggggtccggaaccggcatatttcatatcttctctctccacgctgcctccccgcccagctctgccggacactttctcctcctgaggagacagaccccgtgcaggaagagagaaaggacgcggggacgggcgcagacggggcctctccgggagctgggggatcggggcgcggagccttccgcccgcaccgcccgcgctcacgtgcgcctgggccagcaccttcccgccgcggtcctgcgactgccccgatcatggtgcaggcctttaattctcgcccactccgcctctctgattgcactcagaacacctttcccaaacagatcgcggacttggaagacgtccagctcttgcccagaaagcaccaatcgaatgggaaagtgcgcaactgattgataatacattttacaagaataaaataaaagaggcaaattgctgaactttcacagatgtgccgggcttcggccaaagagccaaactttcttaaagacgagtccgggaggcaagtgccctcctgcgggcgttccctgccggggcgcgagggacccgcgggccgagggtccagcgcagaggagcgcgcagatggcgcggtccttgccggggagggaccttcgctcgtcctctcgcagggggtctggggagggggtgcaggtcctgcccctcctcgggtggtcagctgtgcgcacctcgggggccgtggagagtcctcacccgcccatctcctgcctcctggccgccccgcctcggggaccagggcttggggacccgaacctggggactgggctcgggcggggcagacccctcgaggtcccgagagcggatccctccaaaacggatggactctaattgacttattaaatgtcgaagcaatcaggcagctccctttttaatagcccaagatctacatttagacaaaaacagaaccgagttcctggtaaaggcgtttcttctcatcctgtcacaagtgacaggaacggagggaaacagactgggggaggggcggggggaggagaacagggggaagaggaggagacggggagtgggggaaggtggggcaggagaggaggagacgggagatggggaaggtggggagggaaggggcgcgggagacggggcgcgggcgagggggagacgcggtggatatgcgggtggggggaccgggcgggggcgggggcggagttgagggggagcgggagacggggggaggcgagagcgaggtgaggcggggggactgacgaagatccgcatgggggtactaacacttcagcggcttctaattaaagccccgctcggagcccttggggacccgcctgacgtcggcgggcgcggggataagaagctccccgaggtctgaggcgggactcggagccggcgcaccccaggtcggccgtgggtccagcgctcggagcggccgagtccccgcgtcccgtgcgctccgcccgccgggcatggagtagtggcgcagctcggggcgcggggacagacgtgcgcacagacggcgacgactccggcggctccaggtaaccggcccggccacgacgcgcaggtggctcccgggtggcgccgggcaggtgcgggagggcgccatggccgggaggtggaggggcttccagcacgtggcgcggccggggccagcgcgagggtccgcacccggcctcctccgtgggcttcggggactcggcgctcgccggcgaccaccgcgcaaaggcgacgctggaaacttgagcgcggccgccgggcccggcgcgcggcgccgccttcttggagagcggtaggcgcgggagcgcggcccctccgaggtccgcccgcggccggggagctgcctggcacccgcggcttccaaaggggaaagaaagttgcgcccgcgccaggcgcagcgcgctcggcggacgcggcctttcgggcgaaagttaggaggggccgggctggcgggcgggcgggttccgggggctcctttccgcaccagcggcggtcgctccccgtgggcgggacctcgggcgtgatcgtcgaggagaccgcggctccctcacctgccggcttgttcctcggggtccgcggaggtgaggggccgggtccagcgccagcggctcctcccgcctcccctcccctcccccgccccgcgctccgtccccctcccccgctgactttctctccggccccccgcgccccttctctcgcagcgagcccagctctcggcgcgtgtcggagtctcccagccccgcggccccgagcgcacgatgcgcggacccgggcaccccctcctcctggggctgctgctggtgctgggggcggcggggcgcggccgggggggcgcggagccccgggagccggcggacggacaggcgctgctgcggctggtggtggaactcgtccaggagctgcggaagcaccactcggcggagcacaagggcctgcagctcctcgggcgggactgcgccctgggccgcgcggaggcggcggggctggggccttcgccggagcagcgagtgggtgagtggggccgagcgcgcccgagggccggggctgctgggaaatagaattgtctttgagaaacacgtttcaaaaagagacatcaattttgaccactgaacagcaggattccttttttttttttttttttttttaagaaaaagaaaatagcagcaataggtccgcgcatgaggcctggcggagaagcgcctggtctccttctggcgcgcgtgagctgcggcgcgggtcggtggtttccacactaaactgtcaaccgtcactttggaaatggaagcatttccagcaaagctttcccaactgaaaaggaagcatccaggctccttcatggccctgcccagagtggtggcccacggggaatttcccaggaaagcatgaaagcgtctaatgcttttgtgacacaatcaggtcaaacatgataaggtcagttttatcccggctgcgtcaagttaggagtgaatgaagactcactagggggtcagctgtggatgcgaatgctcctcttcagagggcgtgacttcacacacagtcggggctcagccaggagccctgaacgggggagtgaagatggagagggctgtaaatacgcaaaaacaaagctgaactcaagaagaacgcccttgcagggttctccccacccactgtgtgcggagaaccctggtggaagaagtttgcttggcagagtctttccctgggattcttaccctacaaaccaggttcatgcatattcccactaatttacacctcactgaaacgtggtcttttaatccttattctaaatatgtatctagataaagtaatgttctgtaacccatttttttgtttgaagggtcaggttttctctaaaaactttgaaatgttgtgggatttgattcccaaggtccttaaaactaaagtgcctaaaagtgacttattcactggaagttaaatgtttaaaagaaaaaaaaaacagttttcttacctctgtaacttcgtggtctctgtctgcatcccacggggtagacarccgacataatcctggagcttcaggagcagttactgttatttcaaggaaaataaatgtccctgatattgagtcttcttcactgtcgtgtgttgcaatccagggccccagtcttttttattttgtgcaaagcaacttggctaatatggagctccaattttcttcaacattcacttaagatcacatttttaaaaaatgcgtccttcaggtaatataatactttcttttccctgaaacagaaattgttcctcgagatctgaggatgaaggacaagtttctaaaacaccttacaggtaagttttctcctcgttcctcacgtctcccagagctccttttcacctgtgagtcttcatgatctgtttcttcttccgtgttccaggccctctttattttagtccaaagtgcagcaaacacttccatagactttatcacaacaccagagactgcaccattcctgcatgtaagtaacagcattggatttttataaaatgcaagagcagtgcaggcagcggttcccctctttccatttcctcatataggcccctgccttcttagctcaaatttgcctattccttcctcactatggagttaggggccaagatcgccagaccattgcagaagataactaacttctgcatcagctaacgccaaactggaaattatttacagtcattggaataataggctcttgggatgggctgaactccgattctcctcctgttaattctcctccaatgcccatgtttgtgtgtactctactatggcagtcagatgttaagaatgagttgctaaactgactccaagaataagattgacctggatcatctccactgctcttaccagagactttttcttcccattggtaattataacctcatcacccaggaatttcattgtgatttcaaaactgtttctctggctggctccatcactccttcagaaatgcagagctgcccttatcaacatagctctcagcagtagctttctctcctgtttcttttcagtcttcctaacctgcttttggctatttattcataacaaaacattttatttctccaaaagtagctccttgttctcttcactgaagccttattagctacagtgatagggccctaacccattttttttaattcggactccaactttgattttatttaaggctcacaggagaaaagtcatgcagaaacactaggcatcctgctaactgctgtcatcagggctctccagctggaccaggcagcgttccggacttgctgtcctgccttccctctccaaaaacaaacaaacgaaaagccaatgtacacgaagtataagtgcttttctttgtttaggcagcaaaattacttcaaataataataaccatcatttatagagctgcttctgtgtgccgggtgcatgccaatgaaccttggcccactgaagtagcgtcaccagcgcgttttggacaaggctaaggcacatgcacttttagcattcacatcaccgcacaaagatgcatggaacgcagcctcggcccctctgaccatacctttagcaacatcatcctcacgccaaggccagcagcacacacttcctgaagagtttttatattcttggtgctgggccccacccttccatgtgcacctggcacactagtactctcctgttttcttcttttggaatgtaatcacctgtttgggaatcattaatgtggctcttggggccagaaaatcttgtcgtttgtattgttttgatgtacatatattttatattacctatttccttacagtaataggatcatagattccaaatttggaagtgacctctgagtcattcagtctcatcttttcatttatggatgaggaattgcttttgtgctgtcagatatcagcaaagctaaagcacagatctcatggttgactctgcaggcctttttccaaggcatcatgctgtgcctgcattcgatacctccttttgctcacagcagctcggctttgtgatactaagctcctgatcacagctcaccctgggccatggagagggagaaggctgagagatctgtgccttgagatgggtggccactttgttgctttctgcctcttcttagcccataaagaactgcagagctgaagttggaccacttttttactgcgtcaggctgtataaaagaaaatccttgggatcctggaatatcagacctgaaggaactttagtgccttctcaaagtgtggtcccatggggagcttgttgggaatgcagaactaagtcccatctagacttgttgaacaaaatctgcattttaataagatccccagatgattggtctgcacatgaaggtttgcaagacattgctgaaaacacctgggttgagcaggatgtggtcagctgggaccctggacatggcccaagtggaagtcttcattgattagatcagccattgaaatcacacattccactgcctccatgatgtggaatctgtttaggaaaactacattctaaaaagcatggtgctgcttatgaaagagaaagccaggcggtcagatgacccagtgccactgtttggccctttgaaaaacattttctgtttgaaaaatccctaacaatatatgccatatttaggaggcgtatttttggaagtagagctggctccttaactaacatatcgtacacatttgtcattgtcaatctacccattcaattcagattttcagttgggtataaattcttccacttttaagtaggattttgttattgagaaataaactgtaataatttacaaactattgcagctttccatagatcttcaccctgaggacatattttcccttatggccatgcccattacaccttcttaatttctataggcagcacggtcagaatagtggaatgggagactgtgtacgataccaaggagtatcagccagcgcttagaaacgggcacattgcttccgctcgccatccactccaggcctctgctctgctgcctgacttttgacccactttctttagaatttacaggcagaaggctttgtcccatggtcaactcaagttgggattcagcctgcacatgacctgaaagtagcacaagggtacggaaggattgtcacgtaggaagcgaaatgaagttatttctgagagaagcaatgggcagccagctcagccatgcagccttcgtgtctgtccctcttccctccgctgccccacttacatcatccgacttctgccattgaagctcaagcccttgaagcaccataaattattaagtcaacaacttagaatgcatgcctgcagattagactccgtattgcttccagggaattcagatatttgaagaaataaatggctttagtagctgatatacttgcaaaaaaaatgcgatttatttgttttttaagtaactgacaagagtctgatatattttcaccgtagactataaaagatgcgccaggcttcttacccggctggctgtcagtccagtgtgcatggaggataaggtaagcttggacagacacacactggagcacataccaaagatgggaatcccgcttgggacatgaaaaattcatgggagtttaggaacactcattctttggctgaagtagccatattctaagtagagatggcacaacactcatctcacagtgctgaaagccaccctactggcttgtctacagggccccggcagctgttgttaactgctcactgcatggcacacgggcactaagtgggtcctgctctgaaacacagcaagtcagccagtgtcagcatgtgactgagtgcgtaagtcaggaacagactaaaattgtccgtttacttcgaggcattcattcattcactaacacaagtgagtagatgaccaacattgtccmtgcaaattcagattatcacatctggtacatgtttgagttgtagtcataagctcataaagaacagctatcctctttaaatgtttctatcaatggtttttttttttcacagcctctaatagtaaaaatgtaaatgcataccacgtttatgaactaaactttgcaccttggccccttgagggctgatatgcaacatttaacaccaaccatcagcggatgttttgaagggtaaggttttattttcctgacacaaatgccacagaatccagtcactttmgacagcaggatgcaactgtaatttcaccaattttatacttactatgtgtcttgtatatgtgggcactgccagatgctggctacaccagcacaagaaagacaggcttcctgtccattgatagctgtccggagcacattcatgaaaagggagtatttttatagtggttactctagtttctctcatgtaaaatggatgagggtagggtagtgctctttcctatatagatgtgctctctatgcagaggcagtgcttatgaatatttaggtagcagcagaagggttgtgtgcatgaccccaacaccggcaggaggcatggcgggtcctgcccatgcatccyccactccatctttcccagtagaagaaactgctgctaatgagaggaatggcactgggggagggaggccagtgggtaatggcgggttgagactgcattttgcacagtttcactgcactttttctttggagatagtgaaggtgtcaatgtcagtcaaagctgggaagtgctgtgtagtaatgtctccccacatccctgctctttccaattctctcgagcagctcatccactgcctatgtgtcgcacagactttcttctgtttaaatcagtgaacagatgtacattcctgtcacccaaggtgatatgccaggggagatgagaatttttttttttttttaggtatttctttataattaaacacagtgttcccagagatgggccagggacatccttggaaattttccacttacttacaagtgaggagagcaaattccccactgtctcagccactggaagagctactccgtccacatgcccattagccgacccctgcctcccctccgctggctgctgctggaggcaggtgcagttacactgaaggacgtggtcatgtcagtgggactcaggctcctgtatgggtctctgcgtgcgcacgtcctgctttgcaaacgccacagtgatgccctgcagaaaagctgtggcagaatccccttgatagtccccagcactcttcacatcactctccccatcaccagacaaccacatcagagcctgactgacgatgagatgcaggtaaaggtaacaagacaaggcccaggctcgcaagcttctgtccccaaaaggccacctgcttgacagccacaggtgtcacagctgtaactgggttcattttggccaagagataggtaaagtttaaaatattgataccctgttaactataatttcataactcctattttttaaagataatttcttcaaattccaaaagttttaaacagcaacagcaaattgttactggtgttaacaaattgttaaacagcaacagcaaactcttactgtggctggtcaccacagtgtagatacagtccgggctttctctgtgctttgcagacctcagtgagacaccagagggcagggcaggtgtcccagggtgcccacactcgtgtgacggtgtggcatcaggcaggccctgcagtcccagttctgctggttaacctgccacatgcacttctgtcctgacacacaaggacagcagggcaagaccgtaaaccatgaccttgtctttgtaaagaaaggcccagagcctgagaaaagcaggcctttagcaggaagggctctgccctcctcacctcagagcaaatccatttgccgcgttctgaagctcattaatagacctcctcaggccaaagagaacaatgtccccaccaaccctccctaacagtcacagatacacttcattgtccggacttacaggtcagttaatcagaagcctgagctctggaatattgtcaaagaaatggagttttgagtagtgagtacatggtgtactctcccaaatgcagcctaatcttagtaaccttgaagtttatcattctttaaaaataaatagaataccaatggtttagatattccaacaaagaatgctagaaacaaatgtctaatctcgattattagctttaccaaccctgtgaacactgaggttgcagaactgccaggttaatccctgtggcctagactactgaggattctgatagcacatgtaagactaagcactcttcaagctgtaataaagcatccacatgtatctgtgatgattttcattgctttagcattgcagccatgtaacaactgcagaaagaaggtatttttaaaaatacaatagactacactttttggatcacagagaaatacagatgcactctgagactgcctatgtttataaacatgttgtgtcccctaactgaagtgacaggtcttctggaattgacattaagaagtgtggatagtcatatcacacgcaatgtatttgttttcagcagtgagcagaccgtacaggagcagcacaccaggagccatgagaagtgccttggaaaccaacagggaaacagaactatctttatacacatcccctcatggacaagagatttatttttgcagacagactcttccataagtcctttgagttttgtatgttgttgacagtttgcagatatatattcgataaatcagtgtacttgacagtgttatctgtcacttatttaaaaaaaaaacacaaaaggaatgctccacatttgacgtgtagtgctataaaacacagaatatttcattgtcttcattaggtgaaatcgcaaaaaatatttctttagaaacataagcagaatcttaaagtatattttcatataacataatttgatattctgtattactttcactgttaaattctcagagtattatttggaacggcatgaaaaattaaaatttcgrtcatgttttagagacagtggagtgtaaatctgtggctaattctgttggtcgtttgtattataaatgtaaaatagtattccagctattgtgcaatatgtaaatagtgtaaataaacacaagtaataaatgaagtgtttgttataatgactagtcttcaaagtgactctctacctctttaacaggttcactgttgggaattcgtgacttctgatttactgagagatcatgacactggcaaaaggtcatagaatatgaaagccataaacaaatgaaaacttgaagcctaagaatttctctaagggataattagcattttttttaaagtaaaggctactatatattggtgacataatttcctaagatagtccctgatttgctgggaaatattccaaataaggttgtatccattatttcccaagcgattttgtaatcatgaaawtgcttaactaggagaaaccttaagacttctaagcagtctcagaattttagatgtagatgtattttaaacaaatctaattggatccaatttaaaaagctgaattcggcaaagcaatgagtttctccattcatatgagcccttgtcggcagatggtatcgtctgggtgtagccataaggacagaatagtcaagagtcctaggatttgtttgaggatctgtatttatagagataaacattaaagaaaaactataggattttatttccaaacataaaggaatagaagagtaagaaattttgactttgagattaaaagcaattactgaatgaagagaacagggtgtaacttttgaagtgctcttatttaatcctgttttctaattacagctcattacttgacctttccttccccattttttatgttttaaggatttcatgttcaaatatccaatctattaatatttaatcccctcagttttctgtatgtctgagtaattccaacaagagcaagactcastgggtttgcaaactttcttcctatgaagacagcctggcacttccacatggtacagtggggaaactactcactttcatctggcaacagcttatcctccagatactagggagtcaaggatcaaacgtgtctcctccccatggcactgcctgggaccctcatgatactgaggtcaggagtgcagatgtcctggccaggcagctgtgcatcactgcacaggagggcacagcgtagaggcaacatgtccagaggatggtactgggcaaggacagttccagctgtagaacctcaaacttccttcagaaactagacatgatgacatggggcagcaatgtgcttattttcatcattttacttccttatcctgaagataaaatatgcacacctaacatcacagatcatgtaaaaaggacaatacaatgttttcaaatgcttccttacctgtcaataaaaaaacaggcagacaccagatttatatctctagttgtatttttataactccccagtttattttgaaatattcatgattttgacattatctcaaaatacacagaaattaccttacatctgcctatacatttattaaatgctgatgaagaatacttattcaatatttaagcatgccaaataataacacttttcccaacttttaaaattattttaaaaaataagccaatttatattggacatttgggttacatgtgcatataaaaacagtcatattcctcaactgaccatagactagcatacaagtktcctyctttctggatgtaattaagtttcagaggcaaagtggttcagatkggagccaatgggctgacctcctcatgaagtaaactcgacaaaaatcatgaagtattgaaggtgccaacgactgattccataaatgtttctctcttccctatcttttcaatatacaagtgtgcactatgggtgtgtagaaattaaaacacttctaatctagactgtgagctcctacggaggggactactgtcaatccacaaaaggccctagggaagagagaggtagcactggggagcagagggcacctgccctccaggccatccacacaaacctactgaagaggtagactcgattatctaagtctcaacaggcttagatgttgacctgggccttcaagtgaggttttccttcattgttttatgttgcttgttctactatttttgtaactggggcaaagtgagatgttcaactagtctaagaatgcttaaaataccccataagctgtctgaatcaaasatttttattgattctcctgccaaacacaactgatttccatctacaattactttttaaggtaagaaacagtaagtcaactgaacaaagagctgggctttgggccctggaacgtgattacacaccgactgagaaatgcaggacctcagggtggggtctagtcaggctggcygcagcagggcaygaacctgcctcagtgggccttctccaagaacgctctgcagcacctgacacactgctggtacaccgtctcaaagtcaragtcattyccctaaatggacaggaaaaagaagaaaatggcaaaacctgcataacaaaaacatccttaacacaatctcatctgttatttaatatggcaggatacaaatgtgttgggtcttcatattagccctaaaacgtgaactgtacttacataatagggatcttcaataataagttgtttttgtggatcatagctcccaagtagttcaattttagctttgcaggttttaactygattactttttctattcaaatctctgtaaaattgaaatatgaacttagttttctgatctacggtttcaagttaaacagggacatctgctagggtgttctgaaacatccatatcaaaatcaagacagaatgacctaatttgaaatgaaacggaacactcagcaggcccgtgtggccccttctgcagctgtatgccactgccctctctctaggcaagacagtttgcgacagcagcttattctcactgattctgttacacaaaatatacaataattatattttctcccacaaaatacattttaagacaatcaagtttcagagataaaggtcatagaaaggaacccaaaacaccatctgaaccagtcccaaaacagagggctaccaattccatcctcaggtgtcttgacacagcacttcccacagcacgacccactccttaattactcttccatcttttattccttaagcctctgcccaagctgaaaactcagcttcactctagacttccacccttagctttcacattgctacaaaagaaaaaggcaaacttaactaagcgcctccatttatttaacaaatttcgactgagcacctgcgacagatgagttgatgagtcaggtacgtgctttatgtgggaacggaacagccaagagctcccrtgcacgaagttttacagctcaggattaggtgcaggaatgagaactgcaggcaggcctaagtctaatgcacaatctggcctaatgacagggcagcagaatacctctatcaagaaatgaatttaagctgacccacgaggggcaaataggagccgaatgacccaagaagcaaggaggagcttccaggcagaggaacagcacgtgcaaatgtgaggctgcaggaactccacttgccccacacgcaaagaaacacggtgctcagtgccagtcaaagcaaatggggtctcctaaaaaggtgtttttacgatgcctatgggctatggtgtcagcaaaaacaatgagaacagaataaggactgaaaaataaaaattaaaaaatacatgcattttaatgaaggtcctaattaataaaaaataattgaaactggtgcatccctatctgttcatttgtacaaaagtaattaaaagcacaaatagtttatcttcatcaaaaacatgagatatttatgaataagtagtgatgcaagtcagaatcctggagtgacattaaattatgatccgttcccgatgacgccttgaacatgggactggggcaggtcaggagggtggtgactgaggcaggggtgcatacagcagggcccttcctcactgagcctaggcttaaatcccatgacatccaccacatgctagctgtgtgaactcggggacataacctaacattaccgtttctcacttccttcttttacaagatgggataataataggaacctatggttgcagagctttgacctgagaatcaataaaacactgccctgcccaggaatcattacagcaaaaatatcaaaatcgttctcatgcagaacaatatgcttgatacaaaactataacagccaagctagttttccaattaaatcatgctattaacaactagactttcccttttctaaggtgtatttccttgtaaatacctaagagacaattctagattactaagttttttgctgttctaaataaaataattctacatatggtgaccatcactgactattaaaacctttaaaatagaaaaagtaaatctggacaacaaattacttggcccactgctgaactgagagttgaacagaaatattcttcaaaaacaggattacctcagattgctttcatccatacatagtatataatcaaatgtggcaaaatcttctttggtaatctaaaattgaataagaagtcaaaacacagtgtttataccattcaagcctagaggatgcaaagcaatactaaaagaaaaaaaaaactgctgtatttgagcctgttactcactaataaacaattaaataatttttagggtacttttaagttaaaatagagttaacctatttctcaaaattgtactgcaaagaaattttgtattataaagttccatacaataatcataaaatagtataatgtgtagacacaatgtttatacatcggcttcaattccttagtagcagtgtataatacagtcaacatactaaaatgtcacatatttaatccccttcattattctactctatttttcattccacaagcactgaacatcctgggccccagtaacaaacaccaagctaagtggacagagccgcgtcccatggagctgcccttccacatgggggcaggcaacacacaggaggcacagatgccctggaggaaataaagcagagaggagatacatacagctttggggcagggaggagtaaaagtattaagttgggtggtcagaggtggtcactaagaaagaaacacaggagtgataactgacagtcctcctttattttgattgactatccataatttaaacctcacacagaagagaatgccactcagtatttctactgattgtaacctgaaagcttatgattgttttctgatataatctataaacacacctacttaaaatacaaatgaaaagattattttgtgaatttcgactactataaataatggcagaataagaaacataaacatacgtactgcggaacaaaggtggaaagtgtatacctgttcttctaaaaaatgagaaactttggcttttagtatgcacttccagtagctagaaaagactgtatttcgtcaacactcccatgacattgacttatttcaaaattgagaataagtacaatactgaattttttctttttgtttttagagaaaaggtctcactctgtcaccaacactggggtacagtggtgtgatcatagctcactgcagcctcaacttcttgagttcaagccaacctcctacctcagcctcccaaacagctgggactacaggcatatgtcatagcacccagctaatttttaaaatttttttggtagagatgggtctcactatgttgctcaggctggtcttgacctcctaggctcaagcaatgttgagcctcccaaagtgttattaggattataagtgtgagccaccatgcctgaacagtattatattatttctccaaattagttatgtgagaaattccctaggatttaatactaaacttgttttaaattctggactaattgtaaatttttcataaaaaaagacttagtaactgttacataatttttagatgttacaataattgagaaagaaacagctataacttatgtaacaaatgcacaataaaggatttccacttgcagctataaatgaaacagcttgtggcaaatcacccctactactaaaaacaactagaaacsccatataaaaaaccagtgctgcagagacagtcgggctttgtggccaccaggccgctctggctgtgctgctctagcacaaaagcagccgcgaactacaggtgaatgagtgagtctggctgtgttccaacaaacactgttcataaaaaaggtgcctcaaaaaaaggtgcaggccccaatctgcagactcctgccacttgccacttctcttcctgctaaaactggaaagtgatgagacctcagaacagggatctcaaacggttcagtagcagaactcttgaactctgtaaaattatttaaatcctatgttatggtttggatgtgtcccccaaagttcctttgttggaaacttcatccccaatgcaacaatagtgagacgcaggatctttattaatgccactatcttgggagtgggctcctgacactgatgggtcctctctctctctctcctctgtttccctcttcccgtttttctagttctcgctctcactcactctggggcactctcttgactcctccaccttctaccacaggacgatgcagcaagaaggacctcacagccccatgagccccttggctttggacttctccaaataaatgtattttcaacaatggccagtagaaactggcaaggtatgcaaatcctgaagagatgaggatggataaattgtataaaaatgttgaatcacctgaccaacgaagattccatttccgaaaaggtcagtcccagagtacttcatttaaataaagaactcttagaaaaatcaactttagcttctaatttataatataaagacaaggttatcttcaattgaaattgcagaatttgattgtgactttattagactccaaacttaagtgtggcccaatagactataattatatatccataatgttgctggtattaccctatattactaaggcactttacagttgaaaaaatgtttttgtatatattatataacctcattctagcaacaaacttgcaatatcagcaggatgattactatggcctaaatgtttaataaaaattatgcaggaaggaacagaagacagagcaccgctcagccccagckcacagtcaggctctctcattataaattacctagcttttatgtgcattttaataagtaaattccaaagtcaggcaagyctttcaacaccgtgcaaccagaagtgaaacaaaatggacacaccatagctggttaagctcaccctaaataaacacattcattaatatacaagtctggttaatcctttcgctacttctcaagttactggactctatatattagaaattgaacaagagcttgtctacctgtcttgctttatgggctgtgtgaatgccatgatttcttaggcagctcacagctcttgggtctggggaccggcccacgttccagtcagaaacagcaccgctrtcaatgacccactgaaacacaaaacacacaacttcaagtccaaggacggtacctgccgggcaacgtggctcatgggaatgccgtgcctcttcakgcagctcwgcyctyggtagtcwggggggttccctatctcatacccggaagttgccgcrctgtctaccctccactgcaggggaagaaacatggaattttttttttttttttgcaatttcctgcccagaggagttcaggttggcctctttaagatmmtgaatggtacttacattctctgagatgttttgatcggttacaagtttcctgaaaactgcttctgcaatgggtgatcgacaaatgttacctttaaaaaargggaggggtggggaaacagggttaggttggatggaagggcacatgccagctccccttytttacacacctgacacacgggggctgtgctatccctcaggaaaaacaaaggccaacactatcctttgacgcctttgtccaaccagtgagggtagaccctgctggagaacagcctatcaggctcaagttcagtgatttgacaccaaccagccaagtactccaagtacagatgacaaagatatcagaaaaacaatttcaacaaaaattattgtttaaagagttgctactaatgatccaggagtgaatcacgaaaatgaagtgggttgcaaccagcttattttaaaatgaaatacaacagaataaaaataaaatacagtggtctgtccctcagtagactcaggagctggttcaggacaccctcccacccctacccagtataccaaaacgtgcatactcaggkyctatagttggcccctgagaatgtggagcccaagtataggaaaagtcagccctccatacagatgggtttctcattcagacaacacggtattttccatctgtgcttgattaaaaaaattcctcgaataaatccttcaaagttcaaacccctgtggctgaagggtcaactgtatgtattttcaagtatatcacacataaggatgactactgtttcacaaaacaatacacaaacacacaaacatgcatttaagcataaacagcgattcaacaccaacatttactgagcgatcacatgcaaagccctgagcccagggatacagatccaggcattagcagcccaaggtcagggacaccactctccagaccacgatgtcgacatcagggccatccttactttagaccagcaagtgagaaatccaggttccccagggctccctcaggtttgataatyccctagaattactccccaaactcaggaaagcagaacacttaccattacaatttcattatagtaacagcaacaaaaacaaaaacaaacaaacaaacaaacaaaacagccaaagcaagtgacctatagggcacattctgggaggttccctaacaggtagctccactgtcctctgggacaccttactctcctgtcatcaacatgagacaatattcaaagagcactgccaacccaggaagctcctcagagccatagtgctctgaggttttattggggttttcggagggagacacaatgggttgaatcactggccattcagctgaactctatctccactttatttattatatttattataataaaagtgggaaaatgaatgctgataaacaatacactacagcagcacagaaaaagaacgatgctacaaagcaaaaacaagatataagaaaatttcttaccagaaaaaagaaagattagagatgatattaaaaggatgatcaggatcttaatggacagaggaagggaaaggcatttaactcagagggattgtggcactaagcaggtgaggctgcgatgcttcaggtacagagagccagtgtctggaaactgacgggctggtatacaggagccctaaaacactgggccarcatttgaactttgcgtagccactatgaggagaaatagaaagtcctatggaaaagggtaatatgacttattcaacaaacatattttgtatgccaactctatgtgccaagcactgtgccctaacctgaagacagaaagttgtttaaaacacagacccttcctacaagttaccaaaattaccggcacagctaaggaaacactagaagagcacatgactgaattggagagaccttgtaagaggctcgtatgaaggagcaaatacaagacagtgtcagagtggaaaggtgtggcagctttcctcacccatcataaaggtcatggaagatactcctgtaacaaaagacaggttaacaagagccttcagaaatgaagacccaaagacccagggaaacggttttgatgcttagatgaccaatgcacagctgtgtagaaatggcactggacaaaaggaaatgatccaatggtagcagactgagggaaacccagcaggrccacagcatttcctcccccaggaatgaggcagggcccctctgaaatgctgtcttcaagagaaggcaaaagggagagagtgatctttctaggttttatggcttgctttgcaggagaggagttctagtttctatgatctgcgctggggaagataaatgatggtttctacgaccttgcttctggggctgctctgaggccttccagtctccttaatgccaaagcaccacactgagtccagacattaggagctgaatttaggaaacagatacgaaaaagaggaactgtgagaataggcagcactaactaagagtttactctttatcactattagggtcttctgtttatgataaacaaatacaatgaggatcttctagtgttgtaaaacacagctaattccctagttcagaaaaccaactcactgccttactacagccttcagtttctacattgtaagacctaagcatattaygtacttttttcccacagagactgtagtttccacagcagtaaaaaatcttacctacaamcsataaagggaaagacaacaaattagccttgaataccctctatatgctaatttgtgttgtgaagtttttcctttcgacattctaaattttgtttagttttctaaacaggtattgtcatcagcactattttaattattgaaaggcttcccatgggtgtgtaactcttttacttgtcaccatataccctgggaatatttttaacagcaaacattgtattccaaattaagacaattattattttggatctgtagaacaacagatgcctagtatctcagcatctaaaaatataataaagactagccccacasstttacaaataattatctttaactgtaaaataacagcttactttccccacaacaatatgaaaacttgcattattaactgtcctaaaggctagcagtagcttgccctgttgatttcgaaagttgatgccaccaaattttgttatgaaaaaatggagcaccccggtcatcagtgaaacactgcatgtacttcaggtttcgcctatcaaacaagttctaaaaacagaacattccatcttcaaatgcctttaaaaaatgtttcaatctgtaaagtctcaagtttgtcttttccaaattaggcagactattttatacccttcttcagcatcttcaattcaaggatggagactcataaaaggcagataggctctgggagggtggggctgtgtctgctatacctggtaagagacccagcacccagtatgggtgtagcccagaagtaaagtgactccaccagcatgtgctatctccaccaaccatgctggctgggtcatggctcctgcatcatcttcactaataagtctctattgcaaaaacataaagcacccttcataattgtgctgtagtaaggagctcaattattttccatcattagcttcaccaatgaaaaacctctgatgcttttctacacttcaatctcamyagggtccaaacaaatgctttgaatgaacaaagttttttacatttcaaaagcatacaactcttactgtcctctatatggctaccaagtaaaatgccatttaccgctcaaattccctcagaatgcaaccagtaaaggcatgctccacctccagtttcatctcaaaacaacagctgaaactcttcttttttaaacttaaatttgatcacttcccacctctgctcaaaaccctccaatgtttattcagagtaagcccaagtcttcacatggcctcccaagatctggacctaaaacaggggtctgaaaatcggctcatggwccactgcctttatgtacagcccacagcggtaagaataatttttacattgttgagtagttggaaaaaatctaaaagtagagtaccttgtgacatgtgaaaattatacagagttccatccaattctgatgtccacaaatgaagatccactagaacacagccaggttcatcatatggatggctactttgtgctacaccctttctgtatgtcatgtgaagccaatctaaaataattataatctggttctttaaacaaagagtttgcagactcctgccctaaaggaccagtgtatataaggaattaacttctccctatacatctacaatggaagcactgagaaaacaggcgctcaaattatctgctaaattttcaggtatagatgaggaatcctgactgagaaaaactatctggccactaggcccagccactgcagcttccctgcggttcatgaccatggccagtattctcccttcaaaacttttacctgctttcctctgggttcaggatgcttctccaaaatatcctaggcttgcttcctcacctccttcaagtctttactcaaaagtcatctatcaggtggggccttccctgaccatcccactcaaaactgcactccactcccattccccttttctgctctatttttcttaatcttcacatcaaccgattgagcacatcaattaatacttgctggtgactgagagaacgtgagctccagagaggctgggatttttgtctgttkkgttcaccacaccacttagaggaatgcatgccatatagtagatgctcaacaacaacaaaaaatcactgaattgtattgaaatacaatagtcccctcttttccaaggttttgctttccatggttaccccatggtcagcttcagttggaaaatattaaatgaagaattccacaaataattcctaagttttaaattgtgcactgttctgagtagcaggataaattctcatgccatcccattccgtcctgccccagaagtgaaacacgtctttgtccagcatatccatgctgtctatccacctattgccctctagcttatcagatccattgtgatgctatcacagtgcctgagttcgagtcacccttagtttactaataatggcccsaaatcataagartagtgaagctagcaattcagatacggcaaagagaagccataagcactacccttaagtaaaaaggtgaaagtttttgacttcttatggaaagaaaaaaaaaacttataccgaggttactaagatctacagtacgaacaaatcttctatccatgaaaatgtaaacaaggaaaaagaaattcctgatcgtctgctgtcttgcctcaaactgcaaaagttgcgaccacagttttaaatgcttagttaaggtggcaacggtattacatttgtgggtgtaagaaacgagcagacacatgttccaattgacagsaattgggtttggtactacccacagtttcgggatccactggggagtcttggaatgtatcccctacagctaaagtgggactactgtatatgcaaggatacacttccccattaacagcaaccatgatgcattatgccagcataatcgacaataccaaccaaaactatacaagggaatggaatattatttagtaaccatccttaaccaaactactgtttaataaacttattgatttcatcattcagccttcaatgagtcttaaaaatcaaatgatgcccactaccaatgtgaaacaaggtaagccttctaattcgtctttcacagaagttaacttctacaaaacctagtcagcgtttatcatatattgtcctaaagctgaaaacaaaatgaaaaataagccacagttattgccatcgacaaaattaaactcagctgggatttcaacagactatcaaataattatagtaaaatttgtgtaataaaagatgtcgataaggaatcacaccttttctgtattacatcttttactatattacacaaattatagtaaaatttgtgtaataaaagatgtcgataaggaagcaactcatgatctgggaaagcaaaggaggaaatatttasgtttgactttataaaataaaaaggctttccaggcaaaatgcataatgggcacccagcgatgaaggctcagtaagcatgtgaagtgctaccgaacaacgaaaggttctggaaggcagtgtcccgagggtgtgagcaggaaaaggtacaggagataaagtgaggagtctgtaaaaataaacagaaactgcaggaaatgcaaactcacagaaggttttaagtaaccggactactgacaatttaggccttcctctcagggtggaggcaccgaggaatataaccttgtagtgctacaccaaaggaagatccctgaagaccaaacggaaaataaattatgtttgaagtaaggcaagctaagtgttgaaattctaggagtgaaataatttaagctggaaagttcctgaaaagccattaataaaatacactttcatttttcatgggccaaagttatatagggacctccaggtctcctttgcttggcttttacaatcaagaaacccgaaaccgtaaaacttcatctccctttaactcagatccctatctaagcatgggctaaggaaactagcaaacaaaacaatgttgtcataggactcaggaggcccctaagagaccacatcagtccgacaacctccaggcctacctgggcccattggaggggaacgagagggattctagtagtcgcaaagaaagtaccttggcttgtaggggctgtggctgcagatgccaagagscccggatatatggcaggcgcgaggggacccasgtttagcgggcaggctgggcgggtgcacggggcggatggggaacaggggcgctgyggcacactcctagaacaccctaggcctcccagtccctggcctcctccccctcatggttcctagsscggcggcacaacctacagcgcacaagcccgatccaactctccagaggacgtcagaacatgagtaagtcggcrccctcttacccagacacacaaacagcacggamttggtagcctgttccgccatcttcccgcgcgcagagrcgccgagacaccgcggcgttccgcacgccgacgcggcgcaggcgcactgccascctcttgccccgcgckcctgcgcagtcccgcaccaacgccaacagggcagcgcgtgtgagagccacgcctgcgcaatcggctccagtgcgcctgcggaggcggtcctatgacggtagtaggacgggcggggagggtccgcgggtcacctgcagggactgggccgccgttcacctgcaggggcggggctgcaggttgtccggaggaggaggagctgcgggggtggggtcacctggagggagtagggccgcggaaggcgagggggtgtgtgtgtgtggtggcgggggttggcgggggggagtcacctggagggggcggggctgcgggtcgcttggaggggaaggagccgcgggaggtaaaggttacctataggggacggggccgcaggagaggggtacctggaggaggaagggccgcgggtcacctgcagggcgggctcaggcctcgcggctccgcgggccgcccacctgggttggggcacagcgcgagtctcgcgcacgtggcgggctgtggtgcctgtcgttcgagttcgcatagaggggctgggcgggtcacgcggggaacctgccttgagccccgcggggtccacgccggaccagggcggccttgggcctgggcgctccctgagacccccacccccaacaccgtgcttggagccgccgcggggctctgggcttttcgatcttgaggacggggcggttccgaagtccctgagggcgaaggcctgagcgcggcccggcgggcgcgtggtttttgtcccgcgaaacgtacacggcgggtgttttgcgccgcctccttcgtcacctgccgcaggtacgccctcgctggggcctccttgtccgcggggcggggcagcgcgccttcctcttcctgggcagcctcgggacggggcgccgcggccgggcgggcagcagtgagtacccggggacccacctgtccggcagcaccctcccctctcaagagctgggcggtggtgggaggaggaggacgggaaaaccggcgatgcctctggggtttctaggtcgcgcgtctgttaaccgcaaaccgcccaaagttaagatagagcagcttccaggactttcttgaccacagcgattttgattgaagtttagccaccgtcttttccatttttagaaaagctattccgaagtttggaatgatgacgatggtcgtgttatttttaacttcctgatatttgaacggcgaggtgtcagcgaccatccttccgttccacagaagcgtctctgaagtttgggtcgaatgcgcgcgcttggaatgtgcgtggaacccgcggcaggcgcggggaggaggccttggctagggcgccggcgaggttcgagtttgccagccccccaacctggaagagaagggccagcccctcacacccggaagggaagggccggtccccccaacacctggcgccggggtcgcggggccacagggcgagcgcggggtcgcggcgagcacgggtcctctctgatcgctgggccttggcgctggctgctgagtttttccttctttaaggaagtgtggaactggtctcaatcggttgaccaccttaaggaaataggatttacactgtggacagagatgtgtcctttacacttcatttgaaccaatatgcccgtgctcctgtggaggctgagttggaaagtgacacgaagctgcccccccgcaagagagcaggtgctcggtttctcttctgcttacaggagatgcatgtcctgatttcttgttctcctaggtgtttttattgagatgtagggaatatctgaattcataacgacttagaaaatctgtacacacagttgagagaacaggtctcgaggctaaggtgctgtttactcccgtgggctggcctgttattaaaatacttgtgcagcgactgatgtttacaaattactatgttggaggttaaaatgatcaaagtgataacctccatcctgtctatcatgtttgaggagaattggttatttggttcactaatgttctgtttaaagaaaatttctgtaaaactagtaaatgttacccctcatcttttgtaagttaaaaaaaagtttaaaataatgtttgctcatcaaaagtgatttgatacttttgttctgtttaggaaaactttattctcaagagatttctcattccgcagaaataaggatctggcatgtcaacacaaacataggaagttgaggcagtcaaagggaaataactgctaccctgactctgctgagagcctcacaagtccctgtgcacgccagcttgtttgccagtgagtggcgtcatgataagacaaaattctctgctctgagacctaagcacatgaagtttttaaaaaaattttctctgagaagatcccattttttactctaaaagatcagaccagtgtggcatgtgtggaactgctctgtaccaagatcacactcttcagttggagaagaggaagggcaggaataaataaagggctttcctgtctcccgagggagcagagaaagctttcgctgtcctcttccttccccagccacagcctggggttgggggactggaaacaagctcaggctagcacttgatgttcagacggtagtctgaaagtttgactagggagttaatgatctgaccagagagacaggtttttattttgagaactgacaagctttgtgtccttaaaacaaaggaagtagttaaaccaaggccccagaaaggtaagaattgacttaagaaacaaaggccatagttgtcaagcagtggagttcaaaatgcagttttgttaataaaagtagcttaaagcaacatttgaaagcctctctaaagattagatacatacactttcttttggctaagatttctttagtttattctaaatatacctttagcagcattcaagttcctttgatcttagatggaattttatcagtttaatgagttaacctccatttcacataaagtataaggtttaataatttgattaatatgtaatcagtaagaacttggaaaaccaaatttagtaagcttgctttcctgtaagtattcctttcataattagagtccattgaagaaaataatataagggaagcaaaagtttgggaatctgaactctggtaaggaaagtggtggagaggggcccttgggtcttcttgctttcattcctgaccctccgtgtacaactagattggaaaccgtagtcagctttgtcacctcaggtggcaatttactccgagtaggattctcatgtccctgtttgtccccagtgactctagcattgagtttatagaactgcgatcaatacctaaaattatttccagatcttaagctgatttatgcttttgaggtttccaaagtaaaaattgtctttccggtattttataagaccttctaatttaaaaaaaaaatgtgttactatgaaaatttaaaacattttaacttttgttttaaagaaaactttatttgaaagtttcttagcttgaggtttggcagccactctttttttagaaaaaacttaaatatttatagagattttgcctgattcaagggacttaagacgtttatgagagtgcagatgctaaccatgatgtgaggtttaagaggcttcattagtaatgacctgtgtcttcatcagtatgatagaatgggacatcagcactctgatcaggtcatgctctatatgccttatggtacagcagaggaaaaatgggtgagccatcatttgatgctgaggatgggatttgaggcttatgtctaaatttttatttgcatattctttttgttctgacagagaaattcactgcatgtaactatgaccacgcatgattttatcagaagttgattagaatctgtaacattttctgtagttcagctgacacactgaagatgtcctcactgtgaccagccttgtcaacagctggatcacagtgacataagctgtgtctaggatgagtcttgcggtctgcagccgtgtgaggctgcatctgattcccaagtccaatggctctcttcccgtgtttacagatcaggccatgacctttccctacagcaggatgtttgcaagattaactctcaactgaggaatttgcttatttgctctaatactgcttggttgagagagttcaaagtagaaagtcttctgaggggataagattcatgtattatttacagtgcttcagttgcatgtatcagaaaatctagtctaaattgctttaacagaaaaagatgttgctggtccatttgatgaagaagtccagagcggcttgtgacttcagtctggctttgcagagcccaggtgctctctccaccttctgccaggttcccctaygaaggctttgctctcagactctccccttgtggagacaaaaatcccacagcaagtggaaacagaagtgccttggaaaaagttattctggcagctcctatacaagtcccccatcagatgctggtattggaccagctttggttataaagccctgctgtggcaccaaaaggaatgtcgtcctgatacagcagcctcgggtcacccaatccactccagatactatggctgcagcatcaatgtaagcagacaagttgtgctgcctctgaaataaagtagatgaaatattcagcagcagaaagaacaagtttccactccagtgaactaattcaaatgtatccagcatctagatatatgtataaatgtaattaaaacatattgagcatctagagcatctctcccaagataattaccacctgatagtaatggctataaaagctaaaagtggaatcagtctacatgtttcgcaataggaatcaattgaagcatacatcaaaatgcagacagtagtattggtgagtattaatgttatagatgctttttatccttcatattttcatatctgtactttttcctgtattttacaatgtatttgtacgttgtacaaataattgctgatcatgtaaaaatatagaaatatagaaattttgttgccatacttgggtcttttccactatgaaattgaaaaaaaattctataattcctggttcttttataatttgatatttgacactctaaatcttcaatgaatttggagtttatctttctgtaacacaaagctgtgaatgaatttttgtttttctccccaaatgaacattatctagtwtgcaatacatcatttcaacatagaattgaggtgtcatttttattatatactaaatttgtaaatatatttgggttaatttctgaattttcttctttgtgaattgatttttctcctatatttgcatctgctattatgtattaattattgaggctttgtaatgtgtcacaggttctgtcaaggctgggctgtcattgttctcctattacatattttttcctagctcttcttgcttgtttattttcccatttgaacttcaaaattactgtgttttattaaaagacccttgtaagatagaagacagatttgatttcattaagaaaaaacagaaaaaaaagcaaattcaaaagacaagtaacagagagtcaatgtttttaactcatattccaaaaaaatattaatttttaatgtataaattaataagaaacagagagaaaccccctgtaaataacaaggtgcatgagaaacctttgatagagacagtgaaatgtggtcagcattgctcatcataaaagaacaaatggaaaatgcactgagagctactggccagggcagcgaaatggctcctgctactcacacatggtaaacagctaggaaactggacagctgtgtgtagagcactttttgcacatggtggacatgtctgagatccacaagataaggggaacaggaggtgaactccattagtgaccgttttctgcctggagcacttcctaaactgcaggacaaggagggggcacccagagcccaggctcctgcttaaaagaagaggcagaaattgagtctgaagaggctgaggtaactggaatttgcagagcatgttactagcaatgagggacggctgagagaaagagctccagaaatctgcagagggatccccctgagccttctgctgaatattaagtgctagctgtgtagggtgaaatttgcaaagcaggcaagaacaactgccatgaagctttgaggtgaactattcacagtgcttgcatcaggctggggacagccattcgaaacagccacaatggagacagcttattaaacaaccagggcacccaggagagagcccagaagggacacaccttgatggataaaatagttctaaaggctactctagacacacaaacagaacacaacaacaagccaacaagtgatcaagctgatctacaagtaactcactgcctgctaacacaagtgttaacacttttaagggaagcaatgaaatctagkcactcaacatggtaatatctacaatcctgttttactagaaaggagtaaaaacaggaaaacataacccatagctggaagaagaatcagtcaaaaacagatcgagaaatggcagattatacaatttaaaacacctattttacacaaaaagaataaaatacctaagaatacagctaaccaaggaggtgaaagatctctacaacaagaattacaaagcactgctgaaagaaatcagagatggcacaaacatggaaaaacattccttgttcaaggataggaagaatcaacattattaaaattgccatactgcctagagcaatttatagattcaatactattcctattatactaccaatatcattcttcacagaattagaaaacaaaactattttaaaattcatatggaaccaagaaagagcccaaatagccaaggcaatcctaagcaaaaagaacagctggaggaatcatgctacccgacttcaaactatactacaaagctacagtaatgaaaacagcatggtaatggtacaaaaacagactcatagaacaatgaacagaatcgagagcccagaattcatgctacacagctacaatcatctgatatttgacaaagtcaacaaaaataagcaatggggaaaggactccatattcaataaatggtgctggaatacctggccagccatacacagaagactgaaacaggaccccttccttataccatatgcaaaaaaacaattcaagatggattaaagacttgaatgttgttaaaaacttaagccaaattaaattttaaggagtttaattgagcaatgaatgatatgcaagtcgggcagcccccagaatcacagcagattcagagagactccagggatgcctcgtggtcagaacaaatttatagaccaaaaaaggggaagtgacgtacagaaatcagaaatgaagtacagaaacaactggattggttacagctcatcattttccttatgtgaacacttagcagtgtatgagtggttgaagtatggctgctgggattggccaagactgagctattgttacagatgcatactcctaagttaagttctcaatcttgtctacatattaagttaggtggcagttcatctacaaggactcaaatattgaagtatggagttcttctcaggtcacatttagcctgttttaacaatgtaaaacctaaagctgtaaaaactctggaagataagctaggaaattccattgtggacataatcgctggcaaagattttatgataaagatgccaaaagcaattacaacaaaaacaaaaattgacaaatgggacctacttaaactaaagagcttctgaacagcaaaagaaactatcaacagagaaaacaacctacagaatagaagaaaatatttgtaagctctacatccaacaaaggcctaatattcagaatctataagaaatttaaacaaattaacaagcaaaaaaacaactccgttaaagtataataataataataagtggttaaaggacgtggacaaaagatttaagcagacactttacaagatatagaaataggaaaaagtgttcaacatcattagtcatctgagaaacgaaaattaaatccacagtgaaaggccactgtgtaccactaaaataactaaaattttaaaaactggacattgcaagtgttggtgaggatatggaataaccagaactcttataaaagtttctgrtggaagcctgaaatgtgtaatcactttagagaactcttaggtggctccttacattgttaaatacacatttaccacatgaactggcaattcctatcctaggtaattacccaagagaaataaaacattttttctttttcttttttttgagatggagtttcgttcttgctgcccaagctggagtgcaatggcgccatctcggctcactgcaacctccaccttccaggttcaagtgattctcctgcctcaggctcctgagtagctgggattacaggcgcacgtcaccacatctggctaattttttgtatttttagtagaaatggggtttcaccatgttagccaggctggtcttgaactcctgacctcaggtgatccccccacctcggcctcccaaattgctgggattacaggtgtgagccaccgtgtccggccataaaacatttttttacaaaaggcttacaaaggaatatttatagcagttttatttgtaatagccaaaagctggaaacaacccaattgtctatcaacagtgactggaaggacaaattgtgctatgtccacacrttagaataccagttggcagtcaaaaaggaagagctgatctgtgcagcaatttgagtctcagtaatttcatggtgagtaaaataagctagacagaaaagaacacacactgatgactatatgaagttctggcacagacaaaattcatacttaatgacagaaatcagattggcactaacctgaggcaggggctgggtataggagtgaccactacagagggcacggatgctgtgatcaggagtggtctctacctctgtccatgcacactgagctatacctgtaacaggtagatttcattttgtaaattgtatctcatgaagttgatttgaaaagcctacactgagaggcagtattttaactattctgagataacattgattaaaaaatgcaacatgccaaaatacactaatgctgtgatgccacttgtttttaaaaggagtaaagagctacacacatgcatcatgcacacttaattttgcataaagtatctgtggaaataccttcctctatctgacttaataccattgatgaatcttgggatggatttttttcctggtctggatcttgttaatactcctgtgttgagccacaaagaactgatactgacatcttttaaagaaatttaaatagaactccaaaatgaccctaagtcagttttcactttttaaaattttattttattttgaggcagggctttgccstgttgcccaggctggagtgcagtagcccagtcatagctcactgcagccttgatctcctgagttcaagtgatcttcctgcctccgcctcctgggtagcaaggacttcagcaaggaccatgactggctaattttttaaatcattttattggtagagatgggggtctcactatgttgcccaggctggtctcgaactcctggcctcaagtgatcctcctcccttggcctcccaaagtgctgggagtacccagccagttttcacttttaagataaattacatgtttcaaacattccaggcaccaaaatatatcacattttattggagatatttatattttgctgaataaaagaaagggatttttttctctgctgtttcagcatttgatctgtcgaaagaataaaccatgagtttatacatgagctctgacacaggttttaatcaattttaaaagtttattttgtcaaggttaaggacagcccatgacacagcctcaggaggtcctgatgacgtgctcaaggcgatttgagtatagtttggttttataaattttagggagacatgagacatcaatcaatatatgtaagattgattagatccagaaaggcgggacaacttgaagtgggtagggggcttcctgatcataaatagatagaagacaaacagttgcattcttttgagtgtctgattagcctttgtgatttacaggaatagtcacttaggctgtagtctggcttagtgaaacaacagggcaaaggaaacaatcagatatgcatttgtctcacgtgagcagagggatgagtctgagttccatctgttgtccacagggaatttccttgtgatcaaattgtgagggaggtgtgtagcttcttacctttgtagctatctttttaggaataaaatgggaggcaggtttgcctcacagagttcccagcttgacttttcccttggctcagtgattctggggtcctgagatttattttccttttacaaaagcaagcttccattagcgtacttcatctctgttctgtaaattactgaggcgaaacagtggaaatgaatgccttcaaccttccagatcctggcatcctgcagtcagtcacgcatgtgcctcctaattgtagacagtgagacaagaacttctcagcctcagggcacttgtggtcctacactgaagctattcagcttcttcgctctgctgatccctcgtccagtaacaagagaatagtctatcttctcgatatacttcagagctggaagaattatgtgagctttgttatgacaagccctctgatgagtgtatgaatgtccaggcaacactgtaaacgtaaagtgccatagaaatgcaggccggcgttacttgtaggctcaattcccaagtcttcctagagttttactcatcagaaagtctacaggcagccagttccaacatttttggcaagaacaacaaaatatattaaatttatactatatattatagatagttacaaaatatatttttaaattttaaattcttattttaaattagtattgaagtctgttaattgcaggaagaagatacataacagggaggtttggccaggttttgtttaacatcctttggggcccaaggattttataatttctgagatgagagtttagagtttctgactctcagcatagatttgatttattaggagaaatagagatgatactgtcaatgaggatttccagtcatttcctttgataggctatgctgtggtaatgcttcattgtgttaccaaaaaggggtcccgatccagaccccaagaaagggttcttggacctggtgctagaaagaactcagggcaagtccataaagtaaaagcaagtttattaagaaagtaaaggaataaagaagggctactcaataggtggagtagtggcatgggctgctcaactaaggatacttacaattgtttttcaattatatgctaaacacggagtggattattcgtgagttttctggaaaaggggtgggcaattcccggaactgagagktcctctcctttttagaccatatagggtaacttcctgatgttgccatggcatttgtaaactgtcatggcgctggtgggagtgtcttttggcagctaacgcattagaattagtgtataatgagcagtgaagatgaccagaggtcacgttcattgccgtcttggttttggtggatttggccagctcctttactgcatgctgttttatcagcaaggtcttcgttacctgtatcttgtgcggacctcctgtctcatcctgtgacttggaatgcctaaccytctgggaatgcagcccagtaggtctcagccttatttcacccagctcctattcaaaatggagtccctctggtttgaacacctctgacaattgtatatgagaagaatgaaataataataaatttctcacttctatttagcagaatttttcattaaaatatcttttgttatgtttcagtgaataaccctataccttccaatttgaaatcagaagcaaaaaaggctgccaaaatattaagagaattcacagaaataacttccagaaatggacctgataagatcattcctggtaggtaaataggatgagtgctgtttgtctctaaatgtctttttcctaagttgttttttgcattgttcgacactccatttcaggcagaagcctccatcaatgccaacaagtagttcagccaccttttgttccaccaccttttttctcatgactgatccagggatgctttggaaactactacctgttcattacaacttctggttatttccaaagggtgttcacagcataacttgtttcatgcaaaggagatccaaatgccaattaactttggcaatgttacagaccaacctccctcttaattaatcacagcacgtgactctgagctctgttttaaaaatttgttattgatagaataatcttaataatgataaaataatgatattaattattgttgcattcctgccacttctcccatcatgagaaaacagtcatcataaggccttgctactccaggtggaaggggtctggacagggccagctgcagaccaggcaaaccagcagggcctcttccctccctgtctctcccttttgcataggctttttctcctgcctcccatcccagggtgccagcgccctaaacaccacatgttcctgctccacttgagctctctgcagcctcgcctgtcctttgcatcgcgtgctaagaactctgcaagctaacctcgcaaactcaccagctaatctcatacataaattttaattttgtgtttcctccttccacataagacatttacattctctagcggtttaagacattaatcagtaattcctaacacagatgtgcatcagtatcccctagaccataaargcacagttcttaaacctcactccaaacctgctgaatcagacttttagtgcagtgtgtccaggaatgcatgttttaaacatgtttctcatgtaattcttaagtagtcagtgacacataagatcagtccagaggggagcctttgaaaaccactatctgttcatcaccacttctagttatttccaaagggtgttcatagcatacttgtctcatgccagttagcctggacagtgttacagaccagcctccctcttagttaatcagagtgcatgactctgggtcctgcattaaagagataaagttaatttttctaagccagatatctaaagttatttaatagaactttaatgctttaaaaatttgttgttgttttaataatcttaatcatgatattaattgttgttgcattggcccggtgacttctcctgtcttgaggaaacggtgcttgttagagccttactgctccaggtatagtctgaatctgcagcttggcatcccctgggagcttgtgagaaatctgctcagatgtcacaaatcagtctgcattcctcccaaggtcccagtgaggtgcacacacacactagtttcagaagcgctgctttagagcttaaagaaaactcaacaagaaaaactagattttcagtatcagtattctgaaggagcccgtctcagtgggtgaagctcagaaaaagaaattctgtttgcatgttagtctaagtaagagattgccccaaagcatgggtgtggcaacgatggaagttccacagccaacagagatccaggcccacttctcctgggagtctggtggggggcattatgtttacattaaaacaaagatgctatttcataggataaacagttgcatctacaaaatatttaaacaagacatctagatcttaaaaccttcccagtggtgtgtttggcctcctctaatgttaggattctaagaagtaggtgaaacttaatttagcaattaaatctataattggtacattctatgttataaatcaaaagctaattggcagattattcagggattattaatatgttagtgtccctgaatttgagtggaaatctgtaaaaatataattgacatgtggaatatgtccattttaaaatgtgcttttgttaatatctaatattcccaataggggcaatagcaactctagaagcatcgagaacagaatgtgaggaagacattctgccaacaggtggctgtaaaaataaatctgcacaacatataatacagctttcaatcttgttacaatataattataaccttttaaaatacaaaaataaagtacacttagtagacagccatccaggatgcaaccttattttctgtagctttcttattaagaacagctccacaaatgttctgcatgcaaacttcatggtgttggatgaattatttccaagagtcggttcttaatttaaactttgaaatggtggcataattacatgagaattttagtgttctcttgggtcatctgcaaagcttttgctctgtgtactagagccccatgtctgacttcacttccttggcagaatatttgataaaaataataataagttaaactaccttaaagttatatgttaggcttccctcgttagtttgaatgaggtgttattgtgtcgtaaattcacagaatcgtgtggcactatattcagtggatacatataccaataaccctcattttatgtaatgaacatctctgacatgtgaataaaccaatatttttaaatggaattatattatcagtgtactaatagttaagtggtactcaaatgctatagcagatcattttataaagttgaaaatgttttaacattggaaaattacttaatttttctgtttttgaatccaaatttttatattaatacaaggttaatttagctacgtggctttaagatcaaagttctaattcatgctgcctttttgtaatttttaaagtttctccttaatactatatggatcttaatttctttgaaaatgtagcttttatcttttatgtactatatcctaaattaattgaaattgccaaaatatttgccctgctaatagatagcaataaaatctctttcaaatatctaatttattttgtcagttacaggatgtgaggatatttatgatgttgtgtttagcactgcaaaaatagcaaacacaaaaaacattcatgggaatagagaggcctcgtgcccatctgttgagtgactgacttttgttcattgctcctgtgtgccccgaattcctagagataacctctgtgtacactgactstgtttaacacttgctcgtctatccaggcacatagatcaaaatgcttaccttcccattgttttccacgttaacagctcacgtaattgcgaaggctaaaggccttgcaattctgtctgtgatcaaagccgggttcctggtgactgccagaggaggcagcgggattgtagtggcgcgccttccagatggaagtaagttggcgtctgttcactggagtagagagtcttcattctttgttctgtctgttttcatgtgaacacattgcatagcgagtaggacaggtttcctgcatatcaactaaaacttatgtaataagggctactcgactgaacgtgcagtttggtgtcagtgaacaagccacaggaaccagcctttccgtctctctctgtcctcaaaatattagagaagacaagacaggtagatataactttgttttgcatgcattttgtaattcttccgtggagcaaatattgaaacatggcagtatgtgcatttcttttgtttaatatgaattcttattcctcaacttcatggtgtagctgctttcttttgttttatggaaattgatatgaaaataaggggccatatgtgaatttctttgtttctgtggtagatcataaaaactgtgacatttgaagagttttccccaaggcagaatcatatcaagagcagtatcatcgagttttactttctgggatgaaatctactacttgattctttagagatgaaatcaaaatatttgccatgaatcccaagtactaacatttatagtagtatttaaaatggacacaggtgtgtcaaaactaactaaaatgttttttataccaatttaacatttgctgttcagtgaacacgtttttctattagtagcagttttttagcataattttattttattttgagagagcatgggacacttacagacaataaatatacaatatatacatttgtgaaatatatggccttgaaatagcagtcagcagattcaccatttcttaccaaggtatccccgcagtcaacaaaaacctcttccttattatgtggatcagttttcatagctcaatgtgtggctttgaaaatgagaagaaaataattctctttttctcaagcattatccaaatttccatgagcagacttctcagcagtaaaaccaaacaaagtagaggcacattccaagggagcccattgtcagatgggactcagagtctgtgagaaagtccctgcatgtctcaggtccccaactgctccattgatggggtgacttgctgaccaagggtagggacagtcaataccaagccctgggctcctctcagagccccagcaaacctttctactggttttaaaacctacatttctctcccttcttcctgagctgcagctgctgactctgctgagagtaatttaaaaactgtccaaataagacacaacatgttccccaggatcctggccaagaccagccatcttaacacagggacagttcctaacatagggaacgaaaaattatcagacactaatttctgtaagccaaacttctctaagcctgggtaggatagttctggatatatttcagcaatattctagtatctagcatgcatggtagcaaccattttcaaaaagtgctttggccagaccatccccccaccaaattgaaaatacatttttctagacttgtttaacatgagtttctatatcaagaaaaataagcatatagtaatcctaaaatgtgccgtatcatggcaaatggaattactgtacttagtttctaaatgtgatttatcttgttagaattttaataaccttgaatttatagcctatttattctgcttaagcacgagaggtgttaaaacagtttttgccctcagaaatttacaatggaaacaattaytatgttaccgttagataatcaactctctcgaatccttctgatctcttaaatctgtgacaaaattctagctgaagactagacctacagctaagttgttctataaaaatattgacagttgaagttaccaagtgctctgtatggctaatggttagggaaccagtagttggtggtcttatgcatgttggtagagaaagattagaggacatgggcttgtgaggctatgagactcataatgaatatctaatactttaaaaatatttttaactttttaaaaattacatattctttttgaagatcactttaaaatcaggggaaataccaagtctcattattttcaatagaagcactctttagattttagcatttttccttcctatatttacatgtcgagggtgttttaatgttaggataacgttcgtttgtttttttattagaatggtctgcaccctcagccattgggatagctggccttggtggaggatttgaaataggaattgaggtaagtagcttgtgcacgtccatacaactgccatatcctctgaagacacctaagatgcaacctgtgaaaactgagaggtttcctagcgttcttattgttaccattggcacttaggaaaaattgtttcctttattttctcgatgaatgtctaactaaagctatctgatggttcccatttactttccttttctttccttagtagtaggatttctttcattcgccattttatctgcttctgtctcatgcacatttgtataacaggcacatcccaacacctggccagctgtcattggcagtttatggactgctcatggcaaagccactgttctccttcagtgggcattgaaattacgtgggcagtgcatcatcatttgtggcaaaatccagttttgtaacatatgatattcaaatccctccacattctttaagtaaagaagaacttcacgttatttcagtttataatgttgctcctgggattgtggcgtctgtcgggcagacatgcacactcacagaggcctcctacacggggatcctcttagggctgatgctcatcttcagtctgtcgttttgcaagggcctggaaattgaatctcctggtatgctcaactcattttcttctcaaatttcagtccatttcttcctaagctatcctttgtagatttgccctgttgacatagttgtaaattccctcagccttattaggaggaagtatttctaactcttttttcatctttattcaatctttcttactcactgctgtataaatttgtagtataaaaggaacatattttagttttgcttatcatgactgcatttttgtaccatgtgcaaccaaatcaaagctttcaaaaatatcgccctctggtggaaagtgcattttcatcagtgattgtggcttccctccccttcctcctcccttccctccctcccctctcttcccctttccccacctccacccagtcccctggccctccttgtagaagggcctttttctctcaatagatcatgctgctaaactgtgctaagtcacaacctgttcttcccacaaccctctggctccttgtgaggctgggggcatgctttgagcatttatttcaaaaatgatgagagactcagaaatgatgtctgtattaaatttcaatatattagagaccaaaaattgagagtttccatggtaattctttgaaaattttggacttttagccatagggcacattagaagccctgaaaaacaagtgcaagtaaaatgtagtcccttcatccagtaaatgaaatagaaagactttaagcattttatagactgatacatagtattttttttcttttttctctttttttttttgagatggagtttcactcttgttacccaggctggagtgcaatggcatggactcagctcactgcaacctccacctcccagtttcaagcgattctcctgcctcagcctcccgagtagctggractacaggcgtgcaccaccacacccagctaattttgtatttttagtagagatggggtttcaccatgttggtcaggctggtctgaaactcctgacctcaggtgatccgcccacctcggcctcctaaagtgctgggattacaggcatgagccaccgtgctgggccttagactgatacacagtattattttatttttatttttatttttttttagttgtgatgattcaatagtttattgttttgttaacaattctcaagactggtgcgctgcacagtggaattgctgttcatatttttgacaaaataagaccatcctgggccatggggtgactactttacacataaataatcaatcttctcctctcaaaccagtattatttttaaaagacaatacgagacagtggtgagctgtaagagagaagactgggtcagaccattctggctccaattctgacctgggtgcttccagtctgtgatgttaggaagtagcttttcttctccacacctcagcttctacatctgcaaaacacagttaaagatagccttatatgagtctctgggcttatattgatgattaaatatggatttatacagtaaaagcccttgaaatgacacaaaatataattttatttttaatatcttcttcatctttgcagcttatttaggcttgccatttacagaaactttttattgcaaagcctgtcttcatgacagtatggaaattaactatggaatttcatttaaataacataactattaacttttaaatgtcaatttcaaacagagataagaagcatctcctagggattggagacatgagttttaaacttcttaaccatgatctgactttgcttctcagagccccacagataagtctctgcgtgtaattgtgagtgtgcagtgatgtcacagcagtcggctatttttcaatgttaacagaaagcactgtttgctctccatgaagcactctctgattctgtctgagcctccatcctaacagagcactcccgcctgctgtcttaatgagggagggagtcagaacgggagcatggggtatccagagtggttccctcaggctgttctcatcacagcagatctggtgcccactgagaccacggaggggctggagggtagacacgtccttcctgaagggaccaacctctgagggcacttctgactcaggtcactggctgagctgagcatcccctttggacctggcttctctgggaacttgcccctaccatgtcctagcagccacaaatagtaaggaccagccctcaagtgcactgtgagtaccgggaaggccgagactttctcaaacttcacacctacgtccacagagactgacgagacacccatgaatgcttccttttctgtaaaatgggacaatgacaggacctgtaaccacacagggttttcctttcaagcacatagatggcacacacgtaatcggttagtactatccaatatttgttgaataatttaactatctgcctttctttctttctttctttttcttttcttttcttttctttctttcgttctttctttctttttcttttctttctttctttctttctttcttttgaggcagagtcttgctctgtcgcccaggctggagtgcagtggagcaatctcagctcactgcaacctctgcctcctgggttcaagtgattctcctgcctcagcctcctaagtagctgggactacaggcgcccgccaccatgctcggctaattttttgtatttttagtagagatggggtttcactgtgtcagccaggatagtctcgatctcctgacctcgtgatccgcctgcctcggcctcccaaagtgctgggattacaggcgtgagccaccgctccaggccatttttttttttttacaaaacttgtacacatgctattatggaatcattttcatagccatggaaggtggttgtcatcgctctcattttatccgtaaaatagctaagccaggagaattctccagtaggaggcagccagagaggggcagattgggaagcgtctgctcccacatccaggcagcatgttattcgaaagacagagttccctgtagtctgtcttgtctgcacatccctcaatagggaaaaaagaaaggttcaggaaagttacttgttcttggtttcacaggtgcttgggtggtaaagcccacctcactgtaacattcttctgaataacaagccactgtttttagggcactatacaaggtaggcaaaacacacattattttcaatatacagagacattagtgtcttacctaagatcacacagctagtgtgtggttgtcagatatggttcactagaagcggagcctgataccagttcaagtgcatgtgatatactgagcaaatgttcttccggggaagaaacttaaggtactaagggaaagaaggggaaaggtccaagcaaggctgttgcttaaagtttagttaaactcttcttcgtccatgttgataggtagttcaggttaccgactcgaggtctgtttttttttttaatagacacatttacagctacatattccctctgagcattgccctggctgccttccataagtgtrggtatgttgtgtcttcattttccttaatctcaaaatattatctaatttctcatgtgatttcttctttgagccatttgttatttaagagtgtgttgcttaatgtccacatatttataaatttcccaaatttatcttgtccttgatttcaaatttcattccattggggtcaaagaaaacattttgtataatttcagtccttttaaatgggttaaggcttcttttatggcctcaaatatagacttttgtcctgtacaatgttccatgtgtgctggagaagaatgtgtgttctgtgttattgggtaaagtgttctccaggagtccattgggtctagttggtttacatggttgtttagttgttccatatccttgataatcttatgactaattgttctcttcattattaaaagtgggttattgacacatcgagctatttttgttaaattgtctatgtcttccttctagattgtcagtttttgattcatgtatttgggtctccgatattatgtgcttgtataaatatatgtgtattactatgtttataattgttatatctctttggttgattgaccattttatcattataatatgtccctgtttaatcctaattacattttttgttgtttgatataaagagtgccactccagctttcttaggttgccatctgcatgacacatctttctccatccttttactgtcaatctagtggtaactttgaatctaaagcgtgtctcctatggagcatataattggatgttgttgttgttgttgttgttattgttgttttatccatgctaataatctctgcctttttatttggttgtttaattcattcacatttaatagattattgatatcattggatttatatcagccattttacttttttctatatctcatgccktttttgtccctctgtttccactttactgttttcaattaagtgaacattttgtactatggcattttgattccttttatgattttttaactctatttttgagtcattttcttaatggttgttccagagcttacaatatgtcttaactatttctaatttatgggaacttgatttaataagatacaaaaacattactctcatatggttctagttttttttctccttttttgtgctattactgttatacatattaaatctatatatgatacacactcagcaattcatgattatagttaataatgtatataattttatgtcttttagagaaactcagagaataattgagagcaagtatttactcattgaacttgctatattaaccttttttatttcccattttttgttctgttccattgtttctgttcattcaggttaccatctggtgtcatttccttactccaagacaactttgctcccacctgactcttttgtacggttattgtctagtatataatatttctatagttacagacttaaaatatagaaaaaatttatttttaaaccaattaagagaaaagagaagaactatgcatttatactattatttatggttagataattatctttactggtgattttttaaagtgtggatttaaattactctctagagtcacttgctttcagcctgaaggactttgtttagaatttataatatttcttgtaaaatggttctactagcaacaaattctctcaacttaaaaaaaaatttttaatctgggaatgtcttcatatccccttcatttttgaaatatacttttgctgattataagattctaagttgaccagttctttctttcagcattttgtcatcctactgttttctgaagtctactgtttttgaagagaaatctatctattattctaattggggttcctttwatgtgatgagtcatttttctcttgctcctttccagattttctcttgcattttaagattttttacaattatctatccagagtgttatctttttacatttattctactcagaatttgttgagcttcttgagtgtagatccatgtttttcatcagattgagaattttcagccattatttctttgagaaaattttctgcttctttctctttttccttgccttctagtacttacatcacacatatgttggtgcacctaatggtgtcccaggtttcttgtgtttctgtcaatttttcttcattctctttctcttagtttttaagactttctattattcaaatttaccagttctttattttgcgtgctcagatctaccgttaaacttctctagtaaattgttcatgttgcttaatgtactttttacctccagaatttccatttggttcttttatataattttatgtttttatcaatattctctattcaataagatattctcattgtacgtttttctacttcttaaccatagttttctttaattctttgaacatatttatgacagctgttttaaagtctttgtctgctaaatctgatagctggaccatctgaacagcagtcattctcgtctgcttcctttttaaattttttttctatgtatgggtcacactctcccacttctttgtcttattatttttggttgagaatcagaaattttagatattatattgtatcaactctgggtgctcarcctctccccctaggagcctcttattgtttgcttgctgtttgtttagagatatggctggactgtttgaatgaattctgtgccccactactgtgaagcctccaatgttgtctatgggcatgcatatagttttcctgagatgayaggtgttctgactgtccctgtccgtgacctgtctgttaagctgtttgtctccattggtattacacactgttgttagcctccactaattgcctgctgattgctccattgtttccaacaatgccctggggacataaattgctccacagtttgatccmgttaaaattgtgctcctgtgcacaggtagtctttgaggctcatttctatttcaggagggctcttcttagctatctctgtccctggttctccctgataattttctagaccaccaatggtttagcttgttgctgtcatggagctaaatacctcatcttacctgtttatcaccaaaagcatcatttttgacagcacctttgaacttccccaccctgtgttccaaaagctttcacttcccttggggagagctttggagctctctgctcttgcagcctgtctctctgtctgcccaagatctctgtgccgttgctccagagctggaggctggggcagtggctcccttctcttggagtgacatccctgcagccttgggtggkgtagtagcttggcttgcctctgtcagggtggagcttttgccccacaggtgaactggggcaagagtgagtggggtcctggtgctcctggactgttgtgctaggctggagccttcacttacacatgggttctgggtggaggaaggaagctccagacctctcagctgctcttgcctggaatggagcttctgtacaaggagctgygggaagagaaatgctggcagaagcctctcctgtggatatactgcagccctgaccaggggctgggggaaggaagtctgtgttcttrcaaacccccttccccaagaggagcttccatcaggctgacctgcagcggggcacaggttatagctcaaatgtcaccaactctctcttccttaccaatatttaatagtgttcattgaatcaatgtgtcttcattttcttcacttgccatatgcccttaggacaatttccagaagtgttaatttttaaaataatttttaccagttacggttattttgctgtggagagggtctgtgkcctctttatgccaccactgcagtgtcattctgatttgtagatacattctacagtgggatggagattcaactgtaattgttaagttttagctcttcttttgttagttatagaacagtgaacaaagtacttaatcttcctgaatcaaatctgtaaaataaaaaatttttaagttgaataaaatggtccttaaataccccctttcacttctgatatttgtgactggcaacaaagcttgcctgttctgggctaaagttgtggcgcattgttttttgcctgggtcagtctcagtttttctccggacatctcccgtaccttccacrtggtgtatccagtgctgcaaaaatgttacatttgctccaggttcttcatctgaccttccaaacacagaaagggattggagtaccaccttcttaattatttgtactattattctagaatatctggggagatgctaacctattagttgcaatggatgccttaggacattcgtgcttaattctcctagagaatcctggtggaaaaagattgcagtcttaattgtgtgttcattaatggcctgttcttaaggtcagttctcttaactaacaaggtctagttgtgcaaaggatgctgcttaacagccactgctgtctgaggctgctcctggatagcttattgcatcgtgctgtggtttcactggagagtgaatgtcagactcattcttccaggggcataagtgtaagtgaccctaagcttagccagaaggccggcgtggggttaayttatgttcgacaatctcaacctttagactcccagattctacagggtggagagttccctggttcttggaacatcagaggtactgaataattgtctaaattagtgactgaatacgtgtatctggattagggattaatttgggggagggggaagtttttgtggtaaagagagagagattagtaaagagagttgagattgtgagaagtgaagtcgtgaaagtcagtggtctgaggaaagacaatgctacatttgctttaaataccactaacggtttctttttggatgacagttgtagcaaagcccaaagctcagaaagtcctgctgctggcttggctttggacatgtacagtcctttgctgtgtttccagagctagagctcacactgggtcatcaagccagagcagtctggcttttactcaagattggaatttgaaaaaacaaaaacgactgctttttccagggagaatttacatgggccctttcactttactgaagaggaaggtatttgggtttaagttgaggataaattattgttagagatcagagtccagtttctaagccccctaagaatgggatgtaaggaaaagatctgttggtctgaggaatggagggggtgttgttgctggaaggacgctccacttaagcttggtttacatattgagactggccatgccacacacacacacacacacacacacacacacaaggagggaggaaaaggtttattccccatgtagtgaggcttttagggagattggggcaggctccaaggccagcccaagagtggcgtgagagaacggcagggtggaggaggaagcccagctttcttagcgggttgtccagatgtggggcttgaaggctgacagcagtcaatcatccagaagggggtgatgctctgacaggacaacagcccgggactcagctgtgtgggtgtgaagcaggctgaccacacaagagggagatggggtggtaccctctcagcagctgctttcaggaaattcagtcgcagagaagagggacatttctctcccgcagcttcccctgcatggcagctgtggtttttcacattctaatgtttaagaatttatttaattgaaacacttgcatctgagttattcagttttattttttaattttttttttgatttatagtggactacatattttcctggtacttgtaataatttaatacatgcatacaatttgtaaagatcaaatcagtctgattggggtatctgtcaccttaaatatttgtcatttctttaggctggaagcattcaagttctcttctagctattttgaaatagtcaatagattattgtgaaccatactcaccctactgatcttataaataaaacacaagtcttatttcttcgatcagactgttatgtagttgagttttaatgcagacttctaaagaagtcttatcaaatgcttacagggttttctgagagtgccgtcccaatgtgttgttcagctcctccagattcctgcaggaaatctgtcttgctccttcttctaagctgtggaaataaactgagggccattgctgctcacatgctcgccaagctgtctgcagagcttttgacctggttctcgggctaattggtagtgtcaccaaaaaacacaatattctcttattcttatttcaaaagaactaaagagagatcagaccaaaaaaaatcaaaagactttgtttttccttcagctgcctctcatagcttggccttacttaactgtaccacgatgtaccaagcagaagcggaacataagaaccagtgtagctacaaggtcatgggtagtactttgtattttccgagtgkgwatgtgggaagcattatggaaggcaaatttgttatctaaaaatacatacaagatacaggttatacaatcactggtgaaaatgcttaactttgcataagaaaagctaaataattatctgccattcagcaccataaccctcagaaattgtctatatgtaaaataaaatgaacagttggcaagcgtcaagcttaagcatcttgtgtgggtcagctctctggtagatttagtttgacctacagatctgaagtgtattttatttcataaaatgattcaaattgaacattattaagaacatacttgcatcaggaactctcttagggcctttcaagtataatctcatttggttataacaggatttttctgtcactcatataaaaatgttgacttgagagcattgatttgattaaaaaatgtgaataactgtataatgaaggcatattttaagcacgagtctgcttgacctttgcatgttttattgaactgatttcaattcatccgtaaacagccttgaatgtgtgccactattattacacccattttccagagaaggaaattgcagctttcagcagctcagtgatttgcccaaggtcgcacagcatgcaaaagggagtaatggagttcccacctaactatttttaattttgagcccaaattcttagccccatgccagcactgtttcaacttcccaggtacacttgacgcctatatctgattctcacagtagttccatgaggtgtaggtcctagtaagcaaattttaaacacagaacagtcagagacacaaagactggttaaaagaccccaaagtccacagctctcgagaagcggagctgggatggacattggttcttcacacccaggggtgccctggcccatgctgcctcccctggcccatgctgctgcctcccctggcccatgctgctgcctcccctgacccatgctgctgcctcccctggcccgtgctgctgcctcccctggcccatgctgcctcccctggcccatgctgctgcctcccctggcccatgctgctgcctcccctgacccatgctgcctcccctggcccatgctgcctcccctggcccatgctgctgcctcccctggcccatgctgcctcccctggcccgtgctgctgcctcccctggcccatgctgcctcccctgacccatgctgcctcccctggcccatgctgcctcccctggcccgtgctgctgcctcccctggcccatgctgttgcctcccctggcccatgctgcctcccctgacccatgctgcctcccctggcccatgctgctgcctcccctggcccatgctgcctcccctgacccrtgctgcctctcatttgatgggtcatattatttttcagttctaactttggacttccacattgcagtgattaatttgagtaacaaatgctttcactgtgttgacctgccttgagcattcagttgaatctcattgtagtttcttcttttatttagagaaaaattaagtcagctgggctcagtggctcacgcctgtaatccagcactttgggaggccgaggtgggtggatcacctgaggtcaggagttcaaaactagcctggccaacatggcgaaaccccatctctactaaaaatacaaaaaattagccggacatggtgacgtgcctgtaatcccagctactcaggaggctgagacaggagaatcacttgaacccgggaggcggaggttgcagtgagctcagatcacgccactgcactccagcctaggcaacaagagtgaaactctttctcaaggaaaaaaaaagaaaaattaagtcatggaaataggcattcctaatggaaactgctttgctttctggtgtgttgagcttctgtgacctatagtgaagtggcccaggttcacagcttcctggtaaggagcacacccctggccaggaggagagtgtagaaaggctctcaggaccttcagcaccatcgtccctggtgctgtgctcttcgggcttggcttttacaaagtttagtctgatgagatcagagagcatgttggatcccttccaacaacctttgtttgacttgttagcactgacggtttacctaaccccactaaaccttaggatcaccacctacatgaccaggttgtgtggaagattgaaggacatgatgcaggtaaacctcatagtatacacatggtgcacagtaaatgctcgctgaggtttgttgtaattacctgtggcaatattggcttcataattcatcagctcaaaataaaaatatggctcttgtctcacgttctttcctgtctctattgatgttttgctacrgtgcatatggtgtagttgagtgttagtcaagatgaattttaaatgatatttagtcttaacgatttttaaatccatgggtttctacactttaggtatcagacttggtgataattctgaattatgaccgtgctgtrgaagcttttgcaaaaggcggaaatctgaccctcggagggaacttgactgtggcggttgggcccttgggaaggtgagttctttaaatagatgttagacagtmaaggtttaacaactgcatattttattttgcattaataggaaacttgaattaaaatgaacagatttgtacatccccagatttatacatgcccgaaagatttgaggtcatcacaaataggaaattcacaaaacacagccagtgagataagctagaaaatctgaaaccagaacacacaagaaataatgaaatgttttggaagcataggccattgtatctgtcagacttgaacataaaatccaccttaagctttgagagagccaaacacaagtcagattttatgataaagttaagcttcgattaggaaagaaagagcttttttcaaagtaaatcataaaaattggatatggatgtgttttttttgagccgtgtttacagtacttaaagtgtatttttcttctctattaatgaaatgctagtcttggattaattgtgcaatgtagagatattttatacccacactatttatagaagttacacagtaaaatcatctaaaaatgtttcttggttccatgaaaatactcaatgcaaaaataatccaaattctttagcactcttgagatgtatttcccagttttaagagaggaagatccggttggaaaatgtcagatttacaaatttttaaaatatatttacacatgctgcactgtattctttttcaacacagttctatgttaccagagccttctgtaataatttcatgtatgttcttccccyggcctgtttttcctctaggccacattaaaacatctaatttaggcctacagtaagtaaaacatagaaacagctgaagaaggtacagaacaaaataattcatttgagctagaaggagtgctatttaaatagtgatcctcggcttggagctgctcacagctttgtgatgcaaaatcttgtgctttgcaggaacttggaaggaaacgtggccctgagaagctccgctgccgtcttcacgtactgcaagtcaaggggactctttgcaggcgtgtctttagaagggagctgtttgattgaaaggaaagaaactaatagaaagtcagttcaagttaaagtgattttaattgaaagtgtgatgagaaaatagtacttcaaaagttgatataatttgcagagtacatttatatattctttttacaacatgtggttttaagtgtgtatcttacatttaaaaattaaatatacaaataatatatgctcgtagaaaatgcagaagacacatgaaaaagaaataaaaaaaactcgatccctttaaaagactaacacaattcacattttgctttactgccttccaacattttcctaagcataattttttttgttttgccatatatgatgataatcaccatatatattcagttgtaaatgctgttttttccacttcgcattttaagatagctggaaaccatcattctcagcaarctatcacaaggacagaaaaccaaacaccacatgttctcattcacaggtgggaattgaacaatgagaacacttggacacagggaggggaacatcacacactggggcctttcagggggttgggggctgggggaaggataatattaggagaaatacctaatgtagatgacgagttgatgggtgcagcacaccaacatggcatatgtatacctatgcaacaaacctgcacattgtgcacatgtaccccagaacttaaagtatattaaaaaaaaaaagaaacttaaacataagttagtaatactcttagttggatgcaccgatttcagtgattttcagatgtttgtggaaggcacaccagttacaactcatgtgtcagtsagtattccttgttgtgaggtttcctgttctacactccacctttgtcttttctcatgtcaaatagagagcaatttaaaatacagtttgatttaaaaaaaaaaaaagaatctggaagtatcctaaaaggtaaagggaaacttctactttaaattggcatctggctgatttttcccaaagatgcaaattaagtggctcttacaaattgccactaaaatatgtgtaaaggcccagaaagagataaagagctaagactgacagcaggacttcttccagaacctgcagaagttccatcattgccagcttgatcggctggcactgctggcattggccattcaaattcgccacgcgtggcagacagacccgccactatccgagacaaagcatccagtgtttaccccaccgagtcattcaggaactgaacagcactatttaataaarctaaatataaaccacaagaggtagaaaataggagggatggggaaaaataaggttttcagaactattcatcttataaaatcaaaagtgatgtgttaactcctggctttattaatttgagaacagttaacaaaagaatgcttttagaaacttctggttcgagcccgttggcaggccttcccactaaagttcaactaaaccctggataaactaaaacaaatatgttgcttaatgaatggcaggacctccaagcatgtaaggcaaatgtttatttaatcttgataaaaataaatattttaaggaaattacaaagccacagttataggtaccattttttaaagaaatttaaaaagtaaaaacctataaaaatgtatgtgcttgtgtgtatatttatatgtgtttatatatgaatatgtgtatgtatatatatgggcaagtataagtatttccatgataatgtggatgtgctttttatattaataaagaaaggatacatataaggatatttatggtagttgcctgtagaagtgaactttggggtacatttaagacttgaacatgggatattgcttaaagttagtgtttaaaaagtagtgtatatgaagtgctatgtatgaatgattatatatacacaccgtgtgtgcgcacatgctatgtttaactctagaaaagatttgtgtatattaaaatgtttttaattttatatttcccattagattttattgtcaagatatccgagcttatgacattttatttggagatacaccgcggcctgctcaagccgaagatctttatgaaattcttgattcctttactgaaaagtatgaaaatgaaggacaacgaatcaatgcaagaaaagcagcaagggagcagaggaagtcttctgtaccgtttggttttatgtttcactcagtattctcagaaaatctctttctgtagaacattctgtccctgatatcaggttcctaagaacctactaagcctccttcgtagttkcactgacttcacattcttgtgaaaaggtcatgctaccttgacatttcctctgtacagatttcagggaaaaacataatttgtcctctgtgattgcatttctccaaggatggaactttgttgtatcaataatacaaataatatgtgggaggctgaggcaggtggagcacttgagatcaggagtttcagaccagcctggccaacatggcaaaaccccctctctaccataaaaatagaaacattagctgggcatggtggcgtgtgcccataatctcagctactcaggaggctgaaacaggaggatcgcttgagcccatgaggttgcactgagccaagatcatgccattgcactcagcctaggcaacagagtaagaccttatctcaataataatatatgaataatagttgcagatactgacgcctttgtatgtcaggccttggggcaccgagggatttgtgtgcattgttcatgrtgttccacagcacctttcagagttggtatgatgcctgtttcatggaataaaaactgaagcctagagtttgtctgtcactgcctctgccagttgcttgctaaaccaattactacaccaccgtccctgcagctccctaagaccttgcacaggtggtcagaggtgcctgggggaggttagcttccaggcatgagaagagcacaccctgtccacatctgagtcttgtcatccagttcaattacatagagtccagaggggtgcatgtgagctttgagagtgccacattaataagcacacatgataraagtttgctacataacctcattagaaaagagttatatgtgcctaagtaaaaacaagattttaaaattatgtgtatttatctttttstttctcccaggctaaagaattacctccaaagccattgtcaagaccacagcagtcatctgcaccagtccagctgaactctggctctcaaagtaaatatttttgttgcaattcaaatacagttgtaattaagtaattattaaatgttatcattaagaaatcaagatacattgttaaactttagagttaaatagaagaactaacatatttaagagtaaaataagtgctcagcctcttctaaatacatgagacaaattgtcattgctataatttatgaaaacttctctttctattcataagacactttctttttttttttttttttttttgagacggagtctcgctctgtcgcccaggctggagtgcagtggcgggatctcggctcactgcaagctccgcctcccgggttcacgccattctcctgcctcagcctcccaagtagctgggactacaggcgcccgccactacgcccggctaattttttgtatttttagtagagacggggtttcaccgttttagccgggatggtctcgatctcctgacctcgtgatctgcccgcctcggcctcccaaagtgctgggattacaggcgtgagccaccgtgcccggcccataagacactttcttaaatctacaaagatatttatcttcaaaggttttctcatttattttctgtgccatttcttccaaaaaccgttatccttctgatttgaaatgagaacaaaataagcctgtttttttcttatcatactcatatttataattctgaatatcagttttgacatatgttctttggagctcaggatctcataaggtggtttttaaactagatgacatttataaagcaccaggttttggtctttatctttctctctatcattcatttttgtgaatcacttgtgtttctgtttttcgtatatggaggttaccagtaaataggaatacattgaagtagggactttcatgtgatgattgactgttatacaagagtcattgtgctgtggctttgggtgcacaaaggtgactttaacgtagatcttgcctttagaggactttcagaacaagaggagagagattacatgtagaaacataactgctgttagtgggagaaggcatataagttttgcggggagtaaatagtaaagctctgcagaaggcgggaagcgcatcctcggcctcctccttaattttctgtaatcattttccccagttttgagcccaagtccctcatatgattcttggctgtgcctttgactggtctaaatgtaaccctcccaggaagatgctcaggaaccaggcctattcctcattaccaacctgcctcctgcccctgcgtctgtctcctgttcttctgggataagccgtggtccactgctgattcatgttcagatgattgatttactgaaactcatatttgcagtgactaatgagatatgagcactgaatttatttttattttagatctgagtgattatatagaatttgacccatatgtatgttttaaaatatataaaatgtcctcactgagaatggatacctgcatatgcatgtatraaatcctctcatttataaaaattctagtcctcttagtatcaggtccttatcagtgcggatttaaaaatgactgtggaccttacctcaaaaaattcctttccgttaataattgaaaagctctgaaggttgtttctgccatataacccccttgtgtgagctttctaaaaacaggccctttgcctgtgccagcttgcggatctgtttcccacggtgaccacgtgtgttccccgaaccctttcttggggagatgggcagtgccctccccattttgcacagccacagctgtgtccctgccggtggacaggttagcctggccacatttctgcagcctcagcctcactcgacacactcgtgaacactcctcctccctccaccttttcagcttcatcctttgtggctaggccactacagtttttccatgcgataccatcatttctcatgtgctgtatctctcaagttttgaatatcagtttttaattcagtaaactaaaaatttaaaactagtgactacttttaatgttttatgktaaatctgaccttttcttaagttctttatttaaaaactaagtattttcaatttatttacatatccttacacacacacacacacacacacataattttatggaaatgcacgtatgctcatatggagggtctgtgaaggcagtattttttttcttttcctttgttgtgttgcttccttttcccatttcacctatgttttcactttcaagataccttcctctaccctgatttcaggaaacccacgtatgaactttcacgttgttttctccattcttgtgtagtcttacacatggcatgtacaaacatatacataaacatggccagaatatttttgtctcataaaaatgctatcatcttatacgtgctttactatatcttctttatatttatttatttatttgttatttgttggtttgttttgctcaacaactccgcgtagaaatccctaagtcaactggtatagttctgtttgcttctttttaataattattcagtatccatggcacaaatgtatatagtttactcattcactctcctattgatgtatattaactttatttcagatttttttccatgccaaacagtgtcacaattgatatacttctaaattaatatttatatatactggcacttttattttttttgagatagttaccaggagtggacataataggtcaaataatatatttttaaagttttaacagatttagcagattacttttcaaaagtttttactacttagagtctcatcaaccatttccccaccgtaacattcaccagcacatgcattccccaccatgtataccatccaccatgtacaatcctaaccatatatactccccaccatatatacactccccataaccttcccaccataatagtccccmctatagttgcttccygccataggcatttcctaccatgcacatttcccactagacaccatatgcattctccatcatgtatgctacccaccatatgcattccccaacatgtgtaccacccaccatgtgcatttttcaccatggttactayccaccatatgcattctccaccatatgaattatccaccatttatgctgcccaccatattctgtaccgtgtatactaccgaccatgtgcaatcctaaccatatatactccccagtatatgtaytctccccastatatgtacwctccccaccatatrtacactccccaccatatatacactccccaataacattcccaagtcttcattatataggcttcccaccagacattcccactatacacattccccactgtccattttcattctcaaccatatatcttccccactgtatgcattcctcactatatacattctccaccatctacattccccaccaagtgcattttcaactattacatccattatgacattcttcagcatataccttccccaccactattagtgcggaagcatctagaagattttgccagtcaaggcttgtcacatctccttgttaattggattgtatttattcctattagtgaatgtaaacatctcttcatataaattgctggtgttttggatttaatcttatctgaaaagtctcttcatttcattggtctatttttcctattgggatatttgttgctttctcaatttatggaaatgttatctatattataggttttgttggtcatttggattgcagcatatttctacacttaccatttttcttttgatcttgtttttcataattttactcyatgaaagttttaaattttatctaaaaataagtctatcatttagtttttatagatttggatactttggtcatgattaaggtcttcccacctcctacacaagagtatgttcatagtctcctagattttcttgtgatttttttatctttgcatttactggatacttagtcttcacataatttgagctcattttcctaattttcccctcctccccaatatacaattctagttgaaacagtatgatgtacttgtatccattctataatttttcaatgctaattayggtaacattacatgtatacatttattactttgagatataataattttaccatttcatgctttccatttgttgagattttatgtctttcaataagactttgtaatttctgtgccttttgtgttaaatttgttcccaagtactttgagattttgatctgctaaggtgaatggaatgcacttttctatttctacttaagtaccaattttcacagtgaaggaaatcttaatttgcatatattttgtttgtcttatatctcgtcacttgctcaaaactatttctagtcagtttttaaaaatagattctcagaggatatttgtatccttttcccatcccaccaaactttatttctaaattctgactttcataaatgtcttaggccagtggccttcacactggtgtgtgcctgtctttaggagtacgcagagactgcaaaagggggtgtgggcacaggccacttaagagacaccatctccagatctccagctcctggataagttctttttaaagctgaacatgatgtgcaaggtgtgctcttcgtcttctgtactgttagaatcagtttttctgcagttgaagaagaaaagcaaacccccagaccgttctgcctctttctacactacatcaccccagagcgtcagaacgggaatccagtgtgaaatgtggatgcagttagtgaatggctcttatgcagtgtaaatccttccatgaatcagtgatttctgtttctttgccttcaatgcaattgaagaagaacctaatagaattgtcatctgaatttataatgagaatagtgtgtgtacttctgtgtcatacagatgtcaggtatttatcatctaccttatacttcatgtatcttctggctttattcaggtataccttgtgatttaaagcgcaatcaaatgatgatgatcctatcaacttagtgatttaaaatatttgctcagcaagggcaggatctggcaattttgtgtattttgtatratatatactaatcagttttcaaaatcaccactctcctcttttttggcaggyaacagaaatgaatataagctctatcctggacttkccagctatcatgagagagttggtaaatcagtaaatctatatgttataaatgattcatattcattttgtgatcacaaacttcctaattaatctgacaggttatgaaaatctctgggaagtgttcagccctttaatttatagaatattcacattcttttgagaagtacttcatttagaaaatgctatgcttttgttatcttacttgcctttaaggtaatgagggtgataggaagctgacagtcagtgttgtctgtgtagggagtgtgtgctggggacagcgctgctaagccccggataggagctaaccgtcagtgttatctgtgtagggagtgtgtgctggggacagggctgctgagccccgggagccatggcatcatctgaggagcatgtgatctcctccacatttgctgtctggaagcttttgaatttacaatggagataaaatgagaaagtttgctaattctgaattacaatttcatccttattccattttctctgtgttttagcaccataaattttatatttctaagaattttatttttcacattcaaatgttttgttattactggaaactactttataaaacttgttaagatttaccatagtaaaaatggtccttcaatctgtcttacttaaatattcttcagaggtttccctgaagagaattgagcaattatttgcaaatgtgagtggkacacaaattgagggcaaagttaaacaatcataaaatagcctgtttattttttcacattgaatactttcgtcattggagtcacaaagctatatgctgctggatatawaactgtcggagaattaaacatttcatgtaaataaaataccaaaaattaggtactcaagcatattttaaaaatttatatcatgcagataaaaatatgttgaaaaggtctcttaagcagcatcccctgaagagaggtcagcatgttcctgatggatttagggttggtgacctttcttttcaccctggcctcccctyctgggagcccactccagtgtttttcccagatgtttctcctccgagggggttgagcatctgctcctagagtcctgtatggagagcaggtgcgatggtcgggggctcacctacagaagatgctgtgccatggtcttaggtatgcagagaaagctctgagaggttttaaaaatgtgtttcaccctttgtggttcacacccatgttacaggccatgttaaagagacatcaagttcacacccacattacaggctgatttaaagagacatgaaaagtttggcctttggatacacatcctgtagaagcaaaagtggttaaggtataaatgttgacaccaagacagcgtaaacacctagatttttatcttacacagcctcttacttttaaagactcaagattagacttagacttaggtatctggttgttaaagtgctcctaaacttgacaaggtcagctgactggctgcacttgcttgggaagggaggggatccctacagagagacagagctgagggaagctggytgaaaaagagctgaggccacagatcccccaaagaatgccttggtaatgtgacattgggaactagagttcctttctctattagaaacttcctataaacagcaccaaggaaaaacgtttcctgataagaaattaaactctaagtgggctgtggagacagagattccagttcgaacccccgtactttcacttaccagctgtgggacccaaagggaacatcacttgccatggttggtttctccgttgcttctgtgtttgtatttgaggacaggacaaggtaaatggtaactcagttacaactgagttaatattcctttagcccattctccaaagaggttcttgaagaaaaaattaaaagggaagatttacagtccactttttaaataaaactcactttacgttacggaatttttttaaacgcagctgtgaaggcattaacctcttaccaaggatttcctcatgtttgcttaccatcgctgcagagaaaagtcacagttacatggccccagggcccgagccttaaattgaaaacctgatgaagcaggacactgagtcctccacgtgcgagctcctgaatctgtctcagccccacggaggggctgctgggtgtgatgatcagctacatcacctgtactttcctcccaccatcttttggctttgccctttggaaggtccagctgtgtagttcttgggcctctgagagagacaaggcttgcaaatgcacagtccaattttctgatcttccctctagggactctggaaggaatggtttcataatcaaaagcttggaccctccagcgtcagcattcttccccgtcctcttacccatcccatagttgtctgggatggggtttctcaacctgggcactacacacaatttaggctggataacactttgttgtaggggctatcttgtgcctcatagggtgcttagcaaaggctgtgttctcctagttgtgaccttcccaaggctgtgatttttttcctgaaacagtcaggccaggggtgctggctgcacagggtctgcctcatgcaggctccrtgagaaagtggactggaagtgaaacagggacatccacagaccagcctttctaatcatgggcctcagggcagctgccagtcaccaatgctgactgtgatctaattctgcttcctgtttgggaaaaataacccctacttcaactaaacttgaatattataaaggaaatggccaattccctcaaagatccttccgattttttaagtacatgagtataaggctgaaaggcatatgctgtgcagaaggaaaggcatctgtgaatgcctagctttttagtaactcagtggggtttgcttcccggtaaccaggaaggtttttcttcatggaaggaatcattacttgactcaccttttattgrtgaattctttgtgggcattaaacttctccttgtgaaaattatctctaatatttacattaaagaggaactttaagtcatttggagtttttcaaagaaaaaaactaacagggcacagcactaactggcttgtggattgttatctgagaaagcagataggctcctggatctgctggcctcactcttgtgattttcatgtggatggagtttctccaacaacagctcaactcctgactctcttgtactcctccccaggaggcagaggcatttgtggtcaattgggtgaggaattgggcacaaggaacagtcaacacacatcttagcctcagtaaaggagaaatgtgagatcccggccccctcagaccttcagtggtggccttcccttcagctgcacctgaaaaccacccacgttgctcctctaccctcctctctcactctgctttatcctcatttcatttggaatctgcaattcagagaaaattagaccaacacctgattgtgagggcagggaccaaaccaggtgtgtgatctcgccttctttctctttcttagttcataatatatttatttctctaattattcctcataaaatatattcckgaaactgcttagaaccaattcagttatcagggattacccagaaccatagcatcagatgctgttatttgtacagtctggaaacccagtgaggcaggtcaccacattaatcccccttgaacatttgcctcataaaagtaaaatgctccgataaatgtcagtttggtctgttgagcacaatttcatatttatgaggttgttgagggtcttggatgacctggagacaagcttcattcctgaccttggacaaattacttgttatctctgaagctcagtttcaaattctgtgatgtgggataggagtagctggctcattgcagtgggcggtgtaagaggagcacatgtgtgtgcctgagcagttcgcggtggctgctcttcccagatgcacatcgattgctgttatcattgttgtcgtccttattatgcatttttgattttataaatgagactgcaagtgtataaatgcatggtagctaagatggctgtggctcccagaayattccctgatgttcacaagcactcttttaattcacttcttcctattatctaacgtgtctgggagacaagagggaggagaacagagttcctggaggttcttcactgatttgttctggttaattaagattcagctttatatgtggatatcctaaatataatcatgaataagagatttccaggatggatttttctttagcattagcttgcatcctgatctgatgacagggaagcacggcgtgagcgcctgcccggtaccccacccagggcagagcacagctcctttcacagtgcatggcagcgactgctcattaacgtgtagaatttaatcgtgtacttagaacgtttarcttaacttctgttgtttctagactatgtcaaaattttattttggtgacattcttttatccttattccttaaaattgttaactaaaagtaaatataggacaaaataaaatatacagaaattctttttattatagaaaaaagtagttataccagtattatctctagtgtaattattattaggattatttctttagaactcaactaaatggcacatactttaaagaaagaatggtagcaccatcttgtgagagctacaaattcagtgttttagtcagagtagtttaaagtgttgactatttttatttcttatgggtggaccaaattcactttattattattattattattattattattgtattatgggttcaaataggacctggctctagagtctggttattgatgttttctgtatgtctgtacatctagttgcctaatttatgcacagaattatatgaagcatagaagcatcagactccatgtagctgagtgctcaaaaactgtttaattatatttttatgatgttatgtggtttataatatttaatgtcctttattcatgttaactgctcagttctcaaagtattttcttccttctgcaatacatggatatacacattgcattgaagtacttgtgaaacatgtagaaatgctcctacctgtgctaattccaacttatctctgatattgagaggatggatcaattaagcacagaaatgtaaacagccacaaagcccagggagaagaaatgtctgctgaggaaacagcaaaatataactgggctgcaatcttcaagcccagtgagtaaagagccaggttttaaagttgaatctcctagggtttgatataagctcacatatctgcctttctccagcatctgccatccatgaaactgtcacactatcttggccccttccagctgctgtaacaaaacaccatagtctgggcagctcatagacaatggaattttatttctcacgcttctggaggctggattccaagatcaaggttccaggagactcagtgtctggcaaggtctcggtttctgcctcagagatggtgccatctggctgtgtcctcacaagkaggaaggtgcaagaagctcccctcaggctctgtctgtaagacactgatcccattcatgagggggaaacgtaatgacctaatcagcccccagagaccccacttctaacaccatcaccttggggttgaggatttcaacacttgaatctcagggggacacagacattcagaccacagcaatgactatattaaaatagaaaaaatgtaagttgtattatctcatagattattcaaaatttagacgattgtaaccagaagcatgtgctaaatccttaggtatagaatgtgcagagaaaaataagtttaataatgtgatgaaaattacacagactgttgtggtttctgccagcctccaagacatcagcatgccaagccctaagtggttaatttttatcttaccagcagatacccccaatttctcccttaaagaacataaacgtgaatacttttttcttgtttcaggcaatttgaatcaacccatagaagtgacagcgctgtattcatttgaaggacagcagcctggggatttgaattttcaagctggagacagaatcacagttatatcaaaaacagattcacattttgattggtgggaaggaaaacttcgaggtcaaactggcatttttccagccaactacgtaaccatgaattaaagcgtatactattttcttctttgagaattacaaaaaaattatttctacactgacaggatttactagttaagcaatgtttaatataaattttaaaaaacttctgttctacaaaatttccattccgtatgtaaaagattttgtttttctatataaaaagagctgactgacatatctttaaatactttgtactaactttatcacacttactgtgtcatagaatatcatacagtttatacgctcatagttctcttgtgaacacttcaaacatcgctaagcatttgatctggccatgtatatggtagctgtgttttaatttgagaatcttgagggtagasccacaaatttcaattcttacatttccatttgcaaagtgactagagaaaaagaaatcagcttaaatgaggtattaagtaatgtttagagtygtaggtattaactagaatataaatccttagaaattgtctttataccttcaaaaattatactatgcatttatcatagaaatgtgattacaaagaagtctgactaccatgtctttaaacatatggcatctctcaacttttcttccttatggggctacatttgttcatttccagcagtagcataaacttacggtgacatggtagacttgtctctaaataaaatttttaaatgtttactaagttaatatttcaattttgtttttcttattttttttgtaaggtaggcagaagtcctatgtctcatatgcagggtgaaatccacctccgttctgggctgcctgagctccttcctgaactctagactcccctctccagctatgcactttacagctccgtttggacaaggaacaacacctcagccttcacgggctcaaatccaagctcttctttctcctcacttagcctgcccctcccacagtgttcctcttcagtaaatggaaattccatccttggatttccttggtcctcagggtgacttcagagccaactttcgttcttctatstcatgccctctattaaatccaccagagattctgttgcctttcagacactcgctgacccaatatttgcgctcccccatgcccaccctgaagcgagctgcccgctcagccccagctcccgcgtagactccttgcttcagccctggcttcacccagcaaaccctcctgagaggagcaggtgcacattgcactgtttgtcctgctatttgctcctcactgccttacgtcatacacacacccgtgcatttgcctttttattgattataccttcttaagacatggagaaggagaatgaagacacatgttatcttcacccagagagaagcaaaacagttatttcctactttctaagccctttccaatcactgctgtctcaaagggaatcatcaccctgagtctgctgtttttaattccataattttctttacatttttactacgtatgtttgtgtccttaagcactatatggtatttccttccatgcatttaaacttacaaaatttaaagttttaaacttatagaagatacaataaattcactcatttacaatggacttattgtaaagaaactatgctctatacgttcaacgaattaaaaggtggagaacttcagcagaaatttgacactataagagggaactaaatgaaaaacatgagactgaaaagtaaaataaacttaagaagataataaatggatttaacaatcatttagacacagcagaaaaaagaatcattgacctgaaagcagatcagaaacatacatccagactgagagttgactgaaaatactagaaaaaccaaaagaaactgggataaggcaagaaggtacagaaaatgagtagcgaaggttctggtcaaaaagtggagagaaaaatcaggcagatgctctacatgaagatagaatgccagagcatattccaaaactttaaaaagacgttgagctacagatttcagaattactatgaacaaacagaataaacacatgaacaagcagaatactatgaacaagcagaataaacacaaggagagtcacatatgggcacatcattataaaactgccaaaaactgcaaagataaatctaagaagtagatgagaggttgattaatgggtaaaaatgcacacttagaaaaaaataagaccaggtgtcttatagatcattagggtgactacagttgacattaatggattatacatttcaaaacagctagaagagaataatttgaatgttcttagtataaaggaaagataaatattcaaggtgttgaatatcccagtgaccctgatttgattatacaaatgcatcagattatcacatgtatatcaaaaacatgtacatctattaaatatcaatttttaaatgtagatgagaactgttataaatcactaaaatgataacaatcaaaaaatggaccaaagatttcattgatttcaccaatgaaaatatacggataccaagtaaggacaggaaaagatgcccaattatctttaacaattaaggaaagcaaacgggaactgagagtgagatgttgccaccaacctctaaatggctaaaatgaaaacaactgacgctatcaagtgtgaatgaggatatggagctctggaaactcccatgcagtgtggctggaaatgcaaaattgcatggttactttggtgtggcagtttaacttctagcccagagatttcattcctgggtatttgtccaggagaaataacaatacatgtccacataaagtattatatgatgttcataagagcttgattcataatgaccccagactggaaacactccaaatgtccatcatctgttgagtggatgaaaagcatcatgttccatctataccgtggaacactactcagcataaggaatggatcttgatacatcaacaacatggtgcatcttcagagcattttgcttcgtgtcggaagtcagacactgaagacataaatccacttacataaaattgttgaaaaggcaaaattataataatgaaaagcagataaatatttgccaggcgccagaggttgaaggaagagcttgactgccaaggttgacaagggcacatcttatgatgttaaatttaataaatctaaaacaaatacataatgcatgtggctgtcagtgggcctgttaatatttagcaagctaaagtatattagacaaacaaagaaatattaaaaaaacagattaacacacccctcagcatactgtagatcaagcatataaaaacataaatatatatactatataaaaataaaaggtatctaatgatttgagactgtaccctgaaattagactgcctatttatatcaagtatccacagaacactcccaaaagttgaccataatgccacaaagaaaacttcttttatgccatgataagaaatagtatagataacatttcctggctctgtactacaaataagaaaatccgtgctagcttgaaaacttcaaactcttagtaactcagggtatatatgtgtgtgtgtgtgtgtgtgtgtgtgtgtagagtgagtttgtgtgtatacacacacaacacacaaaaaatcctaatcaaataaaatagaaatgactatgttgcttaatccttttcaattaaattcaaaaatataaaaagtcagcttcgtaatattaaaattgtttcagaggatagcaaaataatttccaaatacttcaatgatctgagcctactactaataacaaaacacatctcagattaaatcttttaaaaaacaaaagtccaatctcattcctaaacattgttacaaaaatcctagcaacacagtgacgtgatagagaccaggtgtaaactctaggcttgttcagtattaggacatctatgatcactcatcctcttaaatggtctcacaataaaaataagatcatccccatctatcctgaagaggcatctgacaaaattcaaaccccattttttttttttttttgagatggagtcttgctctgtggcccaggctggagtgcagtggggcagagccacggacgttcacaaagatgccgattaaattttaacaacgactccccaaatgtttctaatatcaccaaaccacttccttccacagatgtcttaattttgtttaaatgtggtatttcctaactgcttccaagaaagttaaaatgaggccacagggattttctgacatctccaacagaggaaagctgttgttagcaggagcagcccggtgcctgttcgcaggggcagctcagtgcaggccgagcagcccggtgcctgttggcagaagcagcccggtgtctgttggcaggggcagcccggtgcctgttggcaggggcagcccggtgcctgttcgcaggggcagcccggtgcctgttggcaggggcagcccggtgcctgttggcaggggcagcccggtgcctgttggcagaggcagcccggtgcctgttggcaggggcagcccggtgcctgttcgcaggggcagcccggtgcctgttggcaggggcagcccggtgcctgttggcaggggcagcccggtgcctgttggcaggagcagcccagcgcaggccgagcagctgcactatgcgctctccgaagagccactgactttgcacagcaaacgtcagatacgctgcctggaaatggggcagttttaaatccactgctacagagagtgtgttgggcggtccacacttccgaaaagtctgaaatgtgaatcccggccttgagtcagtttcccgcttacttttggcgtggcgtcgtgggcggaccacgggatctggagcggtcagtccgaggcccgttcggctcccgctgcgcaaacggggagattcacgctgcctcaaccccagcctcgtctgtaaagcacccacatgctgggattcccaggggcctcggggggaaggaggccgagcgtccccgctttgtgcgtgctcctaattcttccctgggtaacacgaacgtttccacgcgagcttgatgcccacagggtgcataccaatttccatgaaaaggtaacctggacattttttttaagctaagttagaaactgactaaataattctcacattacctaaggaaaagcctcacatttaacgacagaaggttgtcccttaataaaagcaggtctcacactgcagaccctccctgctgtcagagtgatcccaaatgaaataactgtcgtgccttttactatggatataacaactcatttcctggttagaaaataaaaatgaacgaattttacagcactacggagaaaatccagtctattcacagccataaaataaaattgttaacaaatatgtcaccactaatgtgaaatgttaaaaataagggaaatttgagatgatgacagaggatatcgggactccttgtacttgcagctcagttctttctgtaaacctgcaactattcaaaaaatgaagcctattaattaaaaaatattagctgaaaccaccatttgatcttataatttaatccacttataaataaaatgtttatcattaaagaaaaaatatagtttccactttcatatgacagcagtggcctctgttttcaagattcaaaccttcatatttatgtcatgtaatttaaacttctcaagaaaattacaagtaacaggctgagaatgctctaaggatgacttgcagagctacctatagttagctactctctggggtagaaagttttagtggctggatagaagctcaaaccagccgtaatattcccttaagccaaaacctaatccagagcaagatcctaattttcttccattctatgaagtgggcagctgaagaagaagtttgaagctggcagaagttgattcatgaggtttaaggaaagaaaccagctccataggataaaagtgcaaggagaagcagcaagtgctgatggagaagctgtagcaagttctgcagaagatccagctatcattgatgaaggtggctacagtaaacaaagaatttccatgtagatgaaacaggcttctattggaaagaagatgccatctaggactttcatagctggagaagagaagtcaatgcctggcttcaaagcttcaaaggacaggctgactctcttattaggggctagtgcagctggtgacattttgttaaagtcaatacccacttgctattccccaaatcccagagtccttaagaattgtgctaaatgcactctgcctgtgctctgtaaatggaacaacaaagcctggataacagcacatctgtttatggcatggtttattgaatattttaagcctaatgttgagatctactgcttgggggaaaaaatccttccaaaatattgctcattgacaacactgatggtgatgtacaagaagataaatgttgttctcatgtctgctaacacaacatccactctgcagcccatggatcaaggagtaattatgactttttagtcttattatttacgaaatgtatttcattaggctacatctgccatagatagtgattcctctgatggatctgggcaagtcaattgaaaaccttctggaaaggattcactcttctagatgccattcagaacattcatgactcatgggaagaggtcacaatatcaacatgaacagaagtttgggagcagttttgggaatagttgctgtgcaggttgtttgtggtgaaacatgaagagaggggaggggaagctctgatgtgagggtggagcagcacctcccgaccttgagaagagtctgcctgaaagtcaggggaagagctggaaggaacctcttagtgccaaggggagtgacccaagagagaggaagcagtttcccatgtcaaaaaagacatcagaaatagcaccaagtgtaggcaccaaagtcccaagaggatggaaaacaggcggcactgatggaggcggatctggaggaagatgtgggaattccatgaatttagaagtggggtccttggctgagcctgagacggaggcagctgggagaaaaccctctgtagaagtgtgtggagcaggtcagaatctgtgtaccacctttgtgtttacattcagattagttccttaaaagaaatcttagtgggaagtcagcaggtgaaaccacacaacttttaaagctttcactataatctcaagaaagcattttcattttatgttcagcaat

SEQ ID NO: 96980 - DNA, 15219 bp, Homo sapiens
  misc_feature (1)...(15219): n = A,T,C or G
nnnnnnnnnnnnnnnnnnnnnnnnnnnnnnnnnnnnnnnnnnnnnnnnnnnnnnnnnnnnnnnnnnnnnnnnnnnnnnnnnnnnnnnnnnnnnnnnnnnnnnnnnnnnnnnnnnnnnnnnnnnnnnnnnnnnnnnnnnnnnnnnnnnnnnnnnnnnnnnnnnnnnnnnnnnnnnnnnnnnnnnnnnnnnnnnnnnnnnnnnnnnnnnnnnnnnnnnnnnnnnnnnnnnnnnnnnnnnnnnnnnnnnnnnnnnnnnnnnnnnnnnnnnnnnnnnnnnnnnnnnnnnnnnnnnnnnnnnnnnnnnnnnnnnnnnnnnnnnnnnnnnnnnnnnnnnnnnnnnnnnnnnnnnnnnnnnnnnnnnnnnnnnnnnnnnnnnnnnnnnnnnnnnnnnnnnnnnnnnnnnnnnnnnnnnnnnnnnnnnnnnnnnnnnnnnnnnnnnnnnnnnnnnnnnnnnnnnnnnnnnnnnnnnnnnnnnnnnnnnnnnnnnnnnnnnnnnnnnnnnnnnnnnnnnnnnnnnnnnnnnnnnnnnnnnnnnnnnnnnnnnnnnnnnnnnnnnnnnnnnnnnnnnnnnnnnnnnnnnnnnnnnnnnnnnnnnnnnnnnnnnnnnnnnnnnnnnnnnnnnnnnnnnnnnnnnnnnnnnnnnnnnnnnnnnnnnnnnnnnnnnnnnnnnnnnnnnnnnnnnnnnnnnnnnnnnnnnnnnnnnnnnnnnnnnnnnnnnnnnnnnnnnnnnnnnnnnnnnnnnnnnnnnnnnnnnnnnnnnnnnnnnnnnnnnnnnnnnnnnnnnnnnnnnnnnnnnnnnnnnnnnnnnnnnnnnnnnnnnnnnnnnnnnnnnnnnnnnnnnnnnnnnnnnnnnnnnnnnnnnnnnnnnnnnnnnnnnnnnnnnnnnnnnnnnnnnnnnnnnnnnnnnnnnnnnnnnnnnnnnnnnnnnnnnnnnnnnnnnnnnnnnnnnnnnnnnnnnnnnnnnnnnnnnnnnnnnnnnnnnnnnnnnnnnnnnnnnnnnnnnnnnnnnnnnnnnnnnnnnnnnnnnnnnnnnnnnnnnnnnnnnnnnnnnnnnnnnnnnnnnnnnnnnnnnnnnnnnnnnnnnnnnnnnnnnnnnnnnnnnnnnnnnnnnnnnnnnnnnnnnnnnnnnnnnnnnnnnnnnnnnnnnnnnnnnnnnnnnnnnnnnnnnnnnnnnnnnnnnnnnnnnnnnnnnnnnnnnnnnnnnnnnnnnnnnnnnnnnnnnnnnnnnnnnnnnnnnnnnnnnnnnnnnnnnnnnnnnnnnnnnnnnnnnnnnnnnnnnnnnnnnnnnnnnnnnnnnnnnnnnnnnnnnnnnnnnnnnnnnnnnnnnnnnnnnnnnnnnnnnnnnnnnnnnnnnnnnnnnnnnnnnnnnnnnnnnnnnnnnnnnnnnnnnnnnnnnnnnnnnnnnnnnnnnnnnnnnnnnnnnnnnnnnnnnnnnnnnnnnnnnnnnnnnnnnnnnnnnnnnnnnnnnnnnnnnnnnnnnnnnnnnnnnnnnnnnnnnnnnnnnnnnnnnnnnnnnnnnnnnnnnnnnnnnnnnnnnnnnnnnnnnnnnnnnnnnnnnnnnnnnnnnnnnnnnnnnnnnnnnnnnnnnnnnnnnnnnnnnnnnnnnnnnnnnnnnnnnnnnnnnnnnnnnnnnnnnnnnnnnnnnnnnnnnnnnnnnnnnnnnnnnnnnnnnnnnnnnnnnnnnnnnnnnnnnnnnnnnnnnnnnnnnnnnnnnnnnnnnnnnnnnnnnnnnnnnnnnnnnnnnnnnnnnnnnnnnnnnnnnnnnnnnnnnnnnnnnnnnnnnnnnnnnnnnnnnnnnnnnnnnnnnnnnnnnnnnnnnnnnnnnnnnnnnnnnnnnnnnnnnnnnnnnnnnnnnnnnnnnnnnnnnnnnnnnnnnnnnnnnnnnnnnnnnnnnnnnnnnnnnnnnnnnnnnnnnnnnnnnnnnnnnnnnnnnnnnnnnnnnnnnnnnnnnnnnnnnnnnnnnnnnnnnnnnnnnnnnnnnnnnnnnnnnnnnnnnnnnnnnnnnnnnnnnnnnnnnnnnnnnnnnnnnnnnnnnnnnnnnnnnnnnnnnnnnnnnnnnnnnnnnnnnnnnnnnnnnnnnnnnnnnnnnnnnnnnnnnnnnnnnnnnnnnnnnnnnnnnnnnnnnnnnnnnnnnnnnnnnnnnnnnnnnnnnnnnnnnnnnnnnnnnnnnnnnnnnnnnnnnnnnnnnnnnnnnnnnnnnnnnnnnnnnnnnnnnnnnnnnnnnnnnnnnnnnnnnnnnnnnnnnnnnnnnnnnnnnnnnnnnnnnnnnnnnnnnnnnnnnnnnnnnnnnnnnnnnnnnnnnnnnnnnnnnnnnnnnnnnnnnnnnnnnnnnnnnnnnnnnnnnnnnnnnnnnnnnnnnnnnnnnnnnnnnnnnnnnnnnnnnnnnnnnnnnnnnnnnnnnnnnnnnnnnnnnnnnnnnnnnnnnnnnnnnnnnnnnnnnnnnnnnnnnnnnnnnnnnnnnnnnnnnnnnnnnnnnnnnnnnnnnnnnnnnnnnnnnnnnnnnnnnnnnnnnnnnnnnnnnnnnnnnnnnnnnnnnnnnnnnnnnnnnnnnnnnnnnnnnnnnnnnnnnnnnnnnnnnnnnnnnnnnnnnnnnnnnnnnnnnnnnnnnnnnnnnnnnnnnnnnnnnnnnnnnnnnnnnnnnnnnnnnnnnnnnnnnnnnnnnnnnnnnnnnnnnnnnnnnnnnnnnnnnnnnnnnnnnnnnnnnnnnnnnnnnnnnnnnnnnnnnnnnnnnnnnnnnnnnnnnnnnnnnnnnnnnnnnnnnnnnnnnnnnnnnnnnnnnnnnnnnnnnnnnnnnnnnnnnnnnnnnnnnnnnnnnnnnnnnnnnnnnnnnnnnnnnnnnnnnnnnnnnnnnnnnnnnnnnnnnnnnnnnnnnnnnnnnnnnnnnnnnnnnnnnnnnnnnnnnnnnnnnnnnnnnnnnnnnnnnnnnnnnnnnnnnnnnnnnnnnnnnnnnnnnnnnnnnnnnnnnnnnnnnnnnnnnnnnnnnnnnnnnnnnnnnnnnnnnnnnnnnnnnnnnnnnnnnnnnnnnnnnnnnnnnnnnnnnnnnnnnnnnnnnnnnnnnnnnnnnnnnnnnnnnnnnnnnnnnnnnnnnnnnnnnnnnnnnnnnnnnnnnnnnnnnnnnnnnnnnnnnnnnnnnnnnnnnnnnnnnnnnnnnnnnnnnnnnnnnnnnnnnnnnnnnnnnnnnnnnnnnnnnnnnnnnnnnnnnnnnnnnnnnnnnnnnnnnnnnnnnnnnnnnnnnnnnnnnnnnnnnnnnnnnnnnnnnnnnnnnnnnnnnnnnnnnnnnnnnnnnnnnnnnnnnnnnnnnnnnnnnnnnnnnnnnnnnnnnnnnnnnnnnnnnnnnnnnnnnnnnnnnnnnnnnnnnnnnnnnnnnnnnnnnnnnnnnnnnnnnnnnnnnnnnnnnnnnnnnnnnnnnnnnnnnnnnnnnnnnnnnnnnnnnnnnnnnnnnnnnnnnnnnnnnnnnnnnnnnnnnnnnnnnnnnnnnnnnnnnnnnnnnnnnnnnnnnnnnnnnnnnnnnnnnnnnnnnnnnnnnnnnnnnnnnnnnnnnnnnnnnnnnnnnnnnnnnnnnnnnnnnnnnnnnnnnnnnnnnnnnnnnnnnnnnnnnnnnnnnnnnnnnnnnnnnnnnnnnnnnnnnnnnnnnnnnnnnnnnnnnnnnnnnnnnnnnnnnnnnnnnnnnnnnnnnnnnnnnnnnnnnnnnnnnnnnnnnnnnnnnnnnnnnnnnnnnnnnnnnnnnnnnnnnnnnnnnnnnnnnnnnnnnnnnnnnnnnnnnnnnnnnnnnnnnnnnnnnnnnnnnnnnnnnnnnnnnnnnnnnnnnnnnnnnnnnnnnnnnnnnnnnnnnnnnnnnnnnnnnnnnnnnnnnnnnnnnnnnnnnnnnnnggctcaagcaattctccccctcagcctcccgagtagctgggattacaggtgtgcgccaccatgcccagctaatttttgtattttagtagagatggagtttcatcatgttggccaggctggacaagtatttttttaaaaaaagacaaggaattatggcataaaaggctgaatggaacaggagagctgagtcctggcttatccctaatactgtaagtaatatgaaccactatttgtaactgctttcagtctgttccctaatttgtaaaatgaaaacaatcacacgaggttccctacatgcctagagggtagctatatagatcaaatgccatctggcatatgaaagcctttgaataggttaaaatgtcacactgatatgagaggtgactaccttctgaaacttccgggcttgcagatttcctgacaaaggcccaggcctcatcctctgtggcaaacttcttaaatctggcagcaggaaaccggtccacctgtgctctgcactcattcctggaaaagatgtgcaatgttatttccttcttccttctctaacttatccccttttttattgagattcttaaggttggaaatacagttgtcccttggtatctgagggagactgattccaggaagtcctccaccccatcacagataccaacatcagaggatgcttaagtcctttgcataaaatggtgtatttgcaaataacccacacacatcttcttgcatgctttaaatcatctctagtttataatacctaatacaatctatatagttgtattgtctttttatgcgtattttaaaactgtattctattttaattttttccaaatatttttgatctatggttagctgaaactgaggatgcaaactggatatagaggaccaatttttgcgtgaaaagggcagagtcgcaccttatagttttatcctgcacgtcagactctacacctgtgttctactgtatgccagccagccagcacaccagcaccataaggctttcgtcaaactcaaagcataacaaaatactgcggtctttgaaaaaaatattaaccatttctttacaacaaaaaggtcaacttctgagatgcttcttcctcaatactgtagctgccgtgcatggggaaacacaggtaacgaactttggtatcttgtagtgggaagagttctggtggtacagtcagaacagctgggctcaagtcctttctctgtcagttacatgccctgggaacttcctgaccccaagaactatacctgaaagtgagaataatccctctcacctccaagggttgttacaaggatccaactgcaaatactggcttattagaatttgccttttttaaaagggaagattaggtactgagttccaatcccaatttagctggtacggaaagtcttctggtaacgggggttcgttctgattacgtgtcactttttgttgcactttaactgcaacaaagatggaggattaaacacagggtttgttaggccacccctaacctttacgcgacgtttctgatatttcaaacaagtcttcggtgcgttccagtcccaggccatgagcctcctggaaccccgccggccgagcaggaaaacgaggcggtcccccgaccacccacagccacagcgcgcggcacagactcggaccgccaggctcccgccgccggggttagccgggctccggcctccctcgaccccgatgccggcagggaggcgcctcggcgggcgggccactcaccaggtcagaaagaccccggtcttgcggcccctcctcacggcatagaacatcccgaacccgcgagagccgcggcggcagggcaaggcggccaaggcgactctgtgggccaggaacagaagccagctcatcgctcactcccggcaccgggaagcatttcgactcccggcccagcgtgggcgcgagccgccggcgctcaacaccgcacttccgtcaccggcgcgggaagatgacgcacgtctgggcggagtcctgatgagggccggggcctagggaggggcggtgtcgtagggcggagcccggagctcggcccctgacgagcccgaactcgtcaacttcctgtcggtacttgaagaagcggagccagggctgagatcccgaaggcgggcgaggtctgggatggggcggggcctatgggagcggggctgaagccctgggcccggcagaggaaggtcgagatggaccatgttgggccccttctctccccgcccccaggccgcagttcgggggccacgccccggcgtgctcgggtcaccgcgggaagcccttgaaccccctggcgcccggcacccacgtgcggtaaccgcggctcctcgagagctccagggatgcggatctacagtaagggctgtggccagatgaatgaatgcacattttttagtgggcagaaagatgttagaattcatgaattagaataagcacaaaggagggcgagaggggaggccgtggaagccgcattcctccccttgmcttgggcgcccacccccgaaggggcgcgtcccctccctgctccactgcacgtgggtgtttaaccaggggatatccagtgcctcaagcaccacgacccgggagaaaactgagttgakaaggtaacttttagaattctccccatttgaccttttgctctgtaagcaaatcaagtaattttaaaagtcttcatgggttggaggggcgtggtggcttacgcctgtaatctcagcactttgggaggccaaggcgggtggatcaccaggtcaggagatcgagaccatcctggccaatatgatgaaaccctgtctctactaaaaatacaaaaattagccgggcgtggtcgcctgcgcctgtaatcccagctactcaggaggctgaagcaggagaggcgctcgaactcgagaggtggaggttgcatctgggcgacagagcgtgattccgtctcaaaaaaaaaaaaaaagtctccattggcaaacattgttattcgaattatttttaaaccacttttctttaattttcttaaggtcttctaacaagccttttgcacacctgccatgtattttgtcaggccttggggatgaaggtgagaaattcgagaatccccggagataacacatcagcaaatagtgcgcaggcagaacaagctgttggaggtgagagacacagagcagagaagcacccgcacctggagagtcaggagggcctcacatcagaacgcctgagcaaatacagttttgaaggatactaattttttaaaaagttcattcayatgagttagacaaagagaaagaagcaggacattctaggaagaaggaacggcccaggcaaaagcgacgcgtacattggcgtggtaagttgtgttcctctgtgaaatcgaagaacatctttttttttttttttttttttttttaaacagagtcttgctgtgtcgcccaggctggagtgcagtggcacgatgcacgattggggctcactgcaacctccacctcccgggttcaagcatttctcctgcctcagcctcccaagtagctgggattacaggcgcccgccatcacgcctggctaatttttatgtatttttagtagaaacagagtttcaccatgttggcccggctggttgcgaactcctgacctcaagtgatccgcctgcctcagcctcccaaagtgctaggattacaggcattagnnnnnnnnnnnnnnnnnnnnnnnnnnnnnnnnnnnnnnnnnnnnnnnnnnnnnnnnnnnnnnnnnnnnnnnnnnnnnnnnnnnnnnnnnnnnnnnnnnnnnnnnnnnnnnnnnnnnnnnnnnnnnnnnnnnnnnnnnnnnnnnnnnnnnnnnnnnnnnnnnnnnnnnnnnnnnnnnnnnnnnnnnnnnnnnnnnnnnnnnnnnnnnnnnnnnnnnnnnnnnnnnnnnnnnnnnnnnnnnnnnnnnnnnnnnnnnnnnnnnnnnnnnnnnnnnnnnnnnnnnnnnnnnnnnnnnacagctgcccccacctcgtcagcatatctgagggttgacctaccaagggcttgcttttctgtgcccactggctggtcctgtatcacaaggactcatcttccctgagaagtcctaggttggaattacctgaggacgcttgcaggatcatccacatgactttccacagtgccaaaaccctctctcttccttctttcttccttccttccttccttccttccttccttccttccttcctctttccttctttcgtcttttcttcctttgttctcttttctttctcctttctttctttcttttcttgtttctttcttttctttccttttcttctttctttattttcttttcttttttttccgggtcctactccaacgcccaggctagagtgcagtggcatgatcttggctcactgcaacctctgcctcctgggttcaagcgattctcctgcctcagcctcccgagtagctgggattacaggcatgcgccaccacgcccagctgatttttgtatttttagagacaagttttcaccatgttggtgaggctggtcttgaactcctgacctcaagtgatttgcccacctcggcctcccaaagtgttggaattacaggcatgagccaccacgccyggctgccaaaactatttattttgacttttcattgactggttactcctgaaaatctttttttatcttaatctctggctcatagaaatataggacatttcttatcctgagcaaacactggatcagaaatcagaagatgagtgtatatgtggtctcagtcacttagctcctttgaaacttaattttctctactgaaaaaaaaaaatgggagtgataattcccactgcaaaaggctttygttttgaggatgagattttagatgaaataataaatgtatgcatagcctattcctgacacatgacataaactcaaataaaagtcactattgccattatctattatactctgtaaattaggaataacaaaaccatttctgcttatttctcagggtccattcaagaattgtgcccacaatataccaggcacttgtccagacctgcatcgtccaatgcccacctcgacctcccaaagtgttgggattagaggcgtgagccaccgcgccctgcctgcatgtggctattgagatgtgctgtatgatacacaccrgactttgaagactcagtgtgaaaaataaaaagaattttaagaggggtgggggtcgaggggaggcagagcmgtaggacaaatagctaatgcacgcagggcttaaaacctagacaacaggttgatgggtgcagcaaaccaccatgacacatrtttatctatatagcacctacatgttctgcacttgtatcctggaacttaaaattagaaaaaaaaaaataataaaagccaacatggcattcattactgccaaaaaaattaaaacacattgttaattttgtatattgattacaggttgaactgataatattttgaatatattgggttaaagaaatacatttaaaattagtggctaggcacagtggctcatgcctgtaaccccagcactttgggaggctgaggcgggtggatcacctgaggtctggagttcgagatgagcctggccaacatggtgaaaccccatttctactaaaaatacaaaaatcagccgggtgtggtggtgagtgcctgtaatcccaactacttgggaggctgaggcaggagaatcgtttgaacccgggaggtgtaggttacagtgagccgagattgtcccactgcactccagcctgggtgacagagtgagactccatcttaataataataataaaactatttcttgctgttttacttttctaatgtgaccaccagaaaagtttagatggcttgtgtgactctcatcattgaacggagctgttctaaacatgggtaagacaacgcagagcttcggttgcaggacagagaatgaaataatagacccataagacagataagtgactgattgtgactgctagggtgtttacagcataggccggtgacaggaacgaggagtgtggggatgagagccgacgtgggcgagagtgcatgcaatgcagggtcagacgttggattcatctctcaggagttgaaaaaggtggcgttcctgttctttattggcattgcttgtgacacgaggattgcccctcttcctgaagaggttggtcaggaaaattttttgttaacttttattttaggtttgagggtccatgtgcaggtttgtttcatgagtaaactcatgtcatgggggatgggtgtacagataatttcatcactgaggaataagcctagtacccgatgggtattttttcggatcttctccctcctcccatcctccacccttaggtaggccccgttgcccaccgttcccctcctaatatccctgtgttctcgctgtggagctcccacttataagtgagaacacgcggtgtttggttttctgtttctgccttagcttgcctccacctctatccatagtgctgcaaaggacatgatctcgttccttttttatggcttcatggtattccacgatgtaaatgtaccacatttgctttgtcaagtctactgtggatgggcatttatgttgattccacatctttgctatcatgaatagtgttgtggtgaacatacacctgcatgtgtctttatggtagaacgatttagattcctctgggtatatacccagtcatgggattgctgggttgcatggtagttctgttttaagttctttgcagaatcactatgctgctttccgcaatggttgaactaatttgcactctcaatattatattgtctatagctgagaaagctgaaatgtaaagattaagtcacttgtcctcagacatgtagacaggaagtggtacagccaggactcaaacctgcctccagagcccgtcctcctaaacctaagtcatggttttcaaagtgtggtccttggatcagcagcaaaagcaccacctgggcactcattagacatggaaattctgggcctcaacccggacctcagcatgggaatccctgggggtggagcccggcggtttgtgtttgggcagccccagctgactctgaggcaccatcaggttggaggccacagtgggtgatagtccctgccctgtggtagcagccggcctccctccttcatttctgttattccatctccttcttaaaacaaccctgtgaggctggcagggcagatgtcgattttatttaacagatgaagaaactgacccttgaggttttatgacttacccaaagtcatcgcattagttttggaactgaaacttcaatggcagatcttctggctgttagtctgagactggaactagtacccacaaggactctgggagcagtaaggtcagagcaggagctactgcttcatttcattgcctctagtgaaggaggaggggggttcccagagcacggcttcttctccatgggtctagcccatgatagctgggtgcttaccctgatgtgctgatgagattctgccttatctcctgcaagccatttgtgctgtgctaggattaaacagtacactttggaaccttagctgcccacaccctgagagccaatcacgcagaacccacaggaaatctcggggcagaagtagtttgccataaatgtccattttctcattttttgttgttgtgacggggtcttgctctgtcgccgaggctggagtgcattggcgcaatcatagcgcactgcagcctcaacctcctgggctcaagtcatctttccacctcaacctccaaaatagctggtattacaggtgtgcgcctcctgtataattaaaaaaaaaacatgttttgaggccgggtgtggcggctcatgcctgtaatcccagcactttgggaggccaaggcgggtggatcatgaggtcaagagattgagatcatcctggccaacatggtgaacccccgtctctactaaaaatacaaaaaattagccgggcgtggtggcaggcacttttaatcccagctacttgggagggtgaggcaggagaatcgcttgaacctgggaggtgtagcttgcagtgagctgagatcacaccactgcactccagcctgggcaaaaagagtgaaactctgtctcaaaaaaaaaaatgttttgaggttacagggagctatgatcacactactgcactccagtctagataacagagcgagaccctgtctctgaaaaaaaagaaaaaaaattctttgtagagacaaggtttcactatattgctcaggctggaatcaaactcctggcctcaagcaatcctcctgtattgacctctcaaagggctgggattacaggcgggagccactgtgctcagcctgcatttcctgatgcaactcgttcacattccatccattatcaacaatccccacaacttcacctcctgccatggatgcctgaggctggggaaggggaacttcattcgggtgtgggcgtcaccttagccacagagaacctaaaagagtgatcaagcctcacctgaggttgggagttcgagaccagcctgaccaacatggggaaaccccatctctactaaaaatacaaaattagccaggtgtggtggcgtgtgcctgtaatcccagctacacgggaggctgaggcaggagaatcgcttgaacccgggaggcggaggttgtggtgagccgagatcgcgccgttgcactccagcctgggcaacgagagtgaaactccgtctcgaaaaaaaaaaaaaaagactgatcaagccgactgaaagtcagggtgctctgttattataactgagcaccgggaattctaaacactgtcagtgataaatactcttcccagaaaaaaaactttcttgtaattatatgtgtataattccatttttatccctaatcttttaacaaacatgtcttacatgggagttaatcccaagggctcccagctatgcacttggttccaacacgtcttcgttcagccacaagaagtttatttggttcagaagcagagtgctagcttcaggcacagtttgatccagctgatgggcactgcaacctcctgcatgtaaacagcaggtttgaagtgaaccgtggtagcactatgactataaagacaaacgaggagaacttgctttacttcacttcattccatgtgatcacttgtgcttaaaatttgaatcagtgaaacagggcggtgggaaccgcaagctgaaatatttttgttatagtgtggattttagctcatatattacacattttactgaattcaaataatgtctttaaaattgaaatttagccaggagtggtggctcacgcctgtaatcccagcactttgggaggccgaggcgggatttcgagaccagcctggccaatatggtgaaaacctgtctctgctaacaatacaaaaattagctgggcgtggtggcacgggcgtgtagtcccagctactcaggaggctgaggcagaagaatcgctagaacccggggagccgagattgggccactgcactccagcctgggcaacagaataagactctgtctcaaaaaaatattaaataaataaataaataaaatacaattgaaatttattttttttggccaggtacgttggctcatgctttgggaggtcaacggaggaggattactcgaggccaggagtttgagaccagcctgggcaacatagtgagatcctgtctctacaaaaaaatttaaaaattagccaagcgtgcctgtggtcccaacttcttgggaggctgaggtggaggattgcttaagcctgggaggctaaggctgcagtgagccatgactgcactactgtactccagcctgggtgacagagtgagatcttgtctcagaaaaaaaaaaaaaaaaaaaggaaagaaatttattgttttttaaaagtgtaattgttgggttttttttttttgagatggagtttcactctcgtcacccaggctggcgtgcagtggcgcgatctcggctcactgcaacctccacctcccgtgttcaagtgattctcctgcctcagcctccccagtagctgggattacaagcacacgccaccacgcccagctcattttcgtatttttagtagagatggggtttcgccatgttggccaggctggtctctaactcctgaccttaggtgatctacctgaggcctcccaaagtgctgggagtgcaggtgtgagccaccatgacctgccaatttttggttttgaaaccgaagaataattaggaaaatgatgattattcctattacatgattataatttaaaatagttttgttgaatggatacgggtgctgaaataatgcattctgggtatcaaatggatgcttggagtggatggatagattggatacctggtccctccaaatctcatgttgaaatctgattcctggtgttggtggtggagcctactgggagtcttggggtcatgtgcctcttggtgccatcctcttgtcccctcgggaaggagtgagttcttgctctgttagtttttgccagagctgatgttgaaacgagcctggcacctcccgcactcctctcttccttcctctcttgccatctgatgccagctccccttccccttctgccatgagtggaagctccctgagggcctcaccagaagcagatgctggcgccatgtttcttgtacagcctgcagaaccttgagccaaataaacctcttttcttcataagttacccagcctcgagtattcctttatagcaacacaaacaggctcggacagaacgccactgctgcctccccaacccctgtgagtccttccatgtacacacccgcctcggaatctgctcattgtgggaggactctccagcttacccactgagactgagtagcagtagacatgcccccttgcggcccaaggaacgactggttggtacattactgtgctaatggcactttaattgcagactttcagggacaagaaacttttgtgtttcaccccagtaaatgacaggccctaaagtaaactgtgaaggacaatgccagcaaaagtttgaggcctggcgctctttacagtaaggctttgtgcggtgatctacccgttccaaacctaagtttcctcgctggcaaaacagggataaagtttctggtgcacaaatgccacagaattgctgtggaggtcaagtggcgtagtccatgtgacaccctggaggactaaatgatgaagacaaaggtgtgtgtgcgaaccattttcacccagtcctctcctgctcaccgcctctctctgagctgggacgttcacatgcatcgacttcggattccagctctaggtttgctggttgtgtgcatctgctgcattgctccaattctgttctctcctgtgaaaaatggagataactggccaggtgcagtggctcacacctgtcatcccagcactttgggagg

SEQ ID NO: 96981 - DNA, 312644 bp, Homo sapiens
  misc_feature (1)...(312644): n = A,T,C or G
cggtggcttaagcctataatcccagcactttgggaggcctcagccaggtggagttcaggcattcaagactagcttgggcaatatgacaagacccctgtctctactaaaaatacaaaacaatagccggccgtggtgatgtgtgcctgtagtcagctacttggaaggctgaggtgggaggattgcttgagccctgaaggtggaagttgcagtgagctgagattgtgccattgcactccagcctgggtgacagagtgagaccctgtctcaaaaaataaaataaaataaaataaacactcctataaaggatcctcttagctctttttctaacacctaacctatattttcatattcatttcagttaccctacaactgttcactgagctgctgttgaataggggaaataaggcagataactactgccatctccgctgggtttagggacaatatagacattaatctgggcactttcattacaggcaatgagagctgtgagtggggaaagcacaaggttggcagaagcatttagggggacacagccattctcacggagggcagaggtctaaagcaagagccgaagaaaaagtaggaactggcctcgtggaaaggggaagggcgatgggacagcctggtggtttgtagcccactggaaggagttctgaaaactggtggtcaggtgagaaggaaagctggggaagagatgagcacgttcgccagagggtagcaggggctctccaggacctagtgagtcaagccaaggaatttaggcttcagcctgcagggtgatgaatagggctgtctattccatttcttccttctttctttctttcttttctttctttttttgagacagcatctcactctgtcgcccaggctggagtgcagtggcacgatcctggctcactgcaacctccgcctccctgattcaagcaattctcctgcttcagcctccagaatagctgggattacgggtgcctgccaccacgcctggctaattttgtatttttagtagaggcgaggtttcaccatgttggtcaggctggtctcgaactcctgacctcaagtgatctgcctaccctggcctcccaaagtgctgggattacagatgtaaaccaccatgcctggcctgaaaatttctagtttatgatacttgccagcagaatgtgttctgtcaccctcttctgaatagatatggttgtctgctatgacttctcccactgctgcccttccccctgaatccacagatgcatttcttttaaaactatgatcttgtacacaatggacgtaaatatttaatctttctatttgtatgtttttccatgtttcttttctttctctttttttttgggggggggtggtgtctgcctctattgcccaggctggagtgcactggaacaatctcagctcactgcaccctccgcctcctaggttcaagggattctgctgcctgagcctcctgagtagctgggactacaggtgtgcaccaccacgcctagctagtttttatatttttaacagagacagggtttcaccatattggccaggctggtctcgaactcctgacctcgtgatcctcccaccgcggcctcccaaagtgctgagattacaggcgtgagccaccatgcccggcctccatgtttattttctagttgcttacttgtccttttgtgtttatccttgttaactactactgccaggcttaaagtatagacccctagagggcaagattagtatctatataaaatgtactgcaaaacatctacttaagcctcacattcttaaacacaaattacttttgaagatgactgttctgcttgtttccttcctggtttcttcctttaacttttccaccaaacaggcacatgatatactttactgaaataacttatatagcaatatgaatttttttttttttgaggcagagtttcgctcttgttgcccaggctagagtgcaatggcgcgatctcggctcactgcaacctccgcctcctgggttcaaacaattctcctgtctcagcctccagaatagcggggattacaggcgcacgtcaccatgccaggctaatttttgtatttttagtagagatggggattcaccatgttggccaggctggtctcgaactcctgacctcaagtgatctgcctgccttggcctcccaaagtgctgggactacaggcatgagccaccgtgcccggcaaatttgaggtggaggttgctgtgagccgagatcgcatcactgcactctagcctaggtgacagagcaagactgtctcccacttcggcctcccaagtagctgggactacaagcatgtgccaccaggcctggttaatttttttttcttttttttttttttgagacggagtctcactccgtcacccaggctggagtgcagtggcgcgatctcagctcactgcaagctccgtctcccgggtacacgccattctcctgcctcagcctcccgagtagctgggactacaggtgcctgccagcacgcccggctaattttttgcttttttagtagagacagggtttcaccttgttagccagaatggtctcgatctcctgacctcatgatccgcctgccttggcctcccaaagtgctgggattacaggtgtgagccaccgcgcccagccaggcctggttaattttctttggtatttttttgtagagacggaggtctcactatgttgcccaggctggtctcgaactcctgagctcaagtgatccacccgccttggccttccaaagtgctaggattacaggcatgagccacagtgcccagcctacagtgcaactttaataataacaatatgaacacaaaaattctaagatctaaaatttaagctttcagtggtccttctataacagtgaaagtttggttcctaaaaagccctgaggaatttatgggaaaacaagagagacaacatttagtagtgaacctgtgcattctaaataaagacaatcacatgttataggccttcaattagtaagaatgaatattggactatgaatttttattcactgtcacttgtttgctagatgctttgagaatcttccttgcctatatttttctgagatgttggtttttctttgtcaaagataacaatgctcattccctccccattaaaaactacatatatatatatatatatgattagatgattactacatgtgctttgaaatattcaaatattttagacagtaaaagtcccttgtaattcacccctttgcagatgattggttaacaggttagtacacatctacctaaatttaaaatcccatatttaacatgtatacttattagaaagtacacattctaatatttttctgttgtatttggtactgtttccagatgctcctgcctttttgctttcataattttgaaggacctcagctccctgcctcctagatttttgctactgtggtctcagagctgtgtaatttggatgactgagacggaaaaacctctggaaaacctttatttatgttgaataagtattccttgaatccttcctcagcatcctgggttatatttgatttgctctgttcatgataacttcatgccaaggagactgctatcagctctcttaaaacagatcccaactccctgctcatagtggccaaaggaatggagatttcaggctgagtttacttacctgcatcatcatctatccagaagcatccctgcacaaacctctgtttctacccttccattcactcggctcacttttctgctcttagtaccctttgtttcttgtgaactctccagcaggagtgacttgcaatttgtatccactgacacttaagttctcagaagtgctggagaagcgtatggaagtaaattatcctgatgtataattttgtacatgtgaaactcaccgtggaagtgcctattctaatttcagtacggaacacagctaaatatttggatcaataatccagttttgaaagcacactttatttaaagtacaatgtgctgaagaaaatgaaaaaagaaagggtgctttcaaatttgtactgagtaaactttcactagatcacatcatatgtttatcactagtcacatatatgttgtatttctatgtgtaatcgtcaggcacttttaatttctagtttgcatttaccatgccagcctcctcctcaatcccaaatttcctttggttataaatttagtaaatttgaaagagccagcagggattaaaccctgaaggtattcaaatgactatctgacgttattcctcatttcagccatttcaaaaaattatgctttcatttagaataggctctgggaatcaaagtgtgtgtattttgcccaagtagaagacacagtttaaagttaacatcctagctactagaagggaaagcaaacatcgctggaaaaggagcctatttttttttaccttacactaaaactacactgcgaagatcaaaagaaatcaacatgagagtgtgcctcttaacgctaggcccaaagtagatgcttattaaatgatagtttaccccaatccttcacaaatggttgataggtcttactatttccccccattcaaatctagaattttttcactctcataaactaatcgatagtgaatggaaagcacagaatagatcatcgtccaagtgttaggtattagcctgagaaatccagaatcccatatttgtaactgtccttcttgagaaagtgcatttttcaggcggattctagccccatttttctttttaccatttttacatattatgagaggtggcttagaagtacttcgatttttgcctcttcatcacaacacactgaacgttaaaatcaagtggttgggtttttattggcttattttgtctctaaccgttttatttctcgagctgtcatcgttcttttcgtcttacatccttatgaaccttttctggattaaaaaaaatgacgttataataaggaaactaactggcgttggattcgaacgaagttgactccattccttttcctccccgtagtgtgggcgctacgaggaaagacctcggcgagaaccagcgaagcccgggctgccctcgccgtgcgggcgcacatttgctcctcgcgccgggctgcgccgggcgaccgcggccgcctcggcgtgtgtccgcggctccctcccgccctcgcccgcagttccccgatcccgatcccggatctctgggtccacagcttggctacctcccgagccggagccggagccggagccggagtcgcggctgggcccggccgccgcgtcacagggggagggaacccgggggggagggggaggggcggtgaggtcagcggcggcggcgcgtccgcgggcggcgggagcggcgcatgcgcggagcgaggcccgtgagtggcagcggcggcgcgcggggggcgggcgaggggccgagtgtgggggagcgggcgggggccgtcgaggcggcggtgtgtgggcgcgacggctgcgagttggagaggtctgtggtgcgggtcgccccgggggatccccggcgcgggcctcgcgcgacggccacggtcgcgcggcgtgtgtgtggggtccaagcacacccgcaaaacttcctcctcccctgctccgggagagcgagcgagcgtgtgtgagagagcgagtgtgaggagcgagccgcggcccggcgcccagcgccgccactggagcagctgtcaaaacttcgccgccgccgccgcccgggcctgacgggcctgacgcgcgggggaggggcggccggccgggggcgcgaccccctcgccgcccccgccgggccccgcggccggccctccccgcgccgggcccctttctcctcctgccgcgggcggctcgggggaggggccgcgggcggagaccccgggggccggcgcccctcacgccgcccgcccgcccggctgccccgcccgcccgcacccgccggccccgcccgccccgcaccgcccgccccgcccgccgccccccgcccggcccctgcgcgcggaggtgcgcgcgcccgcgccgatgtgtgtgagtgcgtgtcctgctcgctccatgttgccgcctctcccggtacctgctgctgctcccggggctgcgggaaatgcgagaggctgagccggggaggaggaacccgagcagcagcggcggcggcggcggccgcggcggcgggagccccccaggaggaggaccgggatccatgtgtctttcctggtgactaggatgtcgtcggaggaggacaagagcgtggagcagccgcagccgccgccaccaccccccgaggagcctggagccccggccccgagccccgcagccgcagacaaaagacctcggggccggcctcgcaaagatggcgcttcccctttccagagagccagaaagaagtaagttgagtgcgagggagccaggccgggagccagcggcggcgccgggccggagctgtcaccgggcgcccgccccgcggcctccgcgccccggcgccccccggcggggtgggggcggggcgggcccgcgggcggtggcggctcccggccccggccccgcgcccctcggtagccgcccgcgcccggcctcccccgctccgcgccgcccgcccgggctcccgccggcgcccggctccgcacactttacttttcagtcgggccttttcactgggtcttctccgcgactcttcttttggagaaatttctcgtagccgcgtcttggcctagctggatcattgagaaaacaagcccggagcgcgcccaggtagtccccggacggactccgggcgaaccgccgagccgtcggcgctcgggaaactctcggagctgtcaaaacgcccgggccaggtggtctcggggcgcgggctgggggcgagaagaaagcggccgggcgagtgcagcttttgtttgtcagcgacttgctcctggaacttttcctggtcccaaacctgtgttttcttcttttgatgatatattaggaagccatttgacttcttcctcccccctcccccaacacccagcaccgcactcccgggctccgaaagcacaagtcctgtgggatcccccagcttcggggaacggcctgcctaagttttggagacgtagccagcgtcccctcgtaaggcagaataccaagagcacttattcggagagagtgcagatgtaaatgtcgcttccctcgtaagtcttagctgtaaggggcttgggaatagggtcgcctgcctttgagcgtacagtagggctggaccccagcttattagaggaccagaaatgtcttcttacagaacggttatttgacggctttgcttgtaaattaagacaccgttttagtgccagcgaactgctcggcttctgtggctctcgcgtgtgccgtggaagaactgtgaatgtctctcgaagttgtagaatggcgtgtgtgcttactcatttcgtgagatgatattctcattgaactgtcgggagtggaagggtgcgctgggacgtgaaggaagccagcacgtttatggataggctgtttctttggttcgggtgcattcacttagtaatagtattgttgtttggtgatttgtagtaaaaatagtagcgtgaactgaggcatagcagagctgggttgtgggaacccattgagctcttgacttgaatgtgctcttttcttgccccgctgtccttttactatgaaaatgattcagggccttcaacttgcctccatattttattgccagctgttacctagctatgataatcgtgagggaagcaagtacaggatgtgtgtacattattacattagcttsttcgtgatacaaagttaggacttatttattatgccacttgcgttgtaatacagtggcaagtataaaatgcccttattctgtattaactgaaatttgtagaaggaagtggaggtttaagtaatttttagacatgtaagccacttttttttgcatcctttaaagcaactcaggacaagccatattggggttttaccttgattgcctcccatttcactatttgcaaagcatttcttcatctcttactgaacattaatttgcaagtattgttttaaatttgcatttgaattcttactccagaaagattagatctatgttgtcacaccccacaccccatactcctgtaagggcgtgcttgtgcacgcgcacacgcgcacactcacacgcacgcgcacactcgcacacaccctacttttgaaatgagctcatttgtattagtgcagctcctgagtgcactggacgattagggtattgccactttattattttaattctgaatctcatgaagaaataggyagcctttggagaagataaaaaatttctgctgaataacagtataatctaactatgaaamatcaaaacttttggaaatatttagaacaaatgtaagtctgtagagagctttttcttttagatttgaaaactagtactgctttctttataggaaattaaagtctactggtaaatttgacgggtctaaactttttagagcgttttttttgaaattgtgtcttttgaagggaatggaatctccagttgtttttagcaacatgtaaatggaaactaacatatgaattggaaagcaaagaggtttttgaattgtgtatctctatactgtataagaatccatgcagaaaagaccctgtagttggacagtaaagaccctgaaagtgaaacttatgtgtaaccagtgtaaattaggtttgtaaccagtgaaattatgtgaaattgcaaataattcacctgagaaatgaaaattaatcttctttgctaaatctcatagagatattttaagttgctaatgttacttagatgttcattaacttagtgagttacattaartagagaagatgccttttttttttttttctggacgaagtcttgctctgtagcccaggctgtagtgcagtggtatgatctcggctcaccgcaacctctgcctcgtgtattcaagcgattctccttcctcagcctccagagtagctgggattacaggtgtgcgccatcgcacctagctaattttttgtatttttagtagacacagggtttcaccatgttggccaggctggtcttgaacccccgacctcaggtaatccactctcctcagcctcccaaagtgccaggattacaggcgtgagccaccgcaccccgctgagaagatgccttttgacaatgaagtggatttatgtatttatctttggcttaaaaaaacatgcaccaccaattacactttcctcaagtttaaatttttaataattaggtaaataaagcattttcttgtcttatagtgttagctagattgtttttgtgtattttgtcatgaataaaaagcatagctatatagttactgcttttacattaactataaatatcttaaaattttactacctaaaatcaagaaacttgaactgaagctattaatcttagagttggaaaagtaaatacatagaggtttcctattgtacaaatgtcaagtggcacagtgaaatttacattcatttgaaagttttccttaactgtaaaaagtatcaaattatttgataatttggagtagttcatcatctttatcagaggcacaggtcttaaccattggcaggcctctgtcagaatatgcacatattaaagatctcattatttttgtgttaatgttaaaaaatttttctgaagcttttttcttattttttccatccttacactgtaaattcacattaccaagttgggaagccaaagaaacattctactctactatgtttcttaccagttcatgaaagttgatgttagaaatgggtgtgggtgtgggggatgggggtggttgtacagaagcagcaggtggtaggtataggatttctgaagcactatccttggccttttttgagtaaactctttataccctgaaccactttcttttcagagggcaattgctattattagagagccaccttaagcattattgttgtagaaaaattaggcacaaccagtgattgtcattacaaggaccagcaaaaatggctaggttgctactctgtatttgtaacgcccttcccccaacaaaatttctccttttcatagctgtgaatttgaaataagtgatagaaaactgtactgcattacaatatataccatttaataaaacaagtttatagttgagagacagcactattattcatgctttttgagataatgcaaatttgtaatttttatgacagcaattcttaataatttattgtccaagagatctgataaaatttttgatattattggtctctgggactcaataggcactgaaatgttttaattcagttgaaaagttgactcaggattgctaccctctcttacctgttaggaggttgttgtttaacctgacctgaaattcccatgaataagaacctgttttttttctttttttttttttttgacagagtcttgctctgcckcccaggctggagtgcagtggtgcgatcttggctcgctgcaacttccgcctcccaggttcaagtgattctcctgtctcagcctcccaagtagctggagtagctgggactgcaggcacgtactaccatgcctgactaatttttgtatttttagtagagacggggtttcaccctgttagccaggatggtctcaatctcttgacctcrtgatctgcctgcctgggcctcccaaagtgctgggattacagacatgaaacaccgcacctggcccagggaatttctaatatttgagaagatgttatttttagtctattatacaaatttatatattgtttactaatatataaatttacatattagttactaatatgtaaacttaccaatttacatattggttactaatatgtaaacttgataaacatggatttccatggaaatataaaagtatcacaacaatttgttttcccattctgacacttgtgatttattacattttcgtactatttcagttaattccataatgccagaattgttgttaatctgccaagtgacaagccacactgcttcatctcattcctctgttccgcaaaactgcaaagtttcccagaccacagtcaggtttctctgggtagatagtggttgtccaactctgtaaacttaagtcactttaagtttatgatggaggggcttcgtgaaacttcattgaccttccaaggtgaaaattggtcagtttccagttataaaggacattaaggatgggtgtggtggctgatatatgtaatcccagcacttttgggagactgagtcaggaggatcacttaatcctcatttaaaaggagtttgagaccagcctgrgcaacaaagtgaggccttgtctctacaaaaaaattagctgggtgtggtggtaggcacctgtagtcccaactactctggagactgagctgagagaagattgtgtgaggcttggaggttgaggctgcagtgaacggacatcacaccactacactctagtcaggtgacagagcaagactctctaaataaataggaacattagatggtctctctgcactcttgcctggtggggacgtgttagataccctcgttaggttgtgatttagtttttaatctgtgagatgtttgggccaaacaacttttagctgccatggaataaactttacagtcagcgtgtgagtttgtgtttgcctttacttttttttttctatattgttttggtccatttttatcttttaatttcagaaagctgattaatctcttccttttctctttaaaaattttctttatcatgtttgtgctacagtggttattttgagaacttgttggcaggataagtggcaaaagttacgaagtagaatagagatgatttctgtttttttttttttttcttttttttgagacagtctcactctcttgcctaggctggagtgcagtggcgtgatcctggctcactgtggctgccgccctccggattcaagcgattcgcctgactcagcctcccaaaaagctgggattacaggcgcatgccaccacacccagctaatttttgtgtttttagtagagatgggtgttcaccatgttggccaggctggtctcagactcctgacctcaggtgatctgcctgcctcggcactcccaaagtgctgggattacagacgtgagccaccacgcccggctgagattatttctttttttattatagctattgcttgtagatatatgctggtggttatctgtgaaaatgtaatagaaaggctgggcacggtggctcacacctgtaatcccagcactttgggaggctgaggtgggcggatcacaaggtcaggagtgggagaccagcctggccaatatggtgaaaccccgtctctaccaaaaatacaaaaattagctgggcgtggtggcaggcacctatagtcccagtgactcgggaggctgaggcaggagaatcgcttgaacccaggaggcagaggttgcagtgagctgagatcatgctattgcacaccagcctgggcgacagagtgagactctgtctcaaaaagaaaaaaaaaaaagtaatagaccaatcttggatttataattggaagtgttgatccctttatttgcagaatttgaaggacttaagagcacaagttgagagaaacaaatgacacagctctttttgcactttgtaatattctagaaaaagcctcaggtaaaaggaaaattgtttcactttgtttctgctgttaattttgtgatggcagtaactacatatgatctacaagtgtaaaattgtttaacaagtcttaagttttctatacttctatgtaactttttagatctttcatttggtacatgttatttaaagagctacaaagtgctaaatatgtcctgggatgaacagtcaaccctggaagatttattgtggcctagaggggtgctcaaagatttggaggaagtagtatttgaattagaccttgaaggattggtgggatttagccaagtagaatgacaagaaaatgagtgtgtgagggagcaatgtgaatgaaattattgagggaaggaggtgtaaaaggtggggtggcttctgactgtgtgactagaacagaggctgtgtgtagtggtgaggccaagctgtgatagttcttgaatgccagactcatgagtttgggctttatcctgtagtccaggagttataaactgtttacagggagcaggtaagcaatttaaatgaacagtaggcygcttctaagaatctgaatgacaactgacactttagaccttgggttggggagaaaatgggaaataataacagccttggggaagtctaggagtccttatgccctgcttaaggtgaaactgatacagaattctggctgatggttgctatttgagatgctgtttctagatttttcaagagggcggaaatttggatttttatgatttttttttttcttttttgagatggagttttactcttgttgcccaggctagagtgcaatggtgtgatctcggctcactgcaacctctgcctcccgggtacaagtgattctccttccttagcctcctgagtagccaggattacaggcacccaccaccatgcccggctagtttttttttttttttttttttgkatttttagtagagacggggtttcaccatgttggccaggctggtctcgaactcctgacctcaggtgatccacctgcctcagcctcccaaaatgatgggattacaggcatgagccaccgcacccagccctttttatgatttttaaacttggattttaagtgtttttcattaattagaatctaaaacggtatttgcgcctatactttgtaggctaggtttaatctgcggaccaccaggggactacaggtctcaatctctgctttatgcccagttattttattttttaaatgaaagttttcaaagcaggtatttacagtattcttgaggataggaaccttactaaattactttgtattctgtttagcatttatgcatttgaatgtaggcactcaaatacttggtgatttaatgatgcctattattaaaaaaacactgtggtaataatatggagacaggagttacctggaggcagagataataggctgttacaatagttgtagtgtgagagatcaagccaaagcatagaatgttggtagtgcgaatggggaggaagattccagtcactgcaaaggaggaattcggcagtttctggcatagatgttgtagcaggcatccaaatagattggatgcctgctaagcattcggggaagtaggactggagttgaggaatcgattaggataagtatttaaagatgtgacttaacatgtaatcactgagaatatggcgtatgggaattagtaaaggattaggatgctttgttgcccttaggagataggggaccagttatacccggaaaaacaagaaaggaaatcagaatatattctcatgacaaatggacaacatatacatacaagatgctcatggcagcagtattagtagtagagaaaagttggcaacaacaaaatatgcatcaatggactaccatgcagttttaaatcaagacatagagatagatctgtgggccctgaagtgggagaatgtctatgatacattgttgaactagagaaaaacctttccaaaagttgtaaagcagtaagtttagcagtaactttattttgtgaaaagcacataaacccaaactgtgtgtatattttgtgcatataaaaagattgggaagaatacataataaatattaatactctgggggccgggcgcagtggctaacgcctgtaatcccagcactttgggaggccaggagggtgagtcacgaggtcaggagttcaagaccagcctggccaagatggtgaaaccccgtctctactaaaactacaaaaattagccagtcatggtggcaggcgcctgtaatcccagctactcgggaggctgaggcaggagaattgcttgaacctgggtggcagagtttgcagtgagctgaaatcgtgccattgcactccagcctgggcgacagagtgagactctgtctcaaaaacaaaacaaaacaaaacaaaaaaaaactctgggkagtatattctttcagtatacatttatgcatttaaaaaaagaaaaaagcttaatacttcagaaatggtaaatcatttgacaaatgagaaaaccaaattctgggggcatcactgattatagagcctagaccttctggattcaagtctaggttgtactacatattagctgtttgaccttgggcaagttacttaaattttttgtgctatggttgcctcacctgtagagaggacgtaataatacacctaatttaggattgttatgaatttatatatatgtgtagaatttagaacagtttctggcatagactaagtcctattaagaggtgctgttgtaaggatttaactactgttgttactgtcattgccactaatcatcaattatcaatcagttgcctgttataaactatttagagacagaagtgattagaaaccaaactcactccaaaaatgccatgatataaggctgggtatgttggctcacacctgtaatcccagtgctttgggaagcaaaggtgggaggattgcttaagtctaggcgttagagaccagcctgggcaacatagtgagatccccatctctacaaaaaattaaaaatagctggatgcggtggtatgcacttgtagctccagttacttgggaggctgagatgggaggattgcttgagcccaggagttggaggctacagtgagctgtgatcatgccactgcactccagcctgggtgacagagcgagaccctatctcccaaaaaaaaaaaaaaaaaaaaaaactatgacataaaataatgcagttgttattggaggcggggatagtggggtggcaaagattttctttgtacgcagatgtccccaatatatagaagaaagatttttaaaaagctaggtcagcagaaatctctatgaaatgtttttcattatgagcaatacacgaaaaacagtcaaagcaattccctaggagttgtatatgtagtaatattattccaaagttttttattgctcaaacttttaaatgttgttagagtagatttttacatattataactctactggctagggttttattagtaggcctccctcagtgagacttgttttaggtggttttaaaatgatttcttacatcttttatccttggtcactttaaatctttacaccttattgtaatcgatttacattagaagcagcatacttgatggtctcagtgaagtctgtgtggtggtgttcttttagtggagcctagcaaaaaaagaatttccttgatttcctgatctttgggattctagtcatatggaccacatttggaataagcacatagttgaatataaaatgacaaaatgaaacataaccatattcttaaagttctcattgaattgttctaccatagttgaagtgtttggtcagtatggccaagtgtttgtttgtttttgagacggagtttcgctcttgtcaccctggctggagtgcagtggcacgatctcggcttactgcaacctatgcctccctggttccagcgattctccttcctcagaccccggagtagctgagagtacaggcgcccctccaccacgcctggctaatttttctatttttaatggagatggggtttcaccatgttggccaggctggtctcgaacttctgacctcaggtgatccacccaccttggccttccaaagtgcagggattactggtgtgagccactgtgcctggccctaagtgtttcttatattagactttcatacttatagagttgtagaatattagaactattaatagatgagaattcaagaagattgagtctaacccctcattttatagataactgagccccagagagattatggaatactagaagtcatatattraggtgttacttttacagtaaataaaggagatggtagtctactgtattggtgtagacccatagtaaatcatgcctatgggtattcatgctattgtatagtcatctctctttgtatctcgcctagccctgtgactcactttaaccagtagaacatagcaaaaatgacactttgctatttttgggtacaagccttgagcatgtcaggcagcttctacttttgtactcttgggagctctgagttgctgccgtgcaagaagctgtcataccttgctggagagatgatgtggagaggaagagattccaggactatatggaaagagggaggcttaactatctcagtgtcctagctgccttcagcccttagttgacttgcctgttgaatacagacacaaaagtgattagtaagattagcgaaggggccggcgtgggggcttatgactgtgcagtcccagcactctgggaggccaaggcatgtggaacacttgagcccaggagttcaagaccagcccgggcaatatagcaagacactgtctctacaaaaaaatacagaaattagctgagtgtggtggcatgtctctgtagtcctagctacttaggaggctgaggtgggaggattggtcaagcccaggagggtgaggctgcagtgaaccattatcttgccattgcactcaagcctgggcgacagagtgaaaccttgtttctctctctcacacacaaaaaaaagattaacagaggaaccacctagctaagctcagtccaggttacgaaatcataaataagtgaaatgctggttgttttaatctgttttgctggaagcagatagttttctgaattaagggacgctaagaacaaagagtatttggagctgggtgtggtagtacatgcctttagtcccagctacttaggaggttgaggtgggaggatcacttgagcagaggagttggaggctgcagtgagctatgatcctgcaactgcaccccacccagcctgggtgacagaacaatacccggtctcagaaaaaaaaaatgcatttgggatacgagtgataaaaatcattattttccatcctcttttactgaaatagttaaatgaagttkctccttaaccttaccctttatttttctaaagtattttgaaatacagatttttattattgaggactttaaatagtatttaaaaatggaattgtcacagtgtagattgggctatagttaggtcatacagaatagaaagataaaacaattatgaatatcaaccctaaaaaggatatagtttatttatttatttatttttgttgacttgtacagagatctttatatatttgagcatcctggactcttgacagaagaactgatttctatttctgggccaattcttaacagccgggtatatcagtaaggactaggtttgtctttatgtgattgaaaaccccgtaataataatgacttgaacaggagtgtttatttctgtttcacttcaaaatctggagggtaggtactgaggctggtattgtccctctacactgcaaagtcatcaggagtgtctccctttatctaacttctcagacatttctaggttgtggcctttgccctaagattccttgatggctactaaagtcccaattacattacatgcatgtcccatgaagcaaaatacagaaaggagtccaagggcacacagcctcctcctttgaagaaatattgtatgttttctcttacatataattggctagaactatcacagagttcacatggctacctgtagctgcaagggaggctgggaatgtagtttgtttgttttctgagacagagtctcgctctgtcatgcaggctggagtgcaatgacatgattttggctcactgcaacctccgcctcccgagttcaagcgattctcctgccttagcctcccaagtagctgggattacaggcatgcaccaccaagcctggctaatttttgtatttttagtagagacagggtttcaccatgttggtcaggttggtacgaactcctgacctctggtgatccacctgctttggcctcccaaagttttggaattacaggcgtgagccaccgcacccggctgggaatgtagtttttttttctttttttctttttttttttttgagatgagagtctcgctctgttgcccaggctggagtgcattggtgtgatcttggctcactgtaagctccgcctcccgggttcatgccattctcctgcctccacctcctgagtagctgggactacaggccaccatgcctggctaattttttgtatttttattagagacggggtttcaccgtgttagccaggttgatcttgatctcctgacctcgtgatctgcctgccttggccttccaaagtgctgagattacaggcgtgagccactgcgcctggttgggaatgtagtttttttagatgagtaccttgctacttagaataggttcaaagtctggttactgatggtgggaataaatattacagaaatagctagtaaatagtctttaccactttgagcaattggtttatcaccataggcctaattttctcatgtgtgagaattatgatactgaagttcttgcgatggcagataatttcatgttgaggcccggttgattggtagtgactgctttcaacaatgctttgttgaatcctgagcccccagggttttctttttttttctttttgagacagagtcttgctctgtcgcgtggctggagtgcagtgatgcgatcttggctcactgcaacctccgcctcctgggttcaagcrattctcgtgcctcagcctccctagtagctgtgattacaggcatctgccaccacgcctggctaatttttttttttttttttttttagtagagactgggttttgccrtgttggccaggctggtctcgaaatactgacctcaggtgatccacttgccttgtcctcccaaagtgctgggattacaggtgtgagccactgcgcccagccctaagcctccagtttttgacctcagcatggtgaggaagtagtagaagtatgtattttgggtgaagaggagagtaaaagcatgctcccatttatatgctaacgctgtgctttttaaaaatgtggttacttcaacttttgtaatcttttcattgaaaacatttggttattctgctaacctttgactattctctttaaaaatgtcctanattcattccatattttaaagttttctaataaacctgagttcccacttgttttttttccttccagcttttattttaggttcaggggttacatgcacagatttgttaacatgggcacattgcgtgtcgctgaggcttagagcacaaatcattttgtcactcagatagtgagcatagtacccagtaggtagtttttggatcctcaacttcctcccagcctccaccctcgagtaagccttggtgtctcttggtcccctctgtgtccacatgtacttagtgtttagctcccacttggaagttagaacacacagtatttggctttctgttaattaattcgcttacgaataatggcctccaactgcatccatgctgttgcaaaggatcatttcattctttttttatggctgcacagtattctgtctcgtatatgtaccatgttttctttatccagtccgctgttgatgggcagttaggttgattccatgtctttgctgttgtgcaaagtcctgtgatgaacatatgtgtatgtgtgtctttatggtagaacgatttctattaatttgggtatatatccagtaatgggatacctggattgaatggtagttctcagttctttgagaaatccccaaagtgctttygacagtggctgaactaattaacattcccactagcagtgtataagccttcccttttctctacaaccttgccaacatgttttttttgtgtgtgactttttaatcatagccattctgacttgtgtgagatggtatctcattgtggttttgatttgcatttctctaatgataagtgatgttgagcattttttcatatgcttgttggccacatatgtcttcttttgagaagtgtctgttcatgccctttgcccatttttaaatggggttgttttttgcttgttttttttttattataaactatttttttattatactttaaattctagggtacatgtgcacaacktgcaggtttgttacatatgtatacaaggtgccatgttggtgtgctgcacccattaacttgtcatttacattaagtatatctcctaatgctagttttttgcttgttgatttaagttccttacagattctgtatattaggcctttttttttttgagatggagtctctttctgttacagtctggagtgcagtggtgcgatctcagctcactgcaacctgtgcctcccgggttcaagcaattctcctgcctcagcttcccgagtagctgggactacaggcgtgcaccaccgcacccagctaatttttgtatttttagtagagatggggtttcaccatgttggccagaatggtctcgatctcctgaccttgtgatccacccacctcggcctcccaaagttctgggattacaggtgtgagccactgagccaggccaggcctttgttgaatgcatagtttgcagatattttctcccgttctgtaggttgtctgtttactctgttgataatctcttttgctgtgcagaagttcccgctttgtgcagaacattccaaacactggagatagggatgatgcagataaatactaaactcctttaatgtgtatatcagaatatayagaatatgttacggtgacaaaggatcccaattcttagtggcatcagtcacaaaggttcatttcttgctcatgctatgtgttcatcacagatcggtgtgggtgttagattataggtgacttaaaatctcttcctttcaaagtacatttctgaagcatggtttattcttagtcagatttgcttttcctatttgttctctgttaatcacccaaggaggatgttaggcaaaatcaaatactgagaatctgctgtgtattatacagtggagagaccaaaataaggcaagatccctaccttcaatttctggtaactcagtgcaaagtataatgcaaatgacacattttacaatagatttcagaaagtgctgaggaagcttagagaaggaagaacttatctcagaggaactgaagaaagaagacatctttgttgagtgtttaaaaatgaaaacagactttaccgaagagaaaaaggggagtgagaaactagtacctggctattatgtgttaggcactactagtgcttaccagaagttacctttttgataattactgatcacatggggttgaatcattagtacgttttacaaatgaaagatgaatttttatatagcttgtaagtgattgagtcaggatttgaatccaggtgtgtctgaccctgacctttgctttttaagagactacagtccaatatgggaggaaatgaggaagggaaagtaaattgggcattttgaatattaactgtaaacaatagggagccattgaagatgttaaacagaggtatgacattgtatctgtgttagaaaaataaccggcaacaactgtaaaactggaactaatgattttttgcatgtgattaagtatcaaatgaagtataatttctgatctcctttaatttgtttgtagtattttataattttcaatgcacaggtcttgtactttttttgttaaattgattcctaagtatttcattgtttttgatgttgttataaatgtaaatgttttctttcccccacttttttttttggagacagagtctcgctctgttgcccaggctggagcccagtggcatgatctcggctcactgcaatctccgcctcccgagttcaagtgattctcctgcctcagcctcctgagtagctgggattacaggcgtctgccaccatgcccggctaattttttgtatttttagtagagatgggcttccaccatgttggccaggctggtctcaaactcctgaccttgtgatccacctgccttggcctcccaaaatgctgggattacagacatgagccaccatgcccagtctattttttttcttttaaatgaaaaacaaatctttttatgtagggacagtcgtctcactatgtcacccaggctggtctcaaactcctaggctcaagtgatcctcccaccttggcctttcaaagtgccgaaattatagacatcagctaccacacccagcctgacctattctctttcaaacttttttcatatacacagtttttttttttttgtgatactacttatgtacatttagagttttgtaacctactttcccttgtaacatgtaaaagaaaatttccgtattgttaatcttttataacatttttgaagggtgcttaattttccattgagtaaaactgagggctgagtgctgtcgctcacgactgtaatcccagccctttgggaggctgaggcaggcatatcacaaggtcaggagttcgagaccagcctggccaacatagtgaaaccccctctgtactaaaaatacaaaaattagccaggtgtggtggcatgcgcctgtagtcttcagctgctcaggaggctgaggcaggagaatcgctggaatccgggaggtggaggttgcagtgagccaagaccacaccattgcactccagcctgggcgacagagcgagactctgtctcaaaacaacaacaaaaaactgagtaaccacactataatttatgtaaccatacagctgtctccmcttttcctcttctcaccctactgccttttgttactatgtgtaatgctctggctgacctttttgtagataaagcctttttcatattttggttatttttataggacagattaycataggcaggataattaggttaaaaaataagcatttggccgggcatggtggctcacgcctgtaatcccagcactttgggaggctgaggtgggtggatcatctgaggtcaggagtttgacaccagcctggccaacatggtgaatccccatctctactaagatacaaaaattagctgggcgtggtggcgcacacctgtagtcccagctacttgggaagctaaggaaggagtatcgaggcaaaggttgcagtgagccgagattgtgccacttcactccagcctaggtgacagagtgagactccatctttttttttttttttttttttaaaagaaagagggtgggcgcggtggctcatgcctgtaatcccagcactttgggaggccgaggtgggtggatgacgaggtgaagagattgagaccatcctggctaacgtggtgaaaccccgtctctactaaaagatacaaaaaattagctgggtgtggtggcaggcgcctctagtcccagctactcaggaggttgaagcaggaggatggcgtgaacccaggaggcggagcttgcagtgagccgagatcatgccactacactccagcctgggcgacagagcaagactccgtctcaacaacaacaacaacaaaaaagcattttttgattcttcatagatattcagaagcatataggctctaatgtctatttgcttattgtcaaattctggtcttatcactttctagttgttggactttgtataagctgttcaatctgtatctgtttgttacctataaaatagggatgataataacatctttgtcacaggattattaaaagatttaaagagggtatatgtgttaagaaagccgctagaggccaggtgcagtggctcatgcctgtaattctagcactttgggaggccgaggtggatggatcacctgaggtcaggagttcgagaccagcctgaccaacatggtgaaacccatctctagtaaaaatacaaaaattagccagacatggtggtgggcacctgtaatcccagctacttgggaggctgtggcaggagagtcgcttgaacctgggaggaagtggttgcagtgagctgtgcctattacttagtaagttcttagtaaatacgaactttttaaaattttttccttcttatatttgatgccttagcaagcaataaatataaactctttttttgagataaatataaactcttttttttttttttttttttgagatgatgtctcactgtgtcayccaggctagagtgcagtggtgccatctcggctctccacaacctctgcctcccaggttcaagggattctcatgtgtcagcgccctgaatagctgggattacaggcgtgtgccaccatgcctggctaattttttgattttagtagagacaaggtttaccatgttggccaggctagtcttgaactcctgtctcaagtgacctgcctgctttagcctcccaaagtcctgggattacaggtgtgagccaccgtgcccggcttgatctcttatttttttaaattacattgaattttttttttttttttgatacagagtcttgttctgtcacccaggctggagtgcagtggcatgatctccgcttactgcaacctccgcctcctgagatcaagcggttctcctgtcttagcctcccaagtagctgggattacaggcgcgctaccatgccyggctaattttttgttgttgttgtttgtttttttttgagatgagtcttgctctgtcgcccaggctggagtgtaatggcgtgatctcggctcactgcaaactccgcctcctgggttcacgccattctcctgcctcagcctccctcccgagtagctgggactacaggtgcctgccaccatgcccggctaattttttgyagttttaatagagatggggtttcaccgtgttagctaggatggtctcgatctcctaacctcgtgatctgcccgcctcggcctcccaaagtgctgggattacaggtgtgagccatcgcgcctggcctacgcctgactaatttttgtatttttagtagaatactaaaaatacagggtttcgccatgttggccaggctggtcttgaactcctgacctcaagtgatctcccctgccttggcctcccagaatgcttggattacaggcataagccaccatgcccagccctgatctcttatttttattaaagttttgaaatgccactccctaaaaaggttgcatcaatttgtaatgtcattagcaatgtgtgataggtctagttttatcaaacctttgtcatgtatgatatattaaaatctttatcttaacaacagaaaaaaagtagtyctaagcttttacttacttgattagtaggactaatgaatattttgaatttctttttcttttttctttgagacctgagtcttacactgttgcccaggctggagtgccgtggcacgatcttggcttactgcaaccttcgcgtcccaggttcaagcagttctcctgcctcagcctcccaagtagctgggattacaggcatccaccaccacgcccagctatttttttgtatttttagtagaaatgggktttcactatgttggccaggctggtctcgagcacctgatctcatgatccacccgcctcggcctcccaaagcgttgggattacaggcatgagccaccgcgtcagcctttttttgaattttattacttgtatttcttgcgaattgcccagtcgtgttttgtccatggtttattggggtgggggcattctaactgtttcgtatcattaatttaagcttgttgtatgacatatttgctctaagaatttcacctcatttcattgtataggtaattatcttttgtgtagtgaaaagtcccattatttcttttagttcatttaagattttattcaattatttatagaagtagtaagataaatatttgtagataggtaaacaaagcattagaatttttgacttttagaaagtaaaatcatttgatttaatgtctatttttgttcattcctatttcctatctaattaatagaacacagtactgggaggaggaacaaaattttaatcatgatattgctgtttttcataataatctaggactagtaataagtcctctctttcatccagaaaatattgaaggccggatgccatcacctgtaatcccagcacttgaggctgaggcaggctgatagcttgagctcaggatttcaaaatcagtctgggcaaaatggtgagatcctgtctctacaaaaaaataaaaaattagctgcatgtggtatgcacctgttgcctcagctgtttgggagactgaggagggaggatcgcttgagccttggagattgaggctgtagtgagctgtgatcatgccactgcactctagcctggtagcagagcaagaccctgtctcaaaaagaaaaaaaaaaagaaagaaagtattgagaagttaacttatttcattaccttaatgaaaaatagttaaggccaggtgcagtggctcacgcctgtaatcccagcactttgggatgctgaggtgggtggatcacctgaggtctagaatttgagatcggcctgaccaacatggtgaaacctcttccctactaaaaatacaaaaatgagccaggcatgatgccgggygcctgtaatcccagctaaaaaaaaaaaaagattttttccaaatacagtatttttattaaatcttattgagtagttttcacattggcaactctgtgtgtttctttctttttttgagacagagtttcgtgcttgttgcccaggctggagtgtgatggcacaatctcggctcatggcaaccttcgcctcccaggttcaaacgatactcctgcctcagcctcctgagtagctgggattacatgcatgcgccaccatgcccggctaatttgtatttttagtagagatggggtttctccatgttggtcaggctggtctcgaactcctgacctcaggtgatccgcacccccttggcctcccaaaatgctgggattacaggtgtgagccagccaccacacccagctttttgtgtttcatatgcatttttttttttttttgaaacagagtctcactatgtcgcccaggctggagtgcagtggcacagtattagctcactgcaacctctgcctcctgggttcaagcaattctcctgcctcagtctcctgagtagctgggatcacaggcgtgcgacaccacgcccagctaaattttgtatttttagtagagacagggtttcaccatgttggtcaggctggtctcgaatttctgacctagtggtccgcccgccttggcctcccagagagttgggattacaggcatgagccatcgcgtctggcctcatacattttctaaatgacttttgtaaattttttttttttttttttttttgagacggagttttgctcttgtcacccggactggagtgcagtggtgcgatctcggctcactgcaacctccgcctcctgggttcaagcgattttcctgcctcagcctcccaagtagctgggattacaggcgcccgccaccacacctggctaatttttgtatttttagtatagatggggttttgctatgttggctaggctggtctcgaactcctgacctcaggtgatccacctgcctcggcctcccaaagtgctgggattacaggcgtgagccaccatgcccggccagtttttgtaattttaaagagaacaaaaatcctgagatggaaacttatgtagaattttattcatagttgaagttagttacagtggaaataaaaactagaaagttgcattgtatcttctaaacatatgtatttaacataatttcacatttcattatagatggttctttggaatgatatttaaaaattttgtggctgggcgcagtggcttacacctgtaatcttagcactttaggaggctgaggcaggcggattgcttcagctcaggagctcaactagtctgggcagcataacaaaaccctgtctctacaaaaaatacgtaaattatccagctatggtggcccgcgttagtagtcccagctactcgggaggctgaggtgggaagatgacgtgaacccaggaggtcgaggctgcagtgaggtaaaatcgcaccactgcactccagcctggacaaagtgagaccctgtctccgaaaaaagaaattgttataatgaatgaatagatttacattgttagtttagttttgttttttttctcagaagtgtagagtttgttcttagtctgtccatctgtatacaagcatgaactgtacagtcaactgccttgtagaggggctggtttttggttatgtcttaaatcttaactccttttaattattctgaattttagtgggwttcctrtatcattgtagatttggaaagtattgagtaggagatgataatctataatcaggattctgagttggtaagattttatagatctgaaaaaagtaatttcttgaccttggcctcaataagaaagtcagaacttgacccttatttaccagcaccatcccccccaccacaatatttaaagtgtttaaatcatttattttgaaattcttatgtgatccaagaccactgtgcayttaagctagtttattygtttattaaaacaaaagaagtagactgcagttacgttgtttctttttytgttgtttggtgtcaggagtagaatacatttggccagcttcatgagaggattagaaagttggagaaggaaaaatagaattgtttacggagccaggagaataattgtctataattatagatgcttgttttgaggtttggaaaaggtggtttaaaaaacttttaagaaaaaacatgataaacatctataaatatgaggaagaaaaattggttgcaacattaaaaaaatttttttttgagagggagtcttgctctgtcgcccaggctggagtgcagtggcaggatctcagctcactgcaacctccgcctcccgggttcaagccattctcytgcctcagcctcctgagtagctgggattacaggttccygccacgatgcccggctaatttttggatttttagtagagatcgggtttcaccrtgttggccagactggtctcaaactcttgcctcaagtgatcagcctgccttggcctccyaaactgctgggattacaggcatgagccacygctcttggccaggttgcaacatcttcattagacttgtttaaatgaraattttcctttgttaaatggaagaaaataggctctgtttgggagagtgaggcccaagtaggacatccttgatacacattgaagatctatttatttatttatttaaattttttgctctgcaaaattgaccaaagaatgaagatcattttagttggttaatatttcagttttgacttcctggccagagatagtagattggaaaggatttagagatttactgagggagttaacccaagattttaacattgtgatgcaaaatgatgttaaaacgcgttcgtttcccttttattatttaaagaaatcctagatttctttaaataatacaaagtaattaaatggacctgttgggttatttgaaattaagcagtagacaggggaagttcttgtaagtggttactaaagcgttaacattagaggcattctccactggctggctgtagcagagtccctgatctgggctttggagaaatccatcccacctttttttaggtgcctgctttacgtcggatctactttctctactcgtgccttttcttccaccttcttccccctcctctttctcatagatggtgyggaggtgggagagagggagggagagggagatcaactgattattgtgtgttgagggggtggggggtcagagattctctgggccataaaagttgcacgaaataaaatgctcttttttttcttgtgtgggccctgccatgagatcaggttgtcggacttgattgggagccacggatcccgccctactgaaaacattgttgcaggatgggatgggatgaagctgaaagtcttatcaagtggtattatatctggcacaacaaaaggccagaaccccaaaatatcctaaggataaaaagtttttgtttcttttcataggatatttttgtatctggtttggaaggatgacttgacttggattgtactgttaaagacaaaatgaactattgtatttattatgtatttaaccttattaaagcattaagtatgacagcactagttatagagaattgtgtgtgtatgcacacatatacacacatatacatatatacacacaccatatatatatwttttttgagacttggtctcgctctgtcatccaggctgaagtgcaggagtgagatcttggctcactgcagcctcgaccttccaaccccagtgatccttccacctcagcctcccaagtasctggggccgtggggatgtgccatcaccaccagctaatttttttatcttttattttttgtagagacggcgtctctcgatgttgcccaggctgacctcgagcycctgggttcaagtgatccacctacctcaacctcccaaaatgctgggattataggcgtgagtcactgggcccggctgagatgtatatattatatatacatctcatatacatatacatatatacataatctcatatataaaaattatacattatatataatatttataatataatatatataaattaaaacttaaaaaaaattttattttatttgagatggagtcttgctctgtcgcccaggctggagtgcagtggcgctgtctcggctcactgcagcctccacctcccaggttcaagcgattctgctgcctcagcctcctgagtagctgggattacaggggtgtgcttccacacctggctaatttttttttttttttttgagacagggtcttcctccgtcgcccaagctggagtgcgagggcgcgatcttgactcagtgcaagctccgcctcctgggttcacgccattcttctgcctcagcctcccgagtagctgggattacaggtgccagccactaygcccagctaatttttttgtgtttttagtagagacggggtttcaccatgttggtcaggctggtcttgaattgctgacctcgtgatctgtctaccttggcctcccaaagtgctaggattaccggcatgagccaccgtgcccggcctatatttttaataatgaaatcagaactaggtttgtaaacagggaaagaacaaataatcataaaagttttatattctggatttggaagttggttgatttaagagtaatgagaataaataatatcccctccccctttagttctcaaggttttccacttagtttaagtagttttattagctatagtagagtaactcagcattttgaaatatttgtataatttgaaaagtctctgaaagaacactgtgattcgggtatagcattgcaagtttgaggggtttcaacagatttcttcatgtgtgtttaattccatgatgatttaaaaaaaaacccaagaaataaaacctctggtcacttaaccagcattttattttatttatttttattttattttattttttttgagacggagtcttgctctgtcacccaggctggagtgcagtggcgtgatctcagctcactgcaagctccgcctcctgggttcaagcgattctcctgcctcagcctcccaagaagctgggactacaggcgcccgccaccacacctggctaatttttttttttttttttttgtatttttagcagacatggggtttcactgtgtggtagccaggatggtctcgatctcctgacctcctgatgcacctgyctcggcctcccaaaatgctgggattacaggcgtgagccactgcacctggcccacttaaccagcattttaacatatttcttctgaaaatctgattaccagaatttaattacattagaagaaattttttaaaaagctcataactattacgtagcaaatatgttttcaaagaacttgttttaaggtgggtcttggtggctcacacctctaatcccagcactttgggaggctgaggcaggtggatcactcgaggtaaggcgttcaagaccagcctggacaacatagtgagaccctgaccctaaaaaaaatacaaaaattagccaggtgtgatggcacattcttgtgtgatcccagctaatcgggaggctgaggtggaaggatcaggttgagctccggaggtcaagactgcagtgagttgagatggcgccactgcacttaagcctgggtaacactaagcctgggtaacagagggaaactctgtctcaaaaaaaaaagagagagaaacccacccagtttgatgaattagatgcatgttaagtgaaacagttttttagatagtgtagaattaacttcattatgttcacagttaaattcatattagactgttacctattctaagatatttgatattaaccctcaagggacattggctacattttttttttttttttttttaacaaaaccttgtagtttatgttagtggtctccaaactttttggcaccagggactagttttgtggaagagagttttttccacagaccccagggggagcacggagtggatggttttcgggtgaaactcttccaccttagatcatcaggcattagttaggttagttagattctcataagaagcatgcagcctaggtcccttgcttgtgcagttcacaatagggtttgtgcttctatgagaatctaatgccgctgctgatctagaggaggccgagctcaggttaatgctggcttgcctgycgctcacctrctgtgtggcctggttcccaacaggctaccgagtggtattggtctgcagctataggtggggggaaccctgagtaygataaactatcttctagaataatttttttaatatattgaagcagtagtgcctagtttataagtagacatatgtatagtataaactatatagtttatattcagagtacaaaatccaccttggccactatttttttttttctttttttgagatggagtctcactctgtcacccaggctggagtgcagtggcacgattttggctcactgcaacctctacctccctggattcagcgattctcatgcctcagcctcccaggtggctgggattacaggcacacgtcaccacacccacctaatttttgtatttttagtagaaacggggtttcgccatattggccaggctggtctcgaactcctgaccttgtgatctgcccacctcggcctcccagagtgctgggattacaggcgtgagccaccccacccggccaccttggccactattacaaaagtaaagctaaataatactgaagtatatgttccatattttgtaaggactgttgatttggaaacagtgtattctaacaagataaattttaaatgtaactaatagtatatgtttctgaataaatagttgctgcttctaatataaagtgtcatatttgttttaaaatcattgctcaagttgtatagttgttttgggcacrtattttcaacttctagaccaatacaaaatgtaaaataagtaaaagacgtgatatagttgtatcctttctaaacactgacctattttttttttttcctttsctaccttttttttttttttgagacagagtctcgctgtgtcgcccaggctagagtgcagtggtgcgatgttggcttactgcagccttcgcccctckggttcaagtgagtctccggcctcagcctcccaagtagytgggattacaggcgtgtgycaccatgcctggttaagtttttgtatttttagtagagaccggttttatcatgttggccaggctggtttygaactcctgacctcaagtgatctgcctgtcttggcctcccaaagtgataggattacaggcgtgagcctccgtgcccrgcccctttgctacattttaatgataatgaaaatgtaatccaagtgtcagattattcagtagcttcctgtcttttggtttgtgggaagtttgatacgttattttttaatgtttcttagtcctttgttatatttcatggatagtggggaagtgagtctgtgacttgattgaaatatattgtacaatgcattcatctgcatcataggcacttggcttttaatggtaaagtggaaactaaacttctccttaggaacaatttgcactaatttatttaactgatattgatgatgctccataaagataaaaatgtcattgcatggaggcttacttgtgatgtaatttgtactttggagaagtaaatcatagtatgattttagatgttttattaacatctaaaatgtttcagtttctgtagtagaatattgttaaataaaatggtaaacactgtaaaccttaatactccttcccaagaagaaaccattaccaccactacctcttctccctccaaaacagaaaccattaccacctccacctctaacaacagaaaaaaaaaaccaaaaaataaaaaaacccttttttggccccacaccttttttggctcacacctgtaatcccagcactttggaaggccaaggcgggatcctcttgagaccaggagttcgagcccagcctgggcaacatcaggagacctcatctctactaagaaaaaaaaatggctgtgtgtcgtgatacacctatagtcccagttatttgggaggctgaggcaggaggatcacttgagcctaggagttcaaggctgcagtgagccatgattgtactactgcactccagcttgggcagcccaggaagactgtgtctcaaaaaacaaacaagaacacctttttaatctgttaactcatggtttgtttaagattttcttttagccatttttgatgccttttttttttttgagacaggttctcactctgtctctcaggcgggagtacagtggtgtgatcatggctcattgcaccctggacttcccagaatcagatgattctcctacctcagcctcccaagtagctgggactacaggcacacaccaccatgtccagctaatttttgtattttttgtagagactgggttttgccatgttgcccagagtggtcttgaactcctgggctcaagtgatccacccaccttggcctgccagagtgctgggattataggcatacgccagctgcacccagcccatttttgayatctmaaatctttcatcatartttagtcagccrtatttttcctagaatttttttwaaaactattttgtcttgctatcaagctattactytgtagttttacatacattctttattttaactaaactgttatgagcaataatttgtgataacttttttttttttctgagacagagttttgcttttgttgcccaggttggagtgcaatggcgcrcatgatcttgactcactgcaacctctgcctcccaggttcaagcgattctcctccctcggcctcccgagtagctggaattacagccatgcaccaccatgcctagctaattttttatttttagtagagactgggtttttccaagttggtcaggctggtctcaaactcccaaccttgggtgatctgcccacttcggcctcccaaagtgctgggattacaggcgtgagccaccgcaccctgccaatttgcgataactttttaatctttttgtatcgtgtatttaaacttttaagttcttttccctgtcaatttctgacagattgaaaaataataatctttatattatttaaaagcttcttctaaaaggtacaaaggaaaaaatagaatgcaaagtgaactaggcagcgtgtagtggctcctgcctgtaatcccagcactttgggaggccaaggtgggcagatcacatgagaccaggagtttgagaccagtctggctaacatggcgaaaccccatctctactaaaaatacaaaaattagccaagtgtggtggtgcatgtctataatcccagctacttgggaggctgaggcatgagaatcacttgaccctagaaggtggaggttgcagtgagcagagatcgagccactactccagcctgggcagaaaaaaaaaaaaaaaaaaaaaagtgaagttaaactaaatttagatctgktgagtttgaaatgatggttgtatatacctctaagatcagtaaaacctaaatcaatctagagaacaggtgttaaagatacatttttggtggggyrtggtgcctcatgcctgtaatcctgccattttggraggccaaggcgggtggcttgcttgagctcaggagtttgagaccagctgggcaatatgaagaaaccccatctctacagaaaatacaaaaattagccaggcacagtgctacacgcttgtggtcccagctcctcagaaggctgaggtgggaggattgcttgagcgtgggaggcagaggttgcagtgagctgagattgtgccactgtactccaaactgggcaacagagggagaccctatctcaaaaaacaaaacaaaacaaaacaaaaaaacaaaaaagattttcatgctctggtaaaataagtattaaaattaggaaactatggatgaattgaatgttttggtctggtcgaagtactgtgcattaaatttttggttacattttactttgataagcagtgacggttcagtaattttgatgatagtctatacatcatgtaacttgacttatttagttgtcaacaaatatcttttttttttgagacctgagtcttgctctgttgcccaggctrgagtgcagtgctgcgatcctggctcactgcaacctctgcctcccggattcagattttcctgcctccgccttctgagtagctggattacagatgtgcaccaccacgcctggctaatttttgtatttttagtagagacagggtttcagcatrttgaccaggctkgtcttgaactcttgacctcagaagatctgcccacctcggcctcccaaagtgctgtgattacaggcgtcagccaccgygcccggcctagagataccttttaaggtggttctaaagcctcagaaattatttatcctgaagagaaagattaaagttttattcattgcattatgagggaaagtttaggcagagtatcttatggttttgtttttcattaaaagatcastgttctttcagattttaagtccatttaaaaactttgcatagtaatatatgtacatggttgaaaaaagtctaatagcccagaatgcttataataaggatcaagaattctgtttcactccttattgccactctccaaacaacttttttgtatcaatttaagggttacaggtgcagttttgttacatgaatacattgcatagtgctgcagtttgggcttttagtgcatccatcatccaaataatgtacgtgtacccattcagtaatttcttgttactcaccctcctcccagcctcccaaccttctgagtctccagtgtcgttattccacactgtgcccacatgtacacattattttgcttcaacttataagtgagaacatggcctccaggtccttccatccttccacgttgctacaaaagacatgatttcattcttcctttatggctgaatagtattcgtgtgtgktgtgtgtgtgtgtgtgtgtgtgtgtgtgtgtgtgtgtgtgtrtgtgtcccaktttttctttatccagtcgtctgttgatggatatggagattgattccctatctttgctattgtgagtgttgctgtgataaaggtacgagtgcagttatctttttgatataatgatttattttcctttgggtggatacccaatagtgggattgctggattgaatagcagttttattttttatcatttttacttttttgagatggagtttcgctcttgttgcccaggttggagtgcaatgacatgatatcggctcagtgcaacctctgcccaccaggttcaagtgattctcctgcctcagcctcccgagtagctgggattacaggtgcacaccaccacgcccagcaaatttttgtatttttagtagagacagggttttaccatgttggccaggctggtcttgaactcctgacctcaggtgatgcacctgccttggcctcccaaagtgctgggcttacaggcgtgagccaccgtgcctggccagcagttttattttttagtcatttgagaactctttatatggttttccatacaggtggtactaatttacattcccgcccacagtgtgttaagtgttccccattgtctgcatcttccccaacatctgttattattattgtttctttaatagtggccattctgattggtgtaagatgatatgtcattgtggtttttatttgcatttcctcgatgattagtgatgagcatttttttcacatacctgttgactgtttgtatgtcttcttttgagaaatgtctattaatgtcctttgctaactttaaaattcttaaaaattttttattaaaattttttcttaagaccagttaagtgcagtagtgaaaggggagtaaagagtatagaacaaggaatttgatcggtaactgacagtgaaccatcaattgggataactcactaccagttatcagtagtgaggtattcagaacagccctttgcttactttttgatgggattatttgtgttccttgtaaattctggatgttagtaccctgtgagatacatagtttgaaacttttttctcctattctgtaggccatttgttcagtctgctgattcttttgctatgcagaagctttttagcttaagtctcatttgtctatttttgttttttttttttttgcttgtgcttttgaggtcttagtcatgaattctttaaattcatgaattcttagtcatgaattgtatagatcagtgtccaggagagtttttcctaggttttcttctaatggtttttatagtttcaggtctttggatgaagtctttaatccttcttgagttgatttttgtatatggtgaaagataggggtccaatttccaaaggaaactttcaaattatttcttcctgtggtattgtcgtgactatataatatacatatgttatgatttatgattgatttctgctctgataaaggaggatttggcttctttacatctgcttccccaatagattttttaaaaatcacttttaatttctctgctagttatctctgcagtttatatcagaactttccttcatgttatatagactgttgatcttgatgtaccaagcagtaacttttgtttgtttgtttgtttttttgagacggagtttcactcttgttgcccaggctggagtgcaatggcgcgatctcggcttgctgcaacctctgccgcccgggttcaagcgattctcctgtctcagcctcccgagtagctaggattacaggcaggcgccaccatgcctggctaattttgtatttttagtagagatgaggtttcaccgtgttggtcaggctggtcttgaactcccaacctcaggtgatccacctgcctcagcctcccagagtgctgggattataggtgtgagccaccacgcccggctgcaactcttctttttacctttccttttccctttatgtgcttacatctgtcatttctgacattgacattgtcaaggttgagaacagttatgcgctgtattgtactccttactactttgtttgtttatttatttatttttttgagacagtcttgctctgttgcccaggcttgagtgcagtggtgcgatcttggttcactgcaacctccgcttcctaggttcaagctattctcctacctcagccttccaagtagctgggactacaggtgcgtaccaccgtgcttggcaaatttttgtatttttagtagagacggggcttctccatgttggccaggctggtctttaactcctgacctcaactgatccacttgcctcggcctctcaaagtgctgggattacaggtgtgagccactgcacctggccggtatgactttaatacttgaaagttaatgggctggacgtggtggctcacacctgtaatcccagcacttcgggaggctgaggcgggctgatcacctgagggcgggaggccgagaccagtctggccaacatggtgaaaccccgtctctactaaaaatacaaaaattcgtggtggcgtatgcctgttatcccggctacttgggaggctgaggcagggagaattgcttgaaccccggaggcggaggttgcagtgagccgagatggtgccattgcactccagcctgggtgacagagtgaaaaaaaaaaaaaaaaagttaatgaatagtttctacattattatgatcatgtaatatttttcacagcagaggcaagtagtatgtaattacatttctttgtattgtttcttggtttttgaatctgtaactgcatttttcttgtcatattttcacgattcattttatcaatctttttctgtggtttgtcattattacttattttatgcatatcaagtccctcccaccctcccctgctttcccttagtcctatttccttcagtttgggctagaagtatttagacctgttgccttgtttttgtgctgaacttttccttactctttttgcacagtgctactactgttattagagctttatcatttcttgagttactaacttgttttaatgcagtacacccacataaatagctaagaaagaatwtgtgagaaataaagttttgaatccttgcttatctgtaaaagtcctcattagcccttacagttgactggtattattttattcaagtgcaattaagctgaaaattgttttccctcagagttttgaagggattgctccagtgtcttctatgtccattgttgttggtgaggaaaagtcggatactgtgtgattcttcttcctttgtgggtgatgtgtttcatattttcatccatccctttagagccttcttttatcctcattaaactgaaatttctcaaagatgtccagatgtgttttcttctccattacaataagcaaaatactttatgtgcttcacttcttgaaagttttcatgttacggctttagtgatctttcttttttttatttttttgagacggagtcttgctctgttgcccaggctggagtgcagtggtaccatcttggcacattgcaacctctgcctcctgggttcaagctattcttcttcagcctcccaggtaactgggactacaggcacctgctaccacacctggctaagtttttgtatttttagtagagagggggtttcaccgtgtttgttagccaggatggttttgatctcctgacctcgtgatccgcccatctcggcctcccaaagtgctgggattacaggcgtgaacccccacgcccggcctctagtgatcttttctttgttttctctatagctgcttttagttggattattagacttactgaattaatcctccccaatatttttgtctgtttgtttgtttgtttttttttggtctggccatctcttctactttatttattcttggaccttttaattttatattggaagttatattttaaatgtttgagatttctccttcatttcctcccccgccaatatcttttctcattttatggattaataatcttcttgagtctctgaaaatgttaataaggtttattttttttttaaattttgttgccctccctcttacctgtcaactctattgtaatttttgttgttatcttagtctcatttatattgtaggcttttaaccaaatatctgctgaccttggatatcactcagctttaagatttagtagaagggttcacaatgagctcttggtgggaattaatggttggcaggcaggctttactttagggttaagctgttaattagtcttttgtattctgacattcaagagtccattgttttaccccaaagtgccaactcccatgctaggttcactagtttcctctctcccagactccagtttctttactttagaagagatctctttccattaattttactttgttttttaataataatttggctttaaatttttttaaactactgtttaaaatggtcttttgctgaagagagataaatgtatatgtttgatctgctatttgagccagagaatctctttcagttctcaaactggactagaccaaaaactaataattatttagatatttatttatccagtgtttcagaatgtgttaggttgtagaaatataatagcagctttaagtggtgtaggaggtgttttgcgtgtttataaaagcgagtactggctgggtgcggtggtgagcgcctgaaatcccagcactttgagaagccaaggtgggtggatcgcttgagctcaggagttggagaccagcctgggcaacatggtgaaaccctacccctaaaaaaatcccacaaaaattagctgggcttggtggtgcgaacctgtagtcctacctactcagaggctgaggtgggaggatcccttgagcccaggaggtggaggttgcattgagtcaagattgtgctgttgcactccagcctgggtgacagagctgaaaccctgtctccaaaacaaaactgagtactcattatgtgtgttaagccttttacagtatgtggaagattagaagatgtcacataaaaagttatgaatgtaatacattctggtaaaaataaagagcacaggagggcataacttaaaaagtaaaaggggctgggtgcagggggctcacgcttataatctcaatacttgggaaggccgaggtaggaggatcacttgaggccaggagtttgaggccagcctgggcaacatgtgtttcactgggtgacagagtgagcctcttatctaaaataaaaaacaaaaaatgtgaaagaccctcttttccctgttttgccccacatttcagagacaattactgtatccttgacttttgttatgggtatacctttgctatttctatgtatgtgtatgtacttatatccatttttatgataatgggatcatttaatttatatcgtgatttgattttgtcactttgtggttgatcttaggcatctttccattttagcttatacacatctatctcattcttttcaaaatttatccaaagatatgaatcacgtgcttaatttgccaaggagtgttttaggtgtaaggattcagtggtgaaccagagagaccaagctcctgcccttatggaacaatatttcaacggtgagaaacacaaaataaatgcatttctcgtaattagtctcaaatactgagaagtgctatgaagaaaataaaatgtggtactgtactgagtgtgtctgttaatggtatgagagagaacgcatgtggctaaggtggtcaggaaggtctgtatgaagtgatggcattgaaacacacgtgaatgatgtggaggcattttaggaagagcaggatttattgtgaagactcaaaacaagaatgagtgttgtattagtgcgtttactgctgataaagacatacccaaggctgggtaatttttaaagaaaaagaagtttaatagactcatagttccatgtgtttggggaggcctcacactcacagcagaaggcatgtcttacgtggtggcaggcaagagagagtgagtaccaagtgaaaggtgtttcctcttacaaaactatcatatctcgtgagatttattcactaccaggagaacagtatggggaaaccacccctatgattcaattctttcccactgtgtccattccacaacacgtgggaattatgggagctttaattcaagatgagatttgggtggggacactgccaaaccatatcaagtgtgttatactcaagggatcctcccatctcccaaaataaacgattggtgttactgtgcaatgaggggaacttaggagaccatatttgagaggcaagcaggagcccaagcagtgcccttcacaccgtggtaagaagctgggattttatccttagtgcagcaaaagcccttagaaggttataaaccagggcacccataaggctgtgaaagtaaccttgacagatatggcttagagtagagtgatggcagaggagaaaggcaatcagaagtgtttggaaagctcaggaggctgaggcaggagagaattgcttgtacctgggaggtggaggttgcagtgagctgacatcaagcccctgcactccaacctgggcaacagagtgagactccatctaaaaaaaaaaaaagcttggaaagttacagcggtaagatctgctaaaggatttgatgagatggatatgagataaagaagaattaaaattgtcttctagatttgtggcttcagtagttgagtggacagaaatgtcatttacttagattagagaytgatcttagtggagaaacaggttttaaactagattgaaggccctctgattagttaaaccattcccctactgatggtcatttagttgatttccagttttattatctttgtaaggaatatccttgtacttgtgtatttgtacgtgtggacatattctggaagataaattcctagatgtaaagttctctcatcgaagaggacagtacatatgtttcaagttttgatggatattcattagttgccctccaaaagtgaggtgttggcttggattcccccaacagagtatgcctttttcctggcatcctcactaacaacatacctggtgggagagaaagtaggcagggcctacatttctgaaaatgggagtgggagttctaatagcattttttctttactaaatcactttggcactttgttcctagaatgaaaatcagcaattgtcgttttctttttggtatccctaaagtcataacatgtctctggccatagttttttccagttactaatcatatagctgttggtcagtccttctaggcttagtggtatttatggagcctttcataataattatgagaattacaatgaaaatgaaaactattaattggtttaatgtatgccaagcactatcctaagtgctttacacgtactatattaatttatttaatcctcacaacaacctaaaaagtaattactgttattatctcgatttcttgaagtgagacagaggatgtccaccaatctttgtcttttcatttatgtattttttaattaatttttttctgtcaaaatatcttttgggaagtttggcgctgttacttgaataccttttgtcagtagttgtgggtcagaatccaaacacagaataaatggcaggaaaaggcacattcagtttaggagaatgctctgcttatgggtgatagtgtttgtaatgctttgggttttggttttcagaactgcctatgttcaaatcccagcctcacacttagtagctgtttgatttggggctgatcattgatctatttttgtagctcagtcttctgagctttaaaatgggaaaacaaggttttgtaggttgtaggattgttgcgggcagtaagttacacatgtaaaagtggccagcacaagaggaagcactttatcagcatcaactaatatttttatataattggctaagagtgggcagtcctatctagcactcaaagtgtggggaaaatactggtgataggatatcacactcttactgagttatatatattaatatttaggtataaaacttagaaagtggggtggttcacgcctgaggctgaggcaggcagatcacttgaggtcaggagtttgagaccagcctggccaacatggtgaaaccctgtctctactaaaaatacaaaaattagcctggcatggtggtaggcacctgtaatcccagctactcaggaggctgaagcaggagaatcacttgaacccaggaggcggaggttgcagtgagccaagatggcgccactgcactccagcctgagtgacagagggagactgtctcaaaaacaaaacaaaacaaaacaaaacaaaacttaaaaatggttaggcactgtggctcatgcctataattctagtactttgggaggctaagacaggaggatcacttaagcacaggagttcgagaccagtctgctgggcarcatagtgagacactgtctctaactgggggggggaaagaaaagccaggtgtgyggccacgtgcctgtagtcccagctactcaggagtcgagatgggaggattacttgagcccaaaaggtcgagaatgcagtgagtcatggttgcgccactgcactccagccggtgcracagagcaagaccctgtctcaacaaacaaaaaaccctyaaaatttttttaatgctactattgttgtaatgagtcatattaagtgggattatacatgtaccaaacttttattttttcttgagtgagattatttcatggttattttaattggcatgccttacgattgagttaaattgatkatatttgtcawttttttttgcaaaytgcctaccagtaccctatttcgggtactttgcagcttcaaataagaaaaattttaattaaaaatgcattaaaccataaataaaatttacctcacatgactggaagtccaggtgtaattcagtggctcaattaaattatcackgacctagatggttttcattttcctgctgttttatactcagcttgttgtcgatagttgctaaattaattcacttaaataatcatttaccacytamaatgtattaggcagtagtccataagcaygggaaatacagcagtgagcaaaacaaarktcattgycttccttcacgggcttatattttagtggggataaggragaagacagtcaaacaaataggtagaatttatagaktgtcagaagatgttaagttttatggaaaaaaataaagccatggaagrgacgggaagggctgggttggattgtttwaagtggggscmtcagagaaggcctcagtgagctgatgtttgaatagaatcttaaaagaaataagaatgcaaaggcarwtatttggggaaagagcattgctgatgcggggaacagtgagtgcaaaagccccrraggcaggaatgtgcttagcatgttcatagaactgaaagggccartgtggcaggagctgagttatggagaaaacatcataagagaagtagcrtggggagtcagattgtgcagggccttgtagaccaktgtgagatcttttgmcttttactctggattagatgagagtcctttgggggcttttaagtggagkactggctttatctgaccaagactctaaaactctcatgctggctgctgtgttgagactagaatgaaggagatcaaggaagaagcaggcatgttagataatattagcagggtaacagatgatttgaagcatgataggcatcagagaaatgttgaagtaattctgcatatgttgaggcagagccgaaaagatttgttgagggatgtggcatgtgagaaaaagaggattcgtagttcacaccaggttcaatgaccagtaaagatgaagtatatttgttcatgmacatctattttatttggaattaaaaacctttcctggaagyccttagcagattttttttttttttttttttttgagatgsagttttgcttcttgttgcccaggctggagtgcaatggcacgatctcggctcactgcactgcatcctctgcctcctgggttcaagygattctcctgcctcaacctccccagtagctgggattacaggcatgcaccaccatgcccggctaattttgtgtttttagtagagacrgggtttctctctattggtcaggcaggtgatctgcctgcttcagcctcccaaagtgttgggattacaggcatgagccaccgcgctcggccaacagatttttttcttaaatcccatcagccgtgattggtatccatccatgtcctagatacaagtgagggtgagagagcaaggatgttccttgcagccatgataatgggaagtggactctgtaaggaacaggttgtgastggggagtggctattggttaggtaactaatagtctgtttgtcattgcccatttttctgttaagtcgatcatcctttttaaatgatttgtaaataatttttgcatgctaagaaagtaagtatttrttatataattctagattctaaatattttggagctgtaaatgaggttttaaactctgagatcagttttctaattttgaartaaagtgaatctccattgaaatttacaagtaggggctggtgatcgcagagtccaatgcataatttatagtttttcctattctgggtgcagttgtcattttaacctgaatgccaggtagttatctttataaaactatcatgtgtgagttatagaggtagcattggggtggtggaaaaaaacaaaacaccacttttgaggtaggatctcactctgtcacccaggctggagtgcagtgatgcagtcatggctccttgcagcctcaacctccctggctcaagtaatcctccctctactcagcctccagagtagctgggactacaggtgcataccaccacacccggctaatgtttaaatttttagtagagacaagatatcactatgttgccctttcttcctrraaaaaaagctgataaactggcttattatataacaaggaattctcattttattttacttatattgtattmttgttctttaatttcagtgatgtraagcagtgttttttggaggttttgagtgtgagctttctcatcagatactgaagagtttttgagccttaactccattacttaattagctgtgtgacccasaccacttcattgtacagctccgttcttgttgtgctggggagggcattcacacaaaatacaatgaaattgtgcttyctggtggttctgatgtgactttaggcaagttcattaaacactgcgctttcaataagataatgcatgtggaatgctgagcacagtgcctttaagacactgaaykggatatgagaacwgttccatagcccttcattttwacttttgattaagagttgtttactaataactaacyaggtgagttataaatggggaartarggtcattgtgaagtggctatgaaacagcatagaggatatattttaaaagctgtatttttactacctattttcaaactgcatatttcattttagtttggagaactttactgaaaaataaagaagtagtagtatgtgagtttggatcatttctgtggttaggtggtggctacactaaggcctttccaattcttggtcctrtgagaggtaggtaggrttgtggggggtaggggagaacagataaatgagatacatttatatttttttgcayggtaacttataaggcattgccaagagagggaattcactgcaggcaaagaaaaatataaaacatagtgtatatagggctttgtagcatccgtggtktcaggcatttatgggagccaggcaggggtagggtatggggttgaaatgtrtttcctatggataagcacaggactrctttatatcacttaayccaagacccttttrctggtgaggaatccagcatttaaatttatgtatgtatatgataaagctagaatttttccagatctgasactcaaagctctttgtgttttcgtytatactccagctcttttgaggagctttmaagtctagttacaaagacaggaaaaacaagaacggccacagtggctcacgcctgtaatcccagcactttgggaggctgaggccgagaccagcytggtgaatataktgaaaccccgtatctactaaaaatacaaaaattagcccggtgtggtggtgtgtgcctgtaatcccagctactcaggaggctgaggtaggagaattgcttgaacctgggaggcagaggttgcagtgagctgtgccactgcactccagcctgtgtgccagagactctgtgtcaaaaaaaaaaaaaaaaaaaaaggccggkcatgcagtggctcatgtctgtaatcccattgctttgggaggccaaggcaggcagattacctaaggtcaggagttcaagaccagcctgttcaacatggcaaaaccctgtctctactaaaaatacaaaaactagctaggcgtggtggcaggcaccataatctcagctactcgggaggctgaggcgggagaatggcttgcacccgggaggcggaggttgcagtgagctgagatggaaccagtcagtgcacttcagcctgggtggcagagcaagactgtctcaaaaacaaaaaaacaaacaaaaaacaaacaacgacaaaaaacctaggaaaaacatacatgcaacagaatgttaaagaggagattttaaggctttttttttttttttttttttttttggagacagtctcactctgtcgcccaggctggagtgcagtggtgcaatctcggctcactgcagcctccgcctccctggttcaagcagttctctgcctcagcctcccaagtagctgggattacaggcgcctgccaccatgactggctaatttttgtagttttagtagagacggggtttcaccatcttagccaggctggtcttgaactcctgacctcgtgatccatctgcctcggcctcccaaagtgctgggattacaggcgtgagccgttgctcctggcagagattctaagttttttgagaatagtgactgtatttcttgggtcrtggctctatcttatacatytggcacagtgtgtgtgtgtgtagcaggtgtctaatatttgttaaacacacatgrtccttaatatcaaacggcatgggatttaagacatgaacttgggtttgagtctcagcactttcatttcttagttgtatgaccttgaccatttaatctgtttgatcttgaatgtccttatccgaaaaataggggacatactaattaacatctattgtgatgggttgtaatgagaattaaatgataatgtatacaaaatacctaacttgattggatttgtggtactcagtagctataatgaccattttaaccccaatatsagaaggattcactcrtcacactgttgtatacttcrtagctrttacttctttaatccccaaggacttgtttaacaaagtgttcttcagtttctacttccyagttcctttgtkgaactggtaaaaatttaaaatatcttaacataatattttatttcaaatgayaaacwgtaaggtaaaatgyggtttttcttggacaacwwatggtagaatgatgtctagaatatttagttatgtcatttaatactttttytctttacaatttaaawaaaaatttattttattttagattcagggggtacacgtgcaggtttgttacatggctrgattatgtaatgccgaggtttggcctgctagyrcagccatcatccaaagtgaccctagtacccaataggtagttttcaacctgtgtgcctcctcttctaccttctcttttggaatctctagtctattacttccatctttatgttcacatgtactcattgtttagctcccacttacaaatgagaccatgtggtatttgattttctggttctgagttacttcttttaggatagaggatgaraaagagtgtagcctccagctccatmcatgttgctgcgaaggacatgattccattcttttttatggctgtatatttttacctttttttgcgagggggagaggatttaaatatggaccagcataatgaagaaaatgtctgtaatcccactattcacataacccytgctagtttaaaamaagttcgtgtaggccgagcatggtggctcacacctrtaatcccagcactttgggagtccaaggctggaggatcacttgagcttaagagtttaagaccagcctgagtaacatagtgaaacctcatgtctacaaaaaaataaaacttagccaggtatggtggtgcatgcctgtagtcccagctacttgggaggattgcttgaggccaagagttcgaggctgcagtaagctgtgattgtgccactgcactccaccaggtatttaaaaaaaaaaaaagtaaataattagaaaatttaaatagtgtaaacyagagkcctctcctatcagtttgctagagctaccrtaacaaaatrccacaaactgagtgaygtaagtgacagtattttttttttttttttttttgagacggagtctcactctgtcaccaggctgcacgatctctgctcactgcagtctcggcctcmcaggttcaagtgattctcctacctcagcctcccgagtagctgggacttccagtctccagaattgagaaatttaatttcttttaatttaaaaaaattaagagtgacagttggctgggcgcagtggctcatgcctgtaatcccagcactttgggaggctgaggcgggcagatcacgaggccaggaggtcgagactatccttgctaacacggtgaaaccccatctctactaaaaatacaaaaagttggtcgggcgcggtggctcatgcctataatcccagcactttgggagtccgaggtaggcggataacctgaggttgggagtttgagaccagtatgaccaacacggagaaaccctgtctctactaaaaatacaaaattagctgtgcatggtggtgcatgcctgtaatcccagctacttgggaggctgaggcaggagaatcgcttgaacccgggaggcagagattgcagtaacccaagatcacgccattgcactccagcctgagcaacaggagcaaaactccatcccaggaaaaaaaaaaaagtctaagtagtccccaaaacataaaatttgagcctaaaataagaactgttttaaaattttaatatattgtgttttttcgccatacaatcccaggtattcttcaggttagaactcagtttcacaaaaaagggtgtgcttgaaaagcttaccaaaatctcctgattagatacttttttcgtttgtttctgtttttttgagacagtctcgctctgtcgcccaggctggagtgcggtgccacaatctcggcttacgcaacctccgcctcccgggttcaagcgattcttctgcctcagcctcccgagtagctgggactactggcacacaccaccatgcccggctaatttttgtatttttagtagagacggggtttcaccatgtcgacaagtctggtcttgaactcctgacctcaggaggtccacccacctcggcattccaaagtgttgggattacaggcgtgatccaccacgcctggccagagcatacttatttatttagcaggtgtggatatgtgtatttaaacagacttacttgtaaatagatgtataaatgtatacccataatgaatgaaattaatgaaattatatatatttatatattcattataagaggttacaatttttttattttatttttatttatttatttwttttttttgaagaggttacattttttccccccagcctagaaagcttcactgcataacatgattatgtgggaatttcagagttggatcactttgcattactgtaaatgatagagctttaaagtattttttattctaaaggtatatgtgcttttcataaattcaaattctaagaaaaggtatacatcacaagttcagttttactccccagaggttatcactggaagctttttttgtatatttttctagatgtttttggtttgtagataagacgtgtwtgtatgtagaaaaaaatacagacataggcatatatattctttgaaaacaaatggaattaggccgggcgcggtggctcacgcctgtaatcccagcactttgggaggccgaggcgggcggatcacgaggtcaggagatcgagaccatcctggctaacacggtgaaacccggtctctactaaaaaatacaaaaaattagccgggtatggtggtgggcgcctgtagtcccagctacttgggaggctgaggcaggagaatggcgtgaacccgggaggcagagcttgcagcgagccgagatggcaccactgcactccagcctgggccacagagcgagactccgtctcaaaaaaaaaaaaaaaaaaatggaattatactataaatactgttttgtchcttttttttttggcatactagtatatgttatacatcttttcwtaggtatattgtgattaatgtaggtgcagttcagtaatgattsaaatgaagttttttcattatattctatttttgaaaaattaccaataastacatatmtaactgaaatcacatcatgtaactgtcagtataaaggaatggctcagataaaacyaaatagaagttgtatatttaatawttttaataattttaatattwawttaaaaagttaaaacttgtactacatggctrtttattagggtaaggaagtatgatctctttaaygtacatggtatttaaaaaatatcttattctggtgtgtyttcttgattgtaaaaccccacttaacattttgggctcctatttrtatcttkttactttaaagtaacmctattytgtggttattcttatggcatattaaagtgatattttaaggaatacttaacaaaattctatrtaaaatgtatctactctaagttagaaatcttggtgcccttactggtcttgtgatcttggaagtcacttaagatcccgagctctgtrttaagacagtgctggttcaagttctggatctaccattgagtaattgaccatgactttctttatacttcagtttcctcaaytgttgaataggaataatggttgttgtgatgagtccataaaaaatacagtcttactgactttatggtggccgaaatttcaagagtaacacagtaacagttaagtcatactgggactcaggctaatcttttctcygttgccctaggcattgatgtycmcctggcaaatgagggtgagaagcggtgagggattgcatgggrrgtttggggacaaggcctgggagtagtacagaggcatctttcacttttgcccacatttcattgtccagaccagtcatgtgaaagggaarctgggaaatgtagtttagccatatgccaggaggaaaaggaaacgctttggtaaatagccagtttttgccaccagtgctaagcacagttcctggaagatggttttcaagtcattaagcaagtcacttttcacctctccaggtccgtgtttctttctgtaaagtggraagggggatgataatgaaaacttctatgaagcactgttttgggagaactatatgttataaccatcttaactcacttaattcttacaaaagtcytctgaagtaaagactactattgtccctttttttttttttttcttttttaacagctgaggaagctaaggctcagagtgagtcatggacacaggatttgaacccaggcagtcttttctgtagggtctgtgcttttatttatttttatttttattaattttttttttttgacggagtctcattctgtcgctygggctggagtgcagtggtatgatctcagctcactgcaacctcgcctctcaggttcaagcacttctcctgcctcagcctcccaagtagctggtattataggtgagtgctaccacgccaggctaatttttgtatttttagtagagtcggggtttcactgtgtttgccaggctggtcttgaactcctgacctcaggtgattcacccgcctcagcctcccaaagtgctgggattacaggcatgagccactgcacctggcctcaggcayaatgtgatattgtttataaatattagagaatgtagttctaaaaagtgaagrcttaagaaaaacctaataccaccatcatactyaaaaaaaaattgacagttaaatccataatatcatcatattctatgttcaggtaaamacgtctcaatttttwaaagtatttgaataaggcttacttattgcgattaagtgtcttaatctgtaggataccacyttcctttttattctcacamtttatttgttaaagaaatgggttatttgccctgtagarttcctgtagtcaggattttkctgattcctgagattcaataccaggtttatccccgatrtttctctattttctgtatttccaaatgagtagttagaaccagaggcttggtcagagtcaggttcagtyttattttataagactgcttcttatattgtggtgcattctttcatcaggaggcacaaaatatggttgtctctttttgtgacattagcaactgttggtgactaatgccyagatctgttgattcattaagagttgtaaaatgataatgttctagttgtgttactccttcattttattatctggaatactgttttataaaaagaaaagtttccatcacctcttacttggttgcccagtgtaactgttcatatgggaaaggcagaataaatgtttgcttgtttacctttctttaccagtttccagtgtaatcagtaggttcactgtattttccagctgtgattaataaatttttaaaattattatttttaatgtatctgttactgtataggacagtatctggaaatacccaaagacaagatctctaaaggagtcatcggctagtggtggatcagtgcagcgtggtggtggtggtggtggtggtggtggtggtggtggtggtggtggtggtggtggtggtggtggtgttatgcacatgggggataatatagcagaggcatttagcttgaaatcaggaaagagctctggagttatccttgagctgcattttgaaggttgagtagcagtttgctattggaggaggtagaggttacttttcaggcagagggagcagcatktgcaaaggctctgagatgtgagagtttgttamtgaagaaattcagtagggctggaagctcagtgagcttggtgcgagagagtcaagagatgaggctttagarrtagtatgggttttaagtcattccaaggaatagttttgatttaactctgaaggccatggagagacattgaaaggttttatccaagtgaatgatgtaaggaacaaactgtggaactcttggggcagcactgaggagagtgactcatgatgccccttttctgaactgcttatacagatttctcattcttggcattactcctgattcctccttcatytacatgcacacgcrcctacacacacrcacasscacacagacacacaygtctgcctctcggatctccttctagagtcttagttcttgttttttttttcagaatttgggcaactaacaaggctagaaaggaggccatctaaaaaagygattggtgttgaaaagttgctgctccygtcctagcagcacaactcttcacktcatagtaatrggagtaatgacgatgatgagtgtggacaactaatgagcacttaactgtagtaccaggcactattctcagaattcattagygtgacaaccctctaaggtwgggtctgttatccccrttatacagatggggcagaaacggcagggagaagttaagtgacttgcttaaggtaataaaygtagtaagaagcagaggtggrattgaacctaaacagtctgcrtctagagttcatgctcataacattctatttattgcctttctggttttatgacccccttcttatctaagtgtatgctctgtgccccgcayatacaaactagttcccrtaacatgtgtaatataatccctcctttcccrgggtttcccrgyttcctgtccttccccttagctttctatcatcagtttttcctaggatttctggttcagcstatgtcaaagtgagagtcaccaacatagktgatgataaatactgtttgattacaggaatgtaggaagatgtgcaagcattctactaaaaatkcttttcccacagataatgtaaactaaggttgyttargttttgtaagactgscattcaactataaataggccttatgtatgtttactaaatcagaaaamatttaatgtagctaaattttaaataatcaacaacagaaaataaaaatattttgcyccaccrtcttaaggttacaagacttagaggtatattttatttacatgcatgcatacacacacacacmcacaaattatatatasatgtgtggaaaatatagaaaagtagaaaaatgtatacaaatatktgaaatacattatgtggaatcatgtttgtatttttcttagcttaggaaagaaagccattaaaagagttacatgtcaataaccatgatactataggattttagtagttgcagagtattacattacttaaataaatgattcatggaatagtctttttttattggacaaggaattttmccctccacctcaatctttgagagttagaaacaatgcagagatgmgtgtctttatagttaaamctttgtacatttyataatttactyatgataaattttcaagttgaattcctaggccaaagagtrtacagattttaargactttcaatgttggcagatatcactttaggataattataccaatttayactcttamcagtaatatatgagtgtatatatttacctattccttgccagttctggaaattrtgaatttaacagaatcttccaaaaagcattgaaaattggyctrggaatgtraatatcctttycttycccattcagcttactaatgaatctatcataatctcagctgtstgartctaaaagagaaccagtaaaattgagatgrcaagtttattgcaaaataaatgacctgaaagycacaggsattgggtgvggtgggggaagggcaggtaatggtgactgaggtgaytctgtgtttgggtttytgaaaagatggtagatttgaaggataakgagttcagagaagtagaaaggcaaatagkggccgttataaataaggacagtggcatgagccaacaggsttatctctcatgtttatagaacatggctasatctggtttccctataagttgatttcttactgttattctgagttgaatgcgtaycttttgtctcartgaagcctgaatgkcttttgatgtctctgatctggaaaggttrtttatgtatctcagaataagtcattttgctaaaaaaggctactcctgagggagarcagtggaaaaaagagtwggaaaagtggattgtagctagttgaaaaaaggatttgaatgtcaagctttaggaattwggttcttatttggtatgttacgggcaaycatatggacttttgagcaggtgaaaaatacagtattaatgggtagggatagcttrggagggaaggagacawggacattgagcttcagaaaaaccagttagtaaaatatttcagatgatacattggtaatagaaaaggatccgttgaaatgtgaggcattcacttggaaagaactggcagaatgtggtaattaaytgctataargaccccaaaataaaaggaataatcaaacatcactcaargcttttagcacagtttttgataacagtcagtgtcagaaggagaagacaaytttgttcctaaaagttatattgtaaaataaatgtagcttatacatttttgaaagtgaaatctcaggattcatggtatcwttacttctacttgccaaattattaaaatggtgttatatttcttaagatattttaaagcctctattgtagaacagaaatrgtagaaaatggaactaatgtttattaacaattactatggaagagggaatagaaatgtgttgctcttgaacagatttattcarctttggcrctgttgacattttggactagctaattccttgtcatgggcagtatctcctgtgtgtaggatgttaagcagcattcctggcctcyacccgctagatatagtagcacacccggcacccctccccccctccctgcccccgtgacaaccaaaaatgtctttagacattgccagatgtcccttggggagcaaaaattactccctctccccagttaagaaccattgttctagagtacagaatyaatcccactaaataaawgttattggygtgtttagaacagtgcctagcacatagctggcactcaaatatttgttgaataaatgagtagtcagattttcattgtgaattaaaaacagaacaaaacttgatgactgaccactcaagttgcttttacaaaagaaatgggatgtccattgaacatctgttttagatctgatttccyaatctggattattaaaatgaggaggctattttttcccagtatataaatgattctaatacwttttgctgtaaaacttttggagtctctctgctaaattatgttccagtttcgtagcttgggattcaagtcataaatatactagktctgtcttacctttcgrtgcttttatttgttcccttttgaacatggctgaattttacttttctgtccmcctgcccgccattcgtgctayccctccttcctttttccactctcatctttttcccattttccagtckgtaaatcctacctatccttttattttttaaattacaagatctcattctgttacttaggcaggagygyggtggcacaatcatagttgactgcagcttcgaatttctgggcccaaatgaccctcccatctcagcctcccaagtarctgggaatacaggtgcgcaatactgtgcccggctagtttttttttttttttcttttgagacagagtttcgctcttgttgcccaggctggagtgcaatggtgcgatctcggctcactgcaacctctgcctcccgggttcaagcgactctcctgtctccgcctctcgagtagctgtgactatagtcgcatgcccccatgctcagctaatttttgtgtttttagtagaggtggggtttcatcatagtggtcaggttggccttgaactcctgacctcaggtgatctgcctgcctcggcctcccaaagtgctgggattataggtgtgagccactgtgcccagcctagttttttttgttttgttttttgttttgttttgtttttttttttggagatggagtctcgctctgttgcccatcctggagtgaagtagtgtagtggtgtgatctcagctcactgcaacttctgcctcctgggttcaagtgattctcctgcctcagcctcccaagtagctgggactacaggcacatgctgccacccctggctaagtttttatattttagtagagatggggtttcaccatgttacccagctggtctcgaattcctgagctcaggcaatccgcytgcctcggcctcccaaagtgttaggattacaggtgtgagccaccatgcccagccattcccggctagtttttgtagatactggggtctcgctgtgttgcctaggctggtctcgaacccatgggctcaagtgatcctcccattacagcctcctaaagtgctgggattacaggcatrggccactgtgccctgccctgtcytcctttttgaagtctctctctctctgtcttttatacttattttttctctcttgtcatgtctttgtccytgtcttttttgatggagtcttactctgtcacacaggctggattgcagtggcacagttctagctcactrcagccttgaactcctggggtcaagtgatcctctagctcaagtgatcctcctacttcagccwctgagtagctggggctctatgtgtgcaccaccacgcctggctcctttgtccatttttgtttgtttgttttttggagacagagtcttactctgtcgcctaggctggagtgcagtggcatgatctcggctcactgcaacctccaccttctgggttcaggcgattctcctgcctcagcctcctgagtagctgggattacaggtgcccrccaccacgcctggcttatttttgtatatttagtagagatggggtttcaccatgttgaccaggctggtcttgaactccagacctgtgttctgcctgccttggactcccgaagtgctgggaatacaggcatgagccactgcaccctggccttaactacrtattttttatatctgcacagtgttttggaaaaagtggttcaactgaaagaatgaaaagatgggggcagaatttgctttttaaaaaaataataataatttaaaaaaagggcattgaaaaaagtttcagtggtgttgggagggccttggaacaaggaatgaatggaagatgaggsagtggagggaggccatgtatggactctttctacagaccaggctgttraaggagagagggytaacrggaaatgwartgcgggsgaagttttttgaagatgggagaaagargacaacttttatatatttcatttcatttgattccttataaatttgtaaggaagatagagcttgtattatktcagtgaagttgaaaatagagyacagaaaaattaagatacakcrcccccaaaacngagaacttctgwcataatacamtgttggaaatayttacttcagagtgaagaaaatattggaagttaggcttgttaattgctctgcatggttcataattactctttcttattaactatttaaggaacatgagaccaggragttaaatamctgggtatatgcagatatatatctagaattggtaccaaagtwaatacaggcataccttggagatactgtaggttccattatagactacyacaataaagtgartrtcaccataaarcaaggcasacaaatattttgrtttaccagtgyatgtaaatattatgtttatattctactgcagtctattaaatgttcagtarcrttatatttaaaaaamcaatgtgcatactttaatttaaaartactttattgytaaaaaatgctactgatcwtctgagctttcagtaaattgtaagrttttttgctgatagaggatgttggtggctgctgactgawsccarcagtgattgctgawggttggggtgcctctggtagtttcttacaataagacaacaatgaagtttgctacattgattgcctgtttctttcrtgaaagatttctctgtagcacgtgatgctgtttgatagcattttttacccaaaagtagaacttttttcaaaattgkagtcagctcaaacactgctttaacaactaaggttatatagtattctgaatcctttgttgttattcaacaatttcacagcctcttcaccaggagtagattccatctttaagaaaccactttcttggctcatctgtaaggaacaactcctaatctgttcaagttttatcatgagattgcagcaatccagtcacatcttcaggctccacttctaattctcttgctgtttccactacatctgcaatgacttcctccacttgagtcttgaacccctcaaagttatccatgagagttggaatcaacttcttccagacacctgttcatgttgatattttgacttcctctcatgaattatgaatgttcttaatgacatctacggtggtgaatcctttccagaaggttttcagtttactttgcccaaatctactacaggaatcacttttttttttttttttttttgagacggagtctcgctttgtcrccctggctggagtgcagtggtgygatcttggtttagtgcaacctctgcctcctggttcaagcgattctcctgactcagctcccccgagtatctgrgactacaggtgtgtgccaccacgcccggcttatttttgtatttttagtagaaatagggttttgccatgttggccagggtcttcttgaactcctggcttcaagwgatccgcctgccttggcatcccagagtgctgggattacaggcatgagccaccgtacctggccgaaatgtatttsttraacartaagacttaaaaattgaaattactcattgatacgtgggctgcaggatagatgtatygtactkgcaggcatgaaagtaacattcttctttctgaacatatccatcaaagccctckaatgacmtggtccattgttagtgagtgctaatattttgaaakgaatgttttttccttagcagtaggtcttgacagtggactgaaaatattcagtaagccaacctctaaacagatgtgctgtcatccaggagactgttgttccatatgtagacagcaagcagattagatatarcataattcttaagagctctaggactttttgagtggcaaatgagyattagcttcaaygtcaagttaccagctgcattagcccctaacaagagagtcagtttttatttatktatttattatttatktaktatttttaaargagacaagagtctcrccttkttgcccaggctggccttgaactcctgggctcaagcgattctccyaccttggcctctcaaagtgctgggataacaggtgtggccccagmctgacctttgaagcaaggcattgattttccctctctagctgtgaaagtcctagatggcatcttcttctaatggaaggctcttttgtctacataaaacaccttgtttagtatagccacctccagcaatgatcttagttakatattctagataacttgctacagcttccatgtcagcacttgctgcttcactttccacttttatgttatgacgagagcatttttcctcatgaaccaatctytacttgcttccagtttttcttctgcagttttctcacctctctcagccttcatagaattgwagaaggttagagccttgctgtggattaggctttttgcttaagggaatgttatggctggtttaatcttccatatggaccactaaaactttcttcatattagcaacaagattgtttcatgttcactgacatagtgcttttaattttattcaagaatttttcatttacattcacaattggctgagtggtacaagaggtctagccttaggcctttctcactttttgatatgccttccccactaagattaatcatttgtagcttttcagttaaagtgagaggcacatgacttttcctttccctgaattgtttgaggccattgtaggattagggttaactaattggcctaatttcaatatggttgtgtgttggggaaacgggaggtctgaaaagagggagaaagagagatagggaatggctaattggtggagcagtcagaacacacattatatgttagccatcttatgtgggcgtggttcatggtgttccaaaacaattacaatagtaacatcaaagatagcatggtagctcactcctggaatcccagcactttgggaggccaaggcaggaggatcgcttgagtttgagactagcctgagcaacatggtgacaccccatctctataaaaaataaatcagccaggtgtggtggtacatgcctgttgtcccacctaccgatgaggctgagcacttgagtccggaaggttgaggctgcagtgagctgtgattgtgccactgcactccagcctgggtgacagaacaagaccctttctcaaccaaaggaaaaaatatatatatatcactgatcgtagatcactatcacagatataataataatgaaaaagttcaaaatactttgaggattactaaaacgtaacacagagacacaaagtgagtgcatgctgctggaaaatggtgtcagtagatttgttcaggctgggtactatggctcacacctgtaatcccagcacttgggaggctgaggcgggtggatcacctgaggtcaggagtttgagaccagcctggccagcatggtgaaaccctgtctctactaaaaatacaaaaattagctgggcgtggttgtgggcgcctgtaatcccagctacttgggagactgaggcagaagaattgcttgaacctgggagatagaggtttcattgagccaagatcatcccactgcaccccagcctgggcgacagagcaagactccgtctcaaaaaaaaaaagacttgttcagtgcaaggttgacaaaagcctttgctattttaaaaaaaactcgctgggtgtggtggcttacgcctgtaatcccagcactttgggaggccgaggtgggcagatcacctgaggtcaggagtttgagaccagcctggccagcatggtgaaaccctgtctctactaaaaataaaaaatcagctgggtgtggtggcacgtgcctgtagtctcagctactcatgaggctgaggcaggagaaccacttgaacctgggaggcggaggttgcagtaagccgagattgtgccactgcagtccagtttgggcagcagagtgagactgtgtccccaaacaaacaaacaacttattatctgtgacgtgaaataaaatgaggtatgtctgtaagcaaaatggatattcctcttaatgtttgacattattttttaatcgaggagttctgaaaaattgattttgcatggatttttttccttgtgtttttctcttcaattttttttttttttttttgagagacagagtctccctgtgtcactaaggctagagtacaatgctgcgatctcggctcactgcaagctccgcctctcgggttcaagccaccccaagtagctgggattacaggagtgtgccaccatgcctggctaatttttgtatttttagtagggacagagtttcaccatattggccaggctggtctggaactcctgaccttaagtgatccacccaccttggcttcccaaagtgctgggattacaggcatgagccagcacacccggcctgattgttcagtttacactcctactagtgtcgattttcccataacctgactagcagagtgtgttatcactctttgctaatttggtatctgaaatgatactccttgctttcatttccatttctaaaattgtttagttgaatatctcatgtgttcagagactttcactctttcagttgttggactgtatttgttatttttctattgagaatttgtttttctcattcactcattttaaaaattattatttttaaaatttcttttcaatttttattaattattattattattattactattttttgagacagagtcttgctctcttgcccagtctggagtgcaatggtgcaatctcgggtcactgcaacctccacctgccaggttcaagtgattcttgtgcctcagcctcctgagtagctggtactacaggcatgtgccaccatgcctggctaatttttgtatttttagtagagatctcggggtttcaccatattggtcaggctggtcttgaactcctggcctcaagtgatctgcccgctttggcctcccaaagtgctgggattataggcttgagctaccaggcctgaccagtagttttcatttttcatatcattgttcgatttccctgattacttggtaaagttgagcactttatcatattctataggttgattaattgtgtctgaatttcttattcaaaaatgaatttgttgttcatatcctttgtccctttttaaaaaaaattaggtttgtgtctcaggatactttattcttcctttatgttcataagtagagttttatattacttattaaagttattcctagtaactttgttgttgatatctctttctattacagtagaataattatttctactgtatgctgtatagaaaagttattgatgtttatatgttactgtgttgatctgacaatcttaaagaactcttttaacatttcagttgataaacttgtattttctaagtagacattagtgatattttctgctaattatgacactttagcctgttcctttatggtattaaagtgtcttatttcttatcacttagcttaatgacacaacatccagtattaagtggctttgttttaaagtttgattccctgtgaaattttattattttgttcagtgggagacagaactgtaacttgcttttcagaattgttaggctgttatctcaatatttgttattgaatccatatttttgtcctgagttatagaaccatctactctttcaacaaaacatatattgagtgcttatgtttcatctggtgctgttaggtgttgggggtgcagcagtgaatagaacaaatttctagtcttcatggagtatacagctaaagagacagtaataaacaaataatatttttttgatccatagtcatttggatttacagatgcggaacccgtggacatagaagtcttactgcatttatatctgttttttttctgcatttgttgagatgatcatttttccttgatttgtaaatatgacaaccatattaacagattttcccttttgatttctttatgaattttctagctttcttcctatgtcattgatttctagtttcatacaattgttgttagaaagatacttgaaatgatttcattcttcttgaatttgttaaaacttgttttgtggcctaacatatgatctatcctggagaatattctgtgtctgcttaagaagaatgtatattcagctgctgttggctagaatgttctgtatgtgtctgttaggtccatttagtctgtaatgttcaagtctgtgtttccttattaatttttgtctggattatttatccgttgtcgaaagtggggtatttaagttccccactattacggtattgctatttccccctttagttctattgatagtgctttatatatttaggtgctccaaattggggcatgtatatatatttataaatgttacattctcctgatgaattgacctctgatctcttttaacactttttgactcaaagtctattttattttatgtaaggatcctctgctctctttggttaacatgtgtgtggaatatctttttccatctcttcactttcagcctcagtcctttaaagctaaagagagtctcttgtaggcagcatataggtggatcttgtttttaaaaatccgcttggctgggtgcagtggctcacgcttgtattcctagcactttgggaggctgaggtgggtagatcacctgaggtcaggagtttgagaccagcctgaccaacatggtgaaaccccatctttactaaaaatacaaaaattagctgggtgtggtggtgggcgcctgtaatcccagttactcaggaggctgaggcaggtgaatcgcttgaacccaggaggtggaggttgcggtgagctgagatcacaccatcgcagtccagtctgggcgacagagtgagactccgtcttaaacaatcaaaaatccattcaatctgtgtcttattggagagcttaattcttttcatttaaaataattattgataggtaaggagttactactgccattttgtcagtttttctgactcttgtagtttctttgttccagtcttcctctctagccgtcttcctttgtgatttgacgattttttggtagtgatatgcttttgattttctgtttcatgtatcttgtaggcagcatatcattggatcttgtttttaaaaatccactcggccaggcacggtggctcacacctgtaataccagcacttagggaggccaaggcaggtggatcacctgaggtcaggaattcgagaccagcatggccaatatggtgaaattccatgtctactaaaaatacaaaaattagccaggtgtggtggcatgtgtctgtaatcctagctactcaggtggctgaggtgggagaactgcttgaacctgggaggtggrgtttccagtgagctgagatcatgccactgcactccagcctgggtgacagagcgagactccatctcaaaaaaaataaaatgaaatgaaaaaattaaaaaaaaaaatcactcagccaatctgtgtcttctggagtattaaatttatttccatttaaaataattattgataggcaaggagatgctatcgccattttgtcaatttttctgactcttgtaagtttgtttgtttcagtcttcctctcttgctgtcttcctttgtgatttgatgatttttttgayagtgatatgcrttggttcttttctggtttatgtatctactacagccttttttttgtggttaccatgaagcttacataaaacatcttatagtgttaatagtctattttaagctgacaacctcaacagtataccacaactttacatttaacgtctcctttcacattttgtattattgatttcataatgtatatcttttatatatcatgtatccattaccaaattgttgtatgtatagttaatatttaatacttttgtctctttacatttatactagacttaaatctgatttaggtaccaccattacagtattggagtattctgaatttgaatatattgttatctttatagtgagttttattctttaatatgtttttatgtttttagagttcttttgtttcaatttgaagaactttctttagcatttcttgtaaggcaggtctaatggtggtgacctcccacatttttttctgtaaggggtcacatagtaaatattttaggctttgctggcaatatgctgtctgttgtaactgctgatatctgctattgtagcatgaaagcagatgtagactgtatgtaaacaaatatacatggctatgttccgataaaattattacaaagaccaagtacaggactggatttggcctctggaccgtagtttgctgaccagtgatttagacttctaacatggtagattacattgattgattttttgaatattgaacaagtgtagcattcctgggataaaccctacatggtgtggtatattactcttcttatgttcctgagtttgatttgctaatatrttcttgatgatttttgtgtttatgttcacttaggaaattggtctttagttttgcttctttgtactgtctttgcctgattttggctttaggataatgctgacctcattaaatgagtggagaaatgttgttccctcctttttctggaagggattctgtagagttggtgttacatcatcttaaagtgttggttagaaattagttagtgaaagcacctgggcctggagattgttatttcagaaaatttcatactataaattcaatttctttaatagttacagagctgttcaggttacatatttcatcttgggtgagttttggtagtttgtcatttcctatgaattggtccatttcatttaaagatatcaaacttatgtgtgtggagttgttcatactgctcttttattgkcttctttttttttttttgagacggagtctccctccgttgtccaggctggagtgcagttgtgtgatctcggctcactgcaagctctgcctccagggttcacgccattctcctgcctcagcctcctgagtagctgagactacaggtgcccactaccacgcccagctaatttttttgtatttttagtagagacggggtttcaccgtgttagccaggatggtctcgatctcctgacctcatgatctgcccgctgggattacaggcatgagccaccgcacccaaccttattgtcattttaatgtctgtggagtctatagtgaaatcccctttcattcctgttttagttcattttctattgctatagcaaaatacccgagagttggtagtttataaaggaaaaagatttatttggtttatggttctggaggctgagaaatctaagatgggttgccgcatgtggtgagggctttgtgctgtgtcataacatggcagagaagtgcaaggggaagcacatgtttgcaaagagaggccaaacatgagaggcatcctcactttataacaacctactcttgtgggttcacttctccaagagtgagaactcctttcagaacgacattaatccctcttaacaacctaatcacctcttaaaggtaccacctctcaacactgctacattgcagaccaagcttcaacatgagatttggtgaggacaaatgatattcaaaccatagtagtcatttttttgtgtgtgttagttttgctggaatcttgtcaattttattgatctttacaaacagtcagattttgatttgagtttttaaaaagttgtggtagaatatacacaaaatataatttgccatcttgtttttttttttgtttttgtttttttttgagacagggcctcactctgttgcccaggctggagtgtggtggcgtgatcttggttcactgcagtctctgcttcccaggttcaagtgattctcctgcctcagcctcccaagtaactgggattacaggcacgtgccaccatgcccggccaacttttgtatttttagtggagacaggattttgccatgttggccaggctggtctcgaactcctgacctcaagtgatctgcctgccttggccttccaaagtgctgggattacaggtgtgagccactgctcctggcccttaactawtttttttttttaaccttccacagtccttttattttggaataggctgtaaacaatcaaaccacgagaacatgattgtacaacagtaaaatgttctcctgtattaaactgaagatatctgtttaataaaaaaaagaaaaagaaaatgtaggaaaggtacttagagctgttactttctaagtacacaacaccctagacaattcaaggcatcttaatctccatcaagaaaaacaagaaaaaataatttttgtcacgctgttaaatccatcattatggatgaaactggtgcatattggtcaaacggatccaacaaacactgatgtccaagctggcatattggcaactaatacgtaactggtggtcaatagagagtttaaaagatcttccctttcttcttgttcttttccaaggttctcgaagagttctgttctaaaatatgttgttgagcttcccagtttgccttctcatcctcaaactgacgacgtttttcctctaattctttgtgctgtgcttccaaattctttttcattagctcacggcgccactggagctcagcttcagagtcctttagtttttgaactttttatttgaccttcatctctaacacctgctccatctccatctctatcttcttcattttagctgcatactcccttctttcttcttccatttgtgccagagggctcttagtcagctgccctttattcttgttgttatcaactccattataagtcacagctgccagttttctgcttctgtagttctyatagtggacattattagtaacatctttcaagtcctgagtgtgtgtttttatcagcatatttcttagaattgtaaaatcacaatgttcaccattttcaacttcagcagcaccccaaggatactgccttcctttgacccttttgccattaacttcaatgatagtattactagcttaccacagcaagaggtaaacagtcctttacctttttagcaagtttattttcttcttcatcatctatttctggaaaatcatatatcttaattttatgttcttggatttctttcattatctgttttttaaactgttggcattcctctggtataagtgtgtctgctttggcaataagttggatgataatcactttttcatgygaaygcttcataaactcaatatccaatggtttaagttcatgtcctgaaggagcaatgaagtataaacaacactgcaccctgctattaggcatctgacgtctgttcactcgtgattctgcatttaggtagtcctcagatttactatcaatgtaatcgataagaggctgccagcaattactattatccactacatctccaaatcctggggtgtcagctattgtgagcagcaactgaacaccaccttctttgattaaaactttggattgtccacctgtatagtctttttaattctatgagaaggacctggatactctggagcatacaaatctgtaaggaataatgagttgattaatgtcgactttcccaatccaggttcgcctctctgggtaaggtggctcacacctgtaatcccagaactttgggaggccgaggtgggtagattgtttgagctcaggagttccagaccagcctgcgaaataaggcgagaccctgtctcactttgtatgctggtgccagccgggggtgcccctggtaggtgctccctggggtgtctgcttcagggcttctgcgaaggtgcaggtcagggctcctccagctgggaaacttggaatagttggcagctgctttgaatgttggttccttcttctctgatgaccgtgctgtcaacatcaaaacacactgcatctgctgagtagaaaagcttcctcagctctgagtgggagaccatccttggaagaattttcctcgtttctccagtgctagatttctaggagaccacactcttctcttcctgttccttctctggataaaaatgcagcacagagttctgactacagatttcttcaagaaagacctgtggattccgcaagagcaagagcccaggctcaggtgaggcaagggtgcggccggggctgcaactggcgctggccattgaggagcttctgcgcgaccttgcgatcgtgcccgccaggcgccggcccgttggctcgcagcgccagctcgcgccgcgtctggcccttgctgcgcccggctctgcaggccgggaagttgtaaagctcctccatagctgatgggcggcggcggccgggccgaagcctgcggacacggaagggctgcagctcagcggcyggttacatcccgcccggccgtctgtggccacccaaccccttaactatttttaagtgtacattttagtgatgtgagatacattcataatgtagacactatccattttcatagctttttaaaaaatcttgttaaactcatactttatagccattaaacaataactcccagtttctcccttctctcagcctctggcaaccaccgttccactttccgtctctgattttagctactcttagtaccttatataagtggaatcatccactatttttttttctttgtgactggtttaattcacttaggagattgttgtcaaggttcatttatgttgtagtatcgcatatgtcagaaattccttcctttttaaggctgcatagtattccaccatagacatactgccaatgtggtatgtctgtaccacattttacttaactgttaattatgttttatttattgtgaataatgctgctgtgaacatgggtgtataaatatctctttggagactctgcttctgattctttttggtgtatacccagaggtggaatttgtggatcatatggcaattctatttttaactgcttgagaaactgccgtactgttttccagggcccatatcattttatgttccctacacctgtgcactagtgtttcagtttctccacgtccttgccaacatttgttattcttttttttatttttcacagtagccatcctaatgggtgtgaggtggtatatcttagttttgatttttcatttttctaatagtcatcgtgagcatcttttcatgtttttttggtcatttgtataacttctttggaaaatgtctgtggaagttctttgctcatttttgagttgggttgtttttgtcaggtgttcrtcccacctcatcctcctgagtacccaggactacaggcacatgccactatgccccactaatagaatctattttagacctaattatattctgtctacctgaaagacaattgaaataaaatgacataaagagaaagataaaacatgccaacactaatcaaattaagctggagtggctatgttaatatcagacaaagcacacttcaaaacaaaacactgggccgggaggctaatgcctgtaatcccagccctatgggaagccaaggtgggaggatcgcttgagaccaggaattcaagacctgcctgagcaatatagcgagactccatctcaaaagaagaaaagaaaaaaggaggaagtttttagttaactgtttgtttgtttgtttgtttgtttgagacagggtctcactctgccgcccaggctggagtgcagcggtgcgatttctgctcactgcaacctccacctccctagttggagcaattctgcctcagcctccagagtagctgggattacaggcgcctgctaccattcctggctgatttttgtatttttagcagagacagggtttcaccatcttggccaggctggtctcgaactcgacctcaggtgatccgcctgcctcggcttcccaaagtgctgggattataggcgtgagccactgcacccagcctactgttgcttttgaaggatacttttttttgctgcatgttttgttcagtgtttagaagggtttttcctttaattttctccttagtactttaaatatgttttttactgtcttctggcttacatagtttcagacaagaagcctgcagtcatttttactttattccccctttaagcaatgtgtattttcttttgctgcttttaatattttctctttattaatctttttcagcaatttgactataaagtaccttactggtacgtgtgtgtgtgtgtgtgtgtgtgtgtgtctgtctgtttcagattttgttgtgcttggatctgtgggcttataataatacagcttttaaaatttacagctaattatttcactaaacaatttttttgtccctatccctttaaccccaacctcacacatattagttaggtaggttgctattattccacagggcactgtagctgtgttgtcatttttcatactgttctttattttgaatagatttttttttgttatgtctttagggataatgatcttcttttgtcatttctaatcacatgttaacttttcaatgtgaaatttgcatttttttctttttttcttttctttttttttttggagacggagtctcgctctgtcacccaggctggagtgcagtggtgtaatctcggctcactgcagtctccacctcctgggttcacaccattctcctgcctcagcctcccaaatagctaggactacaggcacctgccaccacgcgcccggctaattttttgtatttttagtagagatggggtttcaccatgttagccaggatggtctcgatctcctgaccttgtgatctgcccgcctcagcctcccaaagtgctgggattagaggcgtgagccaccacacccggcctgaaatttacatttgatgttatcttttgatgttacctttgagttccatgttatttttaatatcttctgtttctctcatattcatgttttctttacattcttgcgcatatgaggcatacttataatagctggattattggattatgcccagtagttaagttgggaatcattattgttcagttgagacttatttatttttttcatacagagtcactctcaggataagttgagacttatttgtcagctcttttagggatggtctagaatagcatttgttctgtggctcatttagccctgctcctaaaggtgtgtctcactctggtctctgctgaatgtgttacatagtcattgaggtcttgccactctggctaaagacaatacagttggctagagacaatacagttgattcgcagctttctgtgagctctgggaattgttcttctgtaattgctctctccctggaagttgttcttgttcagtcttctgggatttcacatcacacatgtgcagattggtattcagttgaaactcaagggtatccctctgcagatttctggagctctttctctgaatacctctcttctcttgggtagtctgtcccacaaattctagtcttcttgagccacctgaacctatgatttctgtcttctcatttcagctctcattttgggttcctatctctgtgtggtagtttctaaattaatgccaagcagaaagcctgtgccatggtaggggtcaccctgtttctttccctttgttcccttcgccatacctgttgcccagtgtcttataataaggttgtttcttatatttgtctggtttcctagttgtttgggctggagggtaattttgacctgtcttactcccatgtggctttatgtagaagtctcctatgttactttaggaactcaagttggtttcagattctgagattaatatggaacataaagttttggtagaaaattttctcaaataaagttagttgtattcttttacttcacatttcttggtaataaagtgaagtgaagaacactgaaatgaaagggttaagagacaggaaaaagaggggaacgaagaaaacccaaagaagggttaaaataaataatcttcatgttgtcatttgtaattagacttcaaactttccttaaaaactgaaactggaaatatctgactcaatatggaaatataaaacatgtatctattttgctgtttaaatatgaaagttggcaactgatagggttttgaagagtatgaccattatctttgcattcagaatatagtgtttgattagtcagaaaagtcacatggcagaagccaatgagcagcaataaggacaccgatgaaataaaagaattcgaaaatgacatgatgtcaataagttggtccattgcccagaaggaaaggaattctgatgaattgatcaacgtaaaaagcatgtcttcctagtgccaaaaccaagaatagaaatcagaagaaaaatttgaaaagcaaaaattaaaatcaaaattattttttaaggagtaagtagggcaatgcagataactgatatgttgatagagattataaactagacagaacgagcttgaaataaagccagttgtgccaaaacaaacaacagcatagacagtgatggtcaagatagtggagaaaaaactcaaagtagagcaaaacatgggtctgagagattaagttaaaaagtcagctaaaccatacggtttccaatttctttaaaagtggatgtttatgattatgaaaaatcacaaaagaaagatgaaaagtaaactctacctccataatggcatgtgaattattttgtcattctctattttctttgaagcagccatgttgggattgtttcgaggatttctagtctcccagtccccagttcttgtattggtctacaggtttctaaacaaaaagtgatcctattaaaaaaaaattcttagacctcatgccttcttaccccctaccgctgactctgccccagccaccgtatatccttcttgtccctctaacccccytcacttgctctcatctcaagaattttgcatttgctgttacttctactgcaatgcttttctcccagatatctgtatggtttgcttcatcttcagttctgtgctaaagtggctccttacaaaattttattttaaaacatttattttataaatctgttatttaaaatagctagtccctttttctttgctttcttttgttggatgttgtatgtgtaatacttgtttactgttgtctcttctcactagaatgtagttttgtgacaggagggattttgttttatttatttctgtatccactgtgtttgaacagagtcagacacaaaggaagattgatagagtaatctagtaatgcttgctcaatgtgttgtccaaatacttgtttaaaatgcttcaaactataatgtttcatctatcagtttccgacagtgggatgttaatatctctctaatgattagttaccaatttctctttgttctgtaaatgtttgctttatgtaatctgaagttctcttatgttatccaagtaaattaatttttttatcattatgacagtttaagccatttatgtttactgtgaaaattcatatttatatttatctttttatgttattttctatgtaccatttgttttcattccttttctgcctgctgttggattgatcaaattttcttatcccttctttccactttattttaatgttttctatcaaatttaaaaacaactacttaataaattctttttttttgagacggagtttctctcttgttgcccaggctggagtgcaatggtgtgatctcagctcaccgcaacctctgcctcccgggttcacgccattctcctgcctcagcctcccgagtagctgggactacaggcgcccactaccacgcccggctaatttttttgtatatttttagtagagacggggtttcaccgtgttagccaggatggtctcgatctcctgacctcgtgatccacccacctcagcctcccaaagtgctgggattacaggcgtgagccaccgtgcccagcctaaaaacaactacttaataaattctaaagatgttctttctttttgtccatgaacaataagatccaccttagagtgttttctccctaattcaccctttttcatctttcaggttttgtagtctttttatttagttctgccttctttcccctttccccctgtgaagtttgaagtgatgctattttgactgcttgacttgttatgtaacattaacaaatttctaatrttgaatcatcctggcattctgattatattcaataggattgttctcagtttttattttcattcatagtttttgacaatgtttgttggaattctgagtcaggtacttccttttttttatttttggttaagaccgactttttgatagtttttagtagtttaattataaaaccatttaggctttgattacttcaatttttttttytttttgagatagaatttcgcccttgttgcccaggctggagtgcagtggtgcaatctcggctcaccgcaacttctgcctcccaggttcaagcaattctcctgccttagcctctcgagtagctgggattacaggcatgtgccaccatgcccagctaatttttctttttgtttttgtattttttttagtagtgacggggtttctccatgttggtcaggctggtctcgaactccctacctcaggtgatctgcctgcctcggcctctcagagtgctgggattacaggtgtgagccactacgcccggctggtcaccttaatttttaatatattattatgttatagctccttcatggtttaggttggttaactttttttttttgagacagagtttcactcttgttgcccaggctggagtgcaatggtgtgatctcggctcactgcacctcctgcccactgggttcaagcgattctcctgcctcagcctcctgagtagctgggattacagatgtgcatcaacacgtccagctaatttttgtatttttagtagagacgaggtttcgccacgtaggccaggctggtcttgaactcctgacctcaggtgatccacccacctcggcctcccaaagtactaggattacaggcgtgagttactgtgcctggcctaggttggttaacttttttatgagaacaagacttaaatggatttcttattgtttaaaacatagttctttgttttattcttttttcatattattcttttatttcatattgtccccccccccccaccccccttttttttgtttgtgtgtttgagacagtctcactctgtcgcccaggctggagtgcagtggcatgatatcagctcactgcaacctccatctgtcaggttcaagcgattcttgtgcctcagcctcccaagtagctgggattacaggcacacgccacaacacctggctaatttttgtatttttagtagagacggagtttcaccatgttggccaggctgttcgtgacctcctgacctcaggtgatatatctgcctcagcctcccaaagtgctgggattacagatgtgagccaccacagccagctgtttttcactttttaaatgttttatgtttttcaattaaatactgagttgatttgtattttttctttctatttcctccctccctcccttctttgttttttttctttagctggaattactggcacgccaccatgtttgcctaatttttgaattttttttttggtagagatggggtttcgccatgatggccaggctggtcttgaactcttgcactcaaatgatccatctaactcgaccctccaaagtgctggggttacaggtgtgagccaccttacccagcctttttcttttaaagagtttaaaatactgcgaaataatttaaaacactgacattatctgagtactgctttgtcagtttccaagtttttatgtgtaatatcttgttgctcttatgtgttattaatttttcttttactcatttctataccgtatttagtacaattcaaagaatttaaaggcattagttttttttttttttttcaattgctttctgtcaggaatttcaccttgctgtgactcttacctttattttactttcctgaagtgtttataaattaaattttattatgcttgtaaggtggacatgattataatcgtgcttaatttttaaaattttgttttttagtcatctgcatcacagtcaccaaaagcaccttttacaaagcttttaaaaatacatatatctggtcatttcacatcaactttattaaatatagaagttaaacctggtatgtgaactttgtgaagaacccattatgtagttaaaagccactactgtagacagagggagacttcagaaggttacctaaaaaaggggcaaaaccagagtgaggaatacttaagtgaattatgaggacacaattatattcatgtgggtctgtcctcacatttagagtataaggaagtgctggatttaagggagaaaatgactgtaaactctgatattttctacttgatatggtaaaatgctggaaaaatgccctaattacttattttgtataycttcaaattgtgccttatgttgaatataagtctaagccttaaaatttaacatttaactctatgtacttattatttttttttttttctgtagacctcgaagtagggggaaaactgcagtggaagatgaggacagcatggatgggctggagacaacagaaacagaaacgattgtggaaacaggtatcagaactcaagaatttataagaatgtataatgatgctttgcatatgtttgtacactgcatgtagcatttgtataacaatattctgtgttaagcatttgtttttatactgaactctaagtttcccatctgccttgttttgataactaatgacaaagtgaaaaaactgagccctctatctctcttttttccytaagccctggtttagtataattattttatatctgaagataaatgttttatcaaggaaataaagactgggagaaacagtaatccaggctgttagtataatcgctcatagtatattctggcctatgaaccatctagtgtttgtttaaagcttattttgttaatatgtgttctgaaaaaagtagtatgtttcgttatggaattaatattgtgaaaggctaggccaaactagaccaaatagtttctggtctgttggacttttaggtgcccttaaataagctgctgtatgttgtgcatctgcaaaaggtagctagagttggttgcccaaagcagtttccaaaattttcaggtcagtggtaagttatcaaagggactaggattcatattgtattgagaggatacctgtaggagatagtctctcattggtaaagttttcaatagttgttagataaagtttagacacagtgataggctttttctctgaagttgaatatcatcttgatgcttacagaatatcatgcagttaagagatgagaaaaattaaaaattgttatagattttaaaatacatttttccagaaatccttacagttgtcagatgtgttgctattatataggtataattcttggaaagccttcaaataatctatagtttctttccaataaggtctagttagagtattactcttggaagctcagaatactaaatttcacccttttgtgcacattcatgaattactgtattactttaaactgttaattctttttcatatggtttttttttctgtactatatattgttacttttactactgaaaagtctttttgaagctttagtgtttttgtttgtttgtttgtttgtttttaagacaagagtcttgctctgttgcctgggctggagtgcagtggcgtgatctcagctcactgcaagctctgcctccyggattcacaggttcatgccattctcctgcgtcagcctccttaatagctgagactacaggcgcccgccaccacacccagctaattttttgtatctttagtagagacggggtttcaccgtgttagccaggatggtctcaatctcctgacctcataatccgctcacctcagcctcccaaagtgctgggattacaggcgtgagccactgtgcctggcctattgttgttatttttgagacagagtcttgctctctctcccaggctggactacagtggtgtgatctcggctcactgcaacctccacccgccgggctcatgcagttctccctgcctcagcctcccaagtagctgggattatagacatgcgccaccatgcctggataactcgtatttttagtagagacagggttttgccatgttgacgaggctggtctcgaactcctgacctcaggtgatccacccacctcccaaagtgctgggattacaggtgtgagccaccgtgtctggctctaattattattattgctattattattattattattattattattattattctttttgagttggagtctcactcttgtctcccaggctggagtgcagtggtgcgatctcagctcactgcaatctctgtctcccgggttccagtgattctcctgcctcagtctccctcctggtctgggactataggtggatgccaccacgcctcgctaatttttgtattttttagtagagatggggtttcaccatattggccaggctggtcttgaactcctgacctcgtgatccacctgccttgccctcccaaagtgctgagattacaggcgtgagtcaccgcgccgtgcctgattattattttttttaattttgttttttygagacagagtttcgtcctttgttccccaggctggagtgcagtggcgtgatcttggctcactgcaacctccgcctcccaggttcaagtgattctcctgtctcagccttctgagtagctgggattacagccacccgccaccacgcccggctaatttttgtatttttagtagacacagggttctcccagtgtttgccaggctggcctcgaactcctgayctcacgtgatccgcccaccttggcctcccaaaatgctaggattacaggcgtgagccactatgcccggccctttgattattgaagatgattatttcaccaccttttcttttctcctgaaacttccaacaccccttctcatttttgattctttagtgatgatcttgcttatttcagtgaaaaaataaaaaatagagaacaattagaaaagaagttccatattcatctaccatcaaatctattttcttgcttgcatccctacccgtatgttgtttctgtcctggtaaaatgggataaagactgcggataaagccagctcctctgcttgtgtcttccattgtgtcccctctcatgtattacggactttggttctgcagttgtccttgcttttctgcatcaataacttttccatctcattgatttcattagcataaggggggtgctgcagaatcaccccctttcaacacaaatagcctctcttgatccaacatccccttttaggtactatacagcttctttgctccatcatagcaaaaatccttgagttatttatacctatgattactacttatttttcaccattttctcatgaacccactctaatgaagctttcttcctcccattctactaaaattattcttgtcaatgtaatgatctcatattgcccagaccagcttttagtcttcatcctccttaacctttcaggatcatttcacacagctaaccactctcaggagtgaaacttttttttaaaacttgactttcaggtcactgcattgtcttggtttttttttgtttgtttgtttgtttttttgttttttcctactccttcactggttttttctcattctcttygctcatcttcttatgtattaggtggtcttattcagtttaatggcttattatctatttttgtgctattattatgttatctaaatgctaatgactctaaaattacgtcaccagctctttcttgctttgaacacaacctgtatctttcagcttgtttcttaacatctcttcttagatgtctgaagaggatctcatatttagtgtgtcctctctggaaatttttgttgttatcctgaaaccctctcttccagtgttaccacctctggtatattgccactgtatattgttcaggcttaaaaagatggagtctttcttgatttcacattttcacattttacattttatacattcacattttagacattcacatttcacattttcacattttagacatccagcccactggagggctttacctacccagtatatcctggattcaattactttgacccctccactgctattattccagaacttcacactaccattccactggactgctgcaatagcttcctaactggtctttttccttttcattccattctactcttgtcccacacatagtagccagagtgatccttccaaattcaaagtgagagccttttacttccctctgtcaaccatccaaagactccagtgatatttagaataaaattcaaagttcatgcagtaccattgttttcaggctccattgatctgactttggctacttgtataaccgtatcttatgttcccttgttcactgggctccatccttactggcctcctggcttttccaggagcccaccaaacatactcctttctcaggcatttgcactttttgtcttctttgcttggaaaaattttttctcagatattcatacagcttattcccttacttcagtcaagtctctactcagttacagttttcccagagacctttcctgacaaacttgtctaaaaagtaacacttgtcactttgtcttctcctgctttatttttctcctagtacgtaacagataggacatttaatttcatattggcttattgtatgctttccacactagaatgtaagctttatgaagtcaggggatttgtcttgttaccttatttatccccagtgccaagaatacttctagggatataggaggaattggattcactaagtgaagcagtattgtgttcttgaattttctttatgttttctaagctacctaccattcttggaacattacaacattacaacaaaactaaattcctggcatttttttttccttactggagagtagtaagccccacgaatggactgtcttctcatgctgtctcctatgagaggtcaaggcaaatacagtttagataaatgttttaataggagcagaaaactattttttttaacctggctttactaaagttaataaagccaagtgtrtattagtctttgttttgtctttgtccttggaaagtccattgtccacttcttttagggaacatagtgaacatagggcaaggagaacagtgaaagaaagaataactgttataaccactaaacctgcaaatmcagacagagtttgttccataaatttctagttcatttaaaagcacattcaagtttgctgcaaggttttaacatatgtatgtctcaagaccccagggtttatttgaaggttctcttgttcctgtaaatcctgtgccttgacatgcttacttaatgttttgtagtaatataagggtattacgctgggcgtggtggctcacacctataaccctagacctttgggaggcctaggtgggtggattgcttgagctcaggagttggagaccagcctgggcaacatggcaaaaacccgtctctacaaaaaaatacaaaaattagttgggtgtgatggtgtgcacctgtagtcctagctactcaggaggctgaggtgggaggatcgcttgagcccgggagacaccagttgcagtgacctgtaatcagtcgcaccactgttcaccagtctgggtaacagagtgagatcctgtctcagaaaaaagaaaagaatgctaatgagtctcctaccatggtgggtggatgggaatgagtaatctaggagtagccattgggaaagtaataagaaacctcatttggtaatattttatgttaagaaaatttcatctttatctcagctcactgcaacctctgcctcccgggttcaagcaattctctgcctcagcctcccgagtagctgggattataggtgcctgccaccatgcctggctaatttttttgtatttttagtgcagactgggtttcaccatctttgccaggctggtcttgaactcctgacctcgtgatccacctgccttggcatcccaaagtggtgggattacgggcatgagccaccacacccagctgagaaaatttgatcttttgttggtggtggctgttaccagtctctgcgcattttttttatatgaataaaatcaacttgagtgaagtgctagttacttgaagagaagagaaactttttttttcttgagaatcacataatcaggtctttgcaaacttgttttcattaaytataattagctaattataattcagttagttataattaaacatttttctcctagtgttcaagttgtcatagtttggctcatgggagccccttgtcagctggcttctgagtccttttaaataacatctcaaaacctttcagagctctgtgctctttggcaaaagttttatttttcaggcccatttaaaattctccctgccacaaggtatgaaatcagctattctctaaggacttctagttttttagtggagaatagtattagggacaaaaatttaggctcaagggatatcgggggaaattcagccagatattgggcaaaattcacccccgataattcacgtaggttcttttctattttccctaagcttyggctggtttgagaaatagagggacagagtacaaaggagagaaattttaaagctgggcatccgggggagacatcacatgttggtaggttccgtgatgccccacaggccgcaaaaccagcaagtttttattagtgattttcaaaggggagggagtatatgaatagggtgtgggtcacagagatcacgtgcttcacaaggtaatagaatatcacaaggcaaatgaaggcagggcgagatcacaggaccacaggaccagggcgaaattaaaattggtaatgaagtttcgggcacgcattgtaattgataacatcttatcaggagacagtttgagagcagacaactggtctgaccaaaaatttattaggcggggatatcctcttcctaataagcctgggagcgctacgggagactgggacttatttcatccctacagctcgaccataaaagacagccgcacccaagggggccattttagaggcccaccctcagggatgcatttgctttcttagggatgttccttgctgagaaaaagaattcagcgatatttcttccatttgcttttgaaagaagagaaatgtggctctgttctgcccggctcaccagcggtcagagttcaaggttgtctctcttgttccctgaacattgctgttatcctgttcttttttcaaggtgcycagatttcatatagttcaaacacacatgctctgcaaacaatttgtgcagttaatgcaatcatcacagggtcctgaggcgacatacatcctcctcagcttatgaaaatgacgggattaagagattaaagtaaagacaggcataggaaatcacaagggtattgattggggaagtgataagtgcccatgaaatcttcacaatttatgttcagagattacagtaaagacaggcgtaagaaattataaaagtattattttggggctctaataaatgtctgtgaaatcttcacaatttatttcttccaccatggcttcagccggtccctcagtttggggtccctgacttcccacaacaaagggatgcatattacaattgttactgttgagaattagttatgtgagtccactttagtcatatactagtacagtcatgcactgcataatgacagcagatcacatatatgacagtagtcccataaaattataatggagcggagaaatttctgtcacctcaatatgtcatagctgtcatgatgtcatagctgtcgtgatgtcatagcacagcgcaacatagtgcattactcacatgtttgtggtgatgctggtgtaaacaaacccagtgtactcccaattacatgtactatacaaaagtacactacatacactcttgcacagtacataactcttgataataagtgactgtgttactggtttatatatttactatactatactttttatcattattttggagtgtaccccttttcttaagcaaaaaagctgtaaaacagcctcaggcagaaccttcaggagctatatcagaagaaggcattgttatcatacgaaatgacagctccttgtgtgttattgtcgctgaagaccttccagcagggcaaaatgtggaggtggaaagacagtgatagtgacgatcccgacttcgtgtaggcctgggctaagtttaaaacaaaaacagagaaacaaaaaagaaaaaccctaaaaccaaaaaacttacagaataagggtagaaaggaagattttttttgtatagctgtacagtgtgtgttttaagctgtgttattacaaaagtgtcaaaaagtttaaaaaaagtttataaagtaaaaatgttacagtaagctaaggttaatttattactgagcaaagaaaaataatattttaaaaatttggtgtagcctaagtgtacagtgtttataaagcctactttagtgcatagtaatgtttgaggcctttacattcactcagtgattcacccagagcaacttctagtcccacaagcaccattcatggtaagtgctctatgtaggtgtaccattttttgtgtttttacactgtattcttaccattgtttctatgtttacatatatttagatacacaaatacttgactgttgtgttatagttgcgtacagtaacatgctgtacaggtttgtagcctagagtactaggctgtaccaaatagcctaggtttttagtaggctataccatctaggtttgtgtaacagtgacaaaattgcctaatgatgaatatttcagaacatatccctgttctgagaggactgtaattacatagatctatacacacacttacaaatgtgagttcacatcgatacattcagttacttctagcataagtttttaaaaatagactttattttatttatttattttttttgagacagagtttcactcttcttgcccaagctggagtgcaatggtgcaatctcggctcactgcaacttctgcctcctgggttcaagcgattctcctgcctcagcctcccgagtagctgggactacaggcatgtgccaccacgcccagctgattttgtatttttagtagagacagggttttccatgttggtcaggctggtcttgaactcctgacctcaggtgatccgcccacctcagcttcccaaagtgttgcgattatrggcatgaaccactgcacctggccaaaaatagcctttatttttcagagcaattttaggtttgtagcaaaattgtgaggaaggtactgaaatctcccataaatccccttccccgacacgtgcatagcctttttcagtatcaacatcctatactagagtggtacatttgtcacaattttttaagcctacattgacacattatccacagtttatagttcacataagggttcactcttggtttacattctatgggtttggacaaaggtataatgacaggtatctgtcattatagtatcatagtcactgccctaaaaattaataggtgttccacctattaatccctccctccttgctccctccctccttgctaacctatggcaaccactattctttttactgtctccatagttttgccttttccagagtgtcaaatagtttgaatcatataggatatgtagtcttttcagactggcttctttcacttaataatatgcatttatgtttcctccacatccttttctgtttttttcttttctcttttcttttctttctttatggagtcttgctctgtattcccaggctggagtgcaatggtgtgatctyggcccactgcagtctccgcctcccggtttcaagtgattctcccgtctcagcctcccgagtagctggtattacaggcatgcaccaccacacctggctattttgtatttttagtagagacggggtttctccatgttgatcaggctggtctcgaactcctgatctcaggtgatccacccgcctcagcctcccaaaatgctgggattacaggcgtgagtcaccgcgcccagccctcctccgtgtcttttcatgtcttgatagtgcatttcttcttagtgctgaataatattgtattgtttggatggaccagagtttatccatttgcctactgatggaatttctatttgcaccctggttttggcagttaagaaagcttctgtcaacatctatgtgcaatttttgttgtggatgtaagttttcaactcatttggataaataccaagcagcatgatttctggattgtatggcaagagtatgtttagttttgtaaggaaccaccaagctgtcttccaaagtggctgtgccattttgcattctcactagaaatgaataaaagtttctgttgctctgtgtacttactgacatttggtggtgttggtgttccagattttgaccattctaataggtgtgtagtgatgccctgttgttttaattttcatttccctgataacatataatgtggaacatctgttcatatgcttatctgcccatctgtttatgtttattggtgaggtgtctgtattccctatgctttttttctttctttctttctttttttttttttttttttttttttaagacagagttttgcttttgttgcccaggctggagtacaatggcacaatctcggctcactgcagcctccacctcccgggttcaggcgattctcttacctcagcctcctcagtagctgggattacaggcacctgccaccatgcctggctactttttttgtatttttagaagatacggggtttcaccatgttggtcagactgatctcgaactcctgacctcaggtgatccacctgcctcggcctcccaaagtgctaggattacagatgtgagccaccatgcctggccttccctatgctttatctcctgaaagagagtatagagaaatggtataatttcttccttaaatgtttggtagaattcagcaatgaaccaaactgggtgtgttcaatattcgaagtttattaatttttgattcaatttgttttaataggtatagacgtattcagattatttcttcttgtgtaagcttgagcatattgtgtcttttaagtaattggtccatttcatctaggttatcaaatttgtgggcatacagttgttaatagtatttcttgaatatttaagattccatgggatctgtagtgatgtcccatttttcatttttgatattactgagtgtagattttccctcctttctgaaacagttggccctttaatagcttggggttgaaccatgtgcatgcactgataaatggatttttttcagtaaatatattggaaatttttcgtggagattcgtgacaatttgaaaaaatgcgtagatggactgtgtagcctagaaatatttaaaaaattaagaaaaaggtatgcatgaatgcataaagtatatgtagatacttgtctgttttattgtttactaccataaaatatacacaaatctattactgaaagttaaaatttatcaaaacttaagcacacacttaaagactgtatgtggtaccattggcaattgagagaaatgtaaacaaatgtaaagatgtagtattaaataataactgaataaaatttactgtagtacatactgtacaactgtaataattatgtggccacctcctgttgttattgcagtgaactcaagtgttgcaaatatctgattaaaacaccatgggataccaatcatctttgagcagttcatctctccagtaaattgggtatcttggtaaaaagtgatctggcgcttctcatgtatctttcaccatgttcagtgcagtgctataaattgtgcataacaccacgggacccatatgaagtgccactaatgatgcttaaagtgctccctacaagaagcaaagtcatgacatacaagaaaaagttgaactgcttgatgtgtaccatagatggaagtctgtagctgaggttgcccactatttcaggtagacagtcttgtaaacaggtgacataaacttatggtatcagtaaatacagtatggtcttgtaaatgtattttctcttccttatgattttcttttcttttctttccttttccttttccttgtctccctggctggagtgcagtggcacgatcttggctcactgcagcctctgccttccgggttcaagcgattctcctgcctcagcctcctgagctgggattataggcacatgccaccacgcccagctaagtttttgtatctttagtagagacggggtttcaccgtgttagccaggatggtctcttatctcctgacctcctgatccgcccgcctcggcctcccagagtgctgggattacaggtgtgagccactgtgcctggccatgattttcttaataacattttcttttctctagcttactttattgtaagaatacggtatataatacaacacagaaatatttgttaatctactgtttatgttattggtaaggcttcctgtcaacagtaggctattagtagttaagttttcaaggagtcaaaagttacacagatttttgactgtgtggtgggggggttggagcccctaaccctctcattgttcaagggtcaactgtatatgtgttaaatgccataacttttcctctaagcactgctttcactgcatctcacaaattttctttttattttcatttagtttaaaatatttttcaatttctcttgagatttcttctttgacctatgtgttatttagaagtgtattgtttaatgtctcagtattttgggattttaagctatctttctgttaccgaattctagttgaattctgacgtgatctgagagcagacattgtatgatttctatttttaaaaatctgttaaggtatgttttatggctcagaatgtggtctaccttgtaagtgtcccatgtggatgagaagcatgtgtattctgctattgttgatgaagtagtctttagatgtcagttatttccagttgattaacggtgtcagattcaactatgtctttgttgattttctgcacgccagatctatttctgagaggggtgttaaactttccaacgataatagtgggttcatctcttactccttgagattgtatcatttttttgcttcacatattttgatgttctgtttagacacactgatgtcttgggaattaacccctttatcattataaaatgcctttctttattcctgataactttgacatctgagctgtctgaaattaatatagctactcctgctttcttttgattatttttagcctggaatatctttctccatccatttatttcttatccgtatgtatctttatattatagttaaagtggggtttttttgtagacaatatgtacttgggttttctttttaaaaaatctattctaggccatgtgcggtggctcatacctggaatcacagcactttaggaggctgaggcaggtggatcgcctgaggtcaggagtttgagtccagcctgaccaacgtggtgaaaccccacctctattaaaaatacaaaaattaaccgagcatggtggcgggtactgtcccagctactcaggaggctgaggcacaaaaatcacttgaatccaggaggtggaggttgcagtgagctgagatcgtgccattgcactccagcctgggcgacagagcaagactctgtctyaaaacaaacaaacaaacaaacacaacctattataacaatttctgtcttttaattggtatatttagaccattgttaytcaaagtgattcttctttatttttagagacagaatctcactgtatcacccaggttggagtgcagtggtgccatcatatttcactgtaaccttgaactcttgggctcaagccatcctcgcacctcagcttcgcaagtagctgggactacctgtgctcagcctcccaagtagctgggactactggtgcacaccaccactcctggctaattaaaaaaaaaatagtttttttggagggacgggttctcgctgtgttgcccaggctggtcttgaaatgctggcctcagcctcctaaagtggtgggattactgggatgagccaccatgcccagctttagagtgattgttgatataatggaatggatatctaccatatctgttaactgttttctatttattgtccttgttctttgttcatatttttgtcttccactctttttgtgctttttgtggtttcattttattttattgtattataattttttgagacagagtctcactctgttgcccaggctggagtgcagtggcatcatcttggctcattgcaagctccgcctcctgggttcacgccattctcctgcctcagcctcccgagtagctgggactacaggcgcatgctttcctgcccagctaatttttaatatttttagtagagacggtgtttcactgtgttagccaggatggtctcgatctcctgaccttgtgatctgcccgcctcggcctcccaaagtgctgggattacaggcgtgagccaccatgcccagcctgccttttgtggttttaattgagcaatttgtatgattctgttttctttcttagcacagttctctctttttttttttgagttgttgccttagagtttgtaatatatgtttacaacaaacccaagtctactttctaataacactgtgcagtagtgtcccactttaactgtggttttgcttttcacagttttggttacctccagttaaccgtggtctgaaaatactaaatgggaaattccagaaataaacaattcataaattttaagttgtacgctgttttcagtagcataatgaaatcttgtgcttttcagcctgagatgtgaatcatctcttggtccagcacatccatactgtatatgctacctgcctgttagtcacttagtagccatcttagtatgattgaaaaagcatactggatatattgggtttgctgttatttggtttcaggcatccgctggggtcttggaatatattccccatggataagatggcaccactgtaattttcacttgtaatgtgagtactttataagaacaaaataatcctaattccttcctcgcatcccttgtattgttgctgtcagtcatttcagttatacataagcatatgtatttatacataagcaatcataattgaatacattgttgcagatattattttgaacaaacttatctattagatcagttaataagaaaaaagtttttttttaaaattttatcttcacttgccccttctgagatgctcttcctttcttgatataggtctaagtttttgacctgtaccgttcttgttctctctgaaggacttttaacatttcttgcaaggtaggtcatctgacaacaaattcttaaatttttgtttgcctgagaaagccttcacttttgaaggataattttgcagggtacagaattctaggttgatgttttctttctctcaacatgttacatatttcattccctcttttcttgcttgcatggtttctgagttgatgtaattgttaccttaggtatttttttccctctgacctcttttaggttttttcagtattctgtggtttttaatatgatgtgaccaggtgtagtttgtttgggcatttatcctttttgatgttctttgtcatttggtttctgagattaatttgaggaatatttcttcttcttcctctcttttgtctctttttggtatttccattacatgttacctttttgtagttttctgtattaaacattctgttctttttttttttttttttcccagtctttttctctttgcttttcaggtttggaagtttcttttgaaatatcttcaagcaatgagattgtttcctcagctgtgtgaggtctactaatagacccactaaaagcattcatcatttctgttagttttaaaaaaatctctatcattttaatctctagaatttcgagttctctgcttacattgcccacgtcttcttgcatgctgtctactttatccattagaaccgttagcatattaatcatagttgctttcaattcctcatctgatcatttcaaattccttcctgcatccaagtctagttctgatgttgctctatactgtgttttttgctttttagtataccttgtaattttttttctcgatagccaggtgtagtacactgggtaaagacaacagctgtaaataggcctgtagtaatgtggtgggccttgtaggaggagggggaagtctgaattttttactcttcctccccaccctgccctttcactgcttttaggtggggcagaatggcctagaatgggctaaagttagatagttctcttaggctagaactggctggagtttatttctcttctcgtaggttaggctctagttaaatagtttctcctgaaggcaggccttgttaagagaaatggttccttttcccctcctgctgttgaaagcaagaagatatttttctgtgaagttcactgtgagaaactggtagagctcctagaggtaaaacacaaaaccgtggggccccacgatgactgggtccctctgtagtttgtatcttccagactcgtccacactgaacctccaacgttttgtcaattatggttcaggtttttgtacccatggagctttttacccatgggtttctgctcaggtaagttgtgattcatgtctattcctccagttctgagggtacctgtttgccctgtgactttattgaccttatggttctagcaagagttgttgatttttcagtttagctttttacatgtattaactatagttatatcccttttctaatttggtaagccagttctaactatagtggaatggattataattgttaacaataactaagttaatacctatccattattataaatatgtctcataaataataattcttattaaaatagtaaaactatcggatttaatatcaagattaccatttgtgactaacctttgagggatttccactaatgatgtctatcatactgccttgagttatgtatcaaaatcttagattatcttctggtctaattatttgttaatttttagctgttgcttatgtaatgactattggttcttatttagtggtggytttcagatgttagtatttaattgacatagacaagataggggtcttttgctttgtcagtacacttgatgagacaggtggaattggagttccaaagccatacacgtgttactttacttcagcgccttttggttatttgcatatggtttaagtatacagctttgtataaaccctacatatgcctttatttacaagaatagaaactttagtgatattattattttaaaaagtggacaccccaaattattgtttgtacattttgagtctagctgctaattcacaacagattatggtgacatttggcacaaagaaaaagcctggattcttattacattaattggcctaacaatttaactttacctgtcctttcttatctttttttgatatgaaagtttgtaattgacacttctctttttgaagtatcaggtttttctttggataaaattttccctaactttagtatattatttaaaattatatactgtggtggtagatattggtgttgtctgtcaaatagttctggcactctcccttctggatatgtggtggaattacacagctccaagcctgcttgacaggcccatgtgactgtgtccagtgaattgtgggtggaaatcatatgggtcacttctggactggagcaaaaccctctgagcttttttcttttgtagttactgtcagtgtttgaaatactgactgcttcgatggtttagttgaagagatggtgaagcaaagacacctatatgtctttgataagccatacataattttcaaactgaagtttaaaatgaaaaattcagcttcttattgccacgtaacaaatcatttcagaacacagtggcttaaaaagcaaacatatttcatgatcttgtgggttaggaatttaggtcaggcttggctgggcagttctgctctgctggcatccaccagagtcatttattgctattcaggtgacacctgggctggtctagagggtccaagacagtttcattggttcatttttgtttttaaggcctaaataaagttaaatttcagaagaagatcaatattggtagaaataattgttataaagatgtatgttgtaatttgttggtttattttagtttcttttattaattgcaaaaaattccattaacatttaaaagttatgtaggaaaactaaaggaaatactgataacaactaaataaaacacctagagaacagttgacttccaacagttactattttttttcatttattagcagtctatcctgcttaaacaattactatttaaattaatgcccgcatattttttggcttttgacaagtattggactcttaagctttttgaatttgcattaaaaaatcacattaaatattataacagtaatgtatatttgtagaaatttatggaactgtgggtaattataaagagagtaagtcacctgtaaaagtgttaactctcagagaaaattagtgctttttttgtgtatttacttttagttgcttacattgttctgtgaaagcagcaactatattcatattattaatcagtgtcaatattttaagtagtttagtgaataaagatagtgttaataaataatttgctttttctaatatagtgctaatgttttagctttacagtacaattttgatgacattggatacactagattcaatgagatatatccagaaaacataactgtcaggaggcagacttctttcaaaagaagggagggacatggttacacaatttcttagctatgttttcttctgtagttttagtaggaagcaagcatgaaaartattgccattctctggagttaagggaagtcagttattctatttaatagctgattaggctgggcatggtgatggtggctcatgcctgtaattctagcactttgggaggctgaggtgggaggataactggagcccaggagttcgagaccagcctgggcaacatagttaatccctgtctctaccaaaaaaaaaaaaaaaaaaatccaggcgtgatcgcatgtgccttgtagtcctggctagtggggaagctgaggtgggaggataccttcagcccaggagtttgaggttctgatgagctatgattgtgccactgtactctagcctgggtgacagagcatgagcccatctcttaaaaaaaaaagttgattaaagcatagagggagaaggcatattttttggataactagtcgataatgaatgtcagtgtttacttgcatagttagtaaatatgagttcattttaaatatattatttttctctgtgctttttataaatctttgtrtctatatatgagatttatctgcttgctttatattatataatattaattaagcaactatcgaacatcattcaggttttgtggtagctctggtttataaaaacagatacagtgcctgttttcatagagcatrtagtcaaattggggctgtggtctcctgtgaatggcacatacagaacaggggttcttaactttttcagtgccatagtcccctttggtactatgatgtaatccatggactctttttcaaataatgtttttaaatgaataaaataaaaatacaccaaaataggattacaaagataaacaattgcattgaaataaaaataagccaaacttgtaatcttataacatctttttaattcacttaaattataaaatctagcagtgaatttaataactactgtaattttgaagtagtgatgagggtgaatgatattttgggatatctgcaacaactgcatgtgataagaaaatatccgtgatttctgttggtgacaaacacttaggtatccaccaataccactgtgcttgttgcttacattcttaatattttcttagaattctaaattttggaagtgaataaaaattagaggttagtaaaaataaagaagtaatttctccctctaaaatcctataacccttgagtgagtaaactttaaaaatccattgaaaaagtaggacgctttgaaagaatatactaatgtattgataagggagtccaaaattgacctctaaaatatttttgacatagcctgttatgctatcagtgttggtaagtttgttcagtatatttgtaggctacacacagtcctttcaaagaagtatttaacctttgagggaaatacttttgtaattgttcaaaatcaaaatgctttatttctgtgaacttggctgtgagataaatgttctgtccacttcataattttattcagcagtgcttaaaaaagagtatttttagttatctcatagtgtttatattcagtaagtgatccctcagtaacatggtcctagtaagactgttaacatttctctttaatattgatgtatttataaaacttacatgctacactttgatgctctgccaggcggtggaagtagtgaaaagagcacatcaggctttagagttacacaacccgattttgtatcccagctttgtttcctattagctttgtgatcttgagcttgtaattaactttcagattttagtttccttatcttttgaatgaagaaaatatgttagatgttattctttttttaaaagagaaaacttgagagagaactattaggcacactttgatttatccttttagttttagctgggcttctaatacctttctgaagcctttctgagctgtattccccacctcttccccttaactcccatcatgccatgtgcttaccagcatcatcattattgtgtcctatttttattttcagtctttcatctagatccattaaacgtagggatcttgactatctttgtaatgactaccatttgaatagaaattatagtatgtacttgttactcaaaattttgtttggtaaataaccattctaaattaatgatatattaactctggagcatagatcggagggggctaaataaatgtcttctttattctcrttaattctcataatgcaatttaataattcatgatgtgacatcaagagttagaaattgagtaggtgagggctgggcacggtggctcatgcctgtaatcccagcactttgggaggctgaggcaagcggatcacgaggtcaggagatcgtgaccatcctggctaacacagtgaaaccccgtctctactaaaaaaatacaaaaaattagccaggtgtggtgccgggcgcctgtagtcccagctacttgggaggctgaggcaggagaatggcgtgaacctgggaggcagagctttcagtgagctgagatcgcgccactgcactccagcctgggcgrcagagcgagactctgtctttaaaaaaaaaaaaaaaaatcaagttgtataagtgaggtggacaagtgaatccatagactatagtgtgtgaatgtagatagaggtcatcagaatagcagctacatcactacacttaagacgttgagctaagtgcttttcatgcgttcttttttttttatttttggatcataaagacagttttatactaggtggtattgtctgtcttaaatgacgagcaaagtaaaattgagatgaagttaagtaacttgccaaaggtcacattgctagcagatggcagagctagaatgcagactcggaaccattggattccaagcctttggttttaactaacacagcagacaccttttgctattaaactttctcatgtcttagaaccaatttgtgtaggataaattagagtcattggaggtggaaaagtaaaggtttaaaagagggtatgttatgaacttatttaagggaaagggttagatctaatttatctttgcatccccagagataatgcctggcacatagctgatgctatttaatgaagtgcacattgtcttcaagttctcttaggaatctacttacatgtgattaggttctcttttttattgttgttgttgagacagggacttgctctgtcacccaggatggagtgcagtggtgtgatcttggtgcagctgcaacctctgcctcccaggctcaagtgattcttccacctcagcctcctgaatagctgggtctactggtgtgtgccaccaaggccggctgaattttttttgcttttgccatgttgcccaggctggtcttgaacttctgggcttaagtgatcctcctgcttcccaaagtgctgggattacaggcttgagccaccacgccaggtcaatgattaggttccttagtatagtttaccactgtacatgtgccacctagtggatggagattatccgtagatagtggctacagatgaaatcgccttgcctgtccttatcccagggttgcagttgtccccacctttctgactttggtgcattttgtgaccaagtgtcattgcctgtattttaggtcaggttcaaagtaagggaaaagatatattagggattttatattcaagaaaaataccacactgaatttttaaaaatgcaatgtaattttttaaatgtctgctccaatttccacagtttggcttgcaggcagtttgagctaattggacctcatgaaaggcaaaaactctgcaaagtggtggagtcgccaaacctggactgttttattggttgaatggctagcttctttctttaggcaaagcataggatagtattcaagagtacatttttaataataaactggagataattaagtactggcatcaggcatatttcctcagatatcactgggtttgtagccatttcatccagagcatctctggatgacatctctggttggatccctggttgacatcatttttatccagagcagtctgtttcacattctgctgccaaactctgacaattgtttgaagactaggattaggagaagagagagagacataaacactcagttgtcctgccttgactttgacagatactaagatctaacatagtctaccaaatgaagagtgacagttaaagacagcttctgttattacctgaagtatcaaatatttagtgataccttttttgttgtttgttcctattttgtggcaggaattactgctatctaggaagcagtcatagagtcctctttatttgttaaagaacacaagactgaaacaacaaaatctaaacmaaaagtaaaaccaaaactatcgctccctactgtttctttagcagatccaagttagaatcatgggcagagccagtaataataatagctagaggagaaaagagaacaggatgaactctgaaagcctgtcttcttacctgctttatgggatcagatctggtgccgatcctatttcttaaaaaacaaaaaaaaaacaaaaaaaccctatagtctgaatctgtttttttctctttgaaatgcaggaaacataatttcaaaaggttgtatacctgcaaacctactggccaaccagtaacattaacgtttaacttttctatttccttctggctcttatttgagggagagatagacattgtcctgcttcttttcccttagctgtaagcaataaaactcccctaaaaataataaaagtgctatgtattttcttttttggggataaaaataaggaaaaagctgaaactgttatatacttcgctaggagaaggaaatttttgactggaggtcatatatggtagatagcagcatagtaaaaggaagcagacaagtcatactggattggagagagcacagcttgggagtggagacaaatggatctggctccaggaaaaaatgtgttttcagggtaatgtaatgatttgcgaccctgggccatttggctcattgttggtaagtttctgaaggcactattcttattcctccttaagtttgtcacttatttttctcttcccctttcttgttacccagtagtaagaatggtataaaatgggtatatcccaaaatgtattctgggactctctgagtagaaatgaaatgctttcatacaggtatttatatatgtgataattttatagtactttgaatataataggcaggcagagagagtctctctagcagaactgtattcttttctatctttggctgtaaaaatactagagagaggcaacacagaataccctttgggtcattccagatgctttgcctagagctacaggctctgtaggtacagtctacattccaaattgttgtaggtcatagctatattaaatattttaatatagcctaaaaagggtcagttgattttcagactccattatcagtgtttcacggcctgatcaagccacttgaagattttgttacggcaattcttcactctttaataccagttttctgtgttaattagggcatgggttaaactgctgtaacagagaccccaaaatatagcagtggcttaaataaaacaaattgatcttctctcatgtaatatttctgaggatggagaggtataggctgatgagttgtcttttgctccatattattgtttgttgacccaggtttcttctgtcttgtctctctgccatcacctggagcattgcgcctcattggcagcattgcgactgggttgctgtcatgtccattccagtctgtaggaaaggggactataatttagtgaagagcagctcacttccttttagatgatgaggttgcgcagttgcttctggtcatattctctcggtgagaacttgccatggtttgctgcaaagagggttggggaataaagtctctagctgagcagttatgtgtcctactaaaacttggaaagcatagaagatgaagagtatggattttgtcctttgtctactttctttctttctttttttgagacggagttttgctcttgttgcccaggcttgagtgcaatggcatgatctcggctcaccgcaacctccgcctcccaagttcaagcaattctcctgcctcagccttctgaatagctgggattacaggcacgcaccacctcgcccggctaattctgtrtttttagtagagatggggtttctccatgttgaggctggtctcgaactcctgacctcaggtgatctgcctgccttggcctcccaaagtgctgggattacaggcgtgagccaccgcacccggcccctttgtctacgttctacaggtttatgtgccttgttcatctttggagttatttagctattcttgatctgaatacctttttttttggggggggattcaaattgtatttattttctctcatctgtgacacattcattttgttcatgaggtcatttgtcacatagaaatgtaaattttcattttattattccttttgaatacaagcttacgtatttgtagatttgattctagatactttatcaattttgtctcgggatagacaggacaccttgattgatagactgtataaacacttaatttaaggtcagcttttctatttcaattttttaaaaaagaaaagaaacatgttattttaagtatgaaaaccaaaaccatctgtttgatgcttcatgttatcattagttttatgatttgataggatttacaattatttgtagttttttctaactacccaagaatagttatacaaattgtttttcaaaatacttttctaaaattcattttgaatgtagaagatagttttctttttttaaagagggaagtcagattgaagtgctaatctgagcgataagagataaagttttgtgtgaaatttagtgttcaagctgctaagtatgtctagtgtatagttaaaatatggtgtggaactcaggagaggagttagtgctagagatgttgacttacaaatcataaagtccagaggaaattgttgaaatgtggataataagttcttcaaagaggagcttataggctgggagtagtgactcatgcctgtattcttggcactttgggaggccaaggcaggaggatgatttgaggccaggagtttgagactagcctgggcaacatagtgagacccccatctctacaaaaaaatgaaaaagaatgtggtgacatgtgcctgtggtcccagctgcttgggaggctgaggtgggaggattcttgagcccaagaatgcgaatgatcatactactgcactccagcatgggcgacagagtgagtccttttctcaaaaacaaaaacaaccacccaaccccaggagtatataaaggatgtatagagggctgtacctatatttagaggtctaaaggaaatcagctgaagagatagatattagactattatatctctgtgcttataaaagatagaagatcatttcactaaggaggaagtgatcctggtgtgaagtgaacttttaggatgtttgaagaaagcttgtgggtgctaactggattgttaattcttttgccgttggtctattggtggtgttgacgagaataatttgtgtgtgtgtgtgtgtgtgtgtgtgtgtgtgtgtgtgtgttttgagacgcagtttcattcctgttgcccaggctggagtgcaatggcatgatctcggctcaatgcaacttccatgtcccaggtttaagcaattctcctgcctcagcctcccgagtagctgggattacaggcatgtgccaccaagcccggctaattttatatttttagtagagacagggtttcaccatgttgttggtcaggctggtctcgaactctggacctcaggttatccgcccaccttggcctcccaaagtgctgggattacaggtgtgcatcaccatacccagctgagaataattgttataataggaggctggatacaattagaaaggtatagttgaaggggaaggtagtagagttcagtcatgccatctcatgaatttggtggtaaaaggaaagacagagaagaggcgcttgaaaggactttaagatgtttttgtttgtttggggttagtgatgcagaaaggtctaaataaatttcaaattagaaaagaaggagccagccaagagcatggaactgcatcatgagcactggtggggaggtgtaatgtcccttcattgtagtaatagagcatgacagacagagtggacatataatttttattaaacaagaagaatgatgttaggggtagtggtgtgtggaaatcctctcagctgttaggctgcctcctgagaaagaacatttaaggtgtttggggttggattcaaggagaatggaaaaaggcaataaagtgaaggtttgtccttttcaaatattaagcttttagaatgggtaataattaagatacatgatgagtcttttaatgatgattttataaagtgtgaagcaatttttaatgagtcactttgaaatacatttgttctgtagaccaattgctataatcctgaaataagatttttttttggccgggcacagtggctcatgcctgtaattccagcattttgggaggccgaggcaggtggatcacctgaggtcaggagttcaagaccggcctggccaacgtggtgaaacccagtctctactaaaaatacaaaaattagccaggcatggtggtgggcgcctgtcatcccagctattcaggaggctgaggcaggagaattgcttgaacccgggaggcagaggtggcagtgagtcgagatcgcgccattgcattccagcctgggtggacagagcgagactccatcaaaaaaaaaaaaaaaaaaaaaaaatctttttgttgttgttgttgttgttgttgttgttgaggtaggatctagatgtgttgcttaggctggagtccagtggtgccatcacagctcactgtagcctccgctgccggggcttgattgattctcccacctcagccaccagagtcgctaggactacaggtgtgtgccactatgcttagctaattttttgtagagatggggtgttaccatgtttcccaggctgtcttgaactactgggctcaagcaatatgcctgcctcagcctcccaaggtgctgggattacatgtgtgagccactacacctggccaaaaataagattctttttttttttttgagacagggtctggctttgtcacctaggcctgagtacagtggcacgatcccagctcactgcagcctctggctcccaggttcaaggcatatccttccatctcagcctcctgagtagctgacattataagcactcaccaccttgcctggctaatttttacattttttgttgagatgaggtttcaccatcttgcccaggccagtctgaaactcctgagctcaagggatttgcttgccttggcctctcaaagtgcagggattacaggcatgagccaccatgcctggccaagattcttaacatttattactaggatgaaacttctctgagtcagctataatttgggcacaaggaaaagtataccatgcttcacattattttgataatcattttgcggtagagaataaagatgcacaataccactgattacgtgcatgaacttttcttgtgttagtgaaatattgttatttgttgtttctttttacattatgacctatgctttatagatacattcaccagtgattaaaataaacacaaaaatgactctttgttttctcttgtttactgttaagcagaaatcaaagaacaatctgcagaagaggatgctgaagcagaagtggataacagcaaacagctaattccaactcttcagcgatctgtgtctgaggaatcggcaaactccctggtctctgttggtgtagaagccaaaatcaggttagagaatgaatgcagctggattggatattagtgacaggaataaagcagtgaaatgactrtagagaaaattcaaggagtatgagtttaggatgaaaatctgggtgggattttatgatttagtagctaaatttgaagctgatacctctgtgtttagttgggatgagttacatctgtgggcttaggcaattgtagagcagggcagcacactasggttttactctagtcacctcaggccagtacagaatattaccaatgtgctgttcctggcagaagacataaatgtgagcatttagcatgaggattaatttttgatacttacctgtaaacttaagttgatagttttgttccttaccttctccccattcattaaaaaaggaaacacaggacattataacctattttttttctttctttttctccccccccccaccacccctccccccctccctttttttgagatggcgtcttgctctgtcaccaagctggagtgcagtggtgccatctcagctcactgcaacctccaattccctggttcaagagagtcttctgcctcaggctcctgagtagctaggattataggcatgcaccaccatgcccagctaatttttgtgtttttagtagagacagggtttcaccatgttggccaggatggtctcgatctcctgatctcatgatccacctgcctcggcttcccaaagtgctgggattacaggcatgagccactacactgggcctgtaatatatcattgtataattcagctttgaagttttaagagtttttagaccttatttgaaagacatgaataaaataatgaaattatccatcagtttggtactcccatctccttccttccctccctccttacctgtctccctcccttctttccctccttccttcccgccctccttccctccctttctccctccttcccctccatcccttctccctccttcctcccttcgtttcccttctacttccttttcctcttcccttttcttcctttcctttctttttttttttattttttgaggcaaggtcttactctgttgcccagggtagagtgcagtagtgtgatcacagctcactgcaggctcaacctcccaggctcaggtgatcctcccaccttagcctcccaggtggctgggactacaggtgtgtgccaccatacttggctaatttttaagctttttttttggtagagactgggtctctttatgttatccaggttggtctggaactcctgggctaaagcaatcctcctgtctcagcctccctaagtggtggaagtgcaagcatgaaccactgcacctgacctctctcatcttcttgaaccattttctttcttttgcttttgggacatctcactcctcattttatcttttgctagttgctgtggagactctacatgtttataattttggagttcttaaggataagtcctcagatatcttgtctactttttgtctctgttcactccctgggaaagaaagctcattcattctaatggctgtaacctctgtgtgtgcccttaagagtctcacgtgttcatttccgttactcttctttacctgaactccagacttttatgtccaactgtctgcttgacgtctctatttggaagtgtattagacacctcacccttaacatgtccagtaccatgcttgattctgcctccacctctgccccaaatctgcttctcccyacgatttcctcatttcaataaataatgccagtattcactcagttgtttagtccagaaactttgaaagttaatccttgatttctatcttttctcataccttgtagctcaactcgataacccaaacaacttgttagtgtcttaacttgcctaacattttagttgaagtcactgttatcctttggaagttgtagtagccttttaaccagtctttctgcttctctttacctttccatagtccaatttgtttatagcacagttgcaaaaattattctaataatgataatcaggtccccactctccactctctttcatgactattatatttaaattatattcataatttcaagtacttaccatgtctacaaggtgtgatctgttcctgactgcctctctcatgtcatttgtcactcactgtgctctcaccacattggcctcactcytttaaatgtgctgatggggtttctgtctgagagctttggtgcttgctctgcttgtctcctggcttacctcccagagaggctaccttgctgataatactagcctcctctgaagggccacatccagcttagtctcagtcagcttaggaaaaagaacatacaatgtgaatcaacgaaagaacacactggtgtttgttatactgtagtcctctcctcctcctccaatattttttgggaggtttgaacattttcaaaataaaggagtaggatggaaaagaaaacagcagctcccaccatattttacatagtaacctgctttatttttctttgtggcacttattattttccaacagttcatttgactgtcatgtgaactctgaagacacgcactttgttggtgggctttgttcaccacactgtgtcctgcacttaatagttcctgacggagattaggtgctgtataaatttttttttcttttttcttttytttttttttttttgaggcggagtctcgctctgttgcccaggctggaatgcagtggcgcgatcttggctcactgcaagctccacctcctgggttcacgccattcttctgcctcagcctcctgagtagctgggactacaggtgcccgccaccacgcccggctaattttttgtatttttagtagagacggggtttcaatgtgttagccaggatggccttgatctcctgacctcgtgatccacccgccttggcctcccaaagtgttgggagtacaggcgtgagtcaccgcgcccggcccaatatatttttaatgaataatgaattctagttgattgaaaagcatttaaagttctgcttaaatttttgtagtttgatactaccatgaactttactttttgctatgtgttatatagagattagaaatggtgtaatgcatatgtggtattgagaggtacagaatgcagaatatttgctagtttagagcaggtgcctgagagccttctgaaagtattctgtgcctctgtatcctctaggcctacttcgggaacccattgtagttcttaaccttcttgcttggttcttctgcagatcttaaggacacagtatgcctgactgacttatctttttgtcacctgtgagtagcacactgtcactgttagtcctcatctaatacttgtacagagaatgaaagttaaaagctactcatgaatatatgataatttcatttataataatcatggcctatcagtggaaaagaataggtcactcaataattggctatccatgtaaaaaatataggtagattgatgctcatgccacatggaaaaataaccttgaggtagattaataagcaatgccrttgttatttatttatcctgggctatactaccactaccactgttattttcattagacaggacagagtgaatgtacactgagaaagccagcatactgtaaatacagacttggtgtttattccaagctccgactttttgacctttatttattcatttttatctctctgtcccacagtttccttaaaataggatgaacagattgaatttaatgaattttattttattttattttttttgagacagagtcttgctctgtcgcccaggctggagtgcagtggcacgatctcagctcactgcaggctccgcctcccgggttcgcgcgattctcctgcctcagcctcccaagtagctgggaccacaggcgcctgccaccacacccggctaatttttttgtatttttagtagagacagggtttcaccatgttagccaggatggtctcgatctcctgacctcgtgatctgcacatctcggcctcccaaagtgctgggattacaggcgtgagccaccgtccccggcctgaatttaatgaattttaatggtgcagtatataaaatgttctaaatgaatatgtataattaataggattttagcaagattactagataacaaaatcaaaatgcaaaaatcacatgtatttttatatattaggaacagagttaaatggtattttttagaatattttccaataatataaaataatatgtgactaggattatgtgcaaaaatgtaagacttttatagagaaaattataaaactttttggaaagattaaggatcacagacataatagcagtataatactcacattttaggggattcagtattttaaagatattctttcccaattgatgtgtaggttcaagaaaattctaataaaaatttctacagtaaattttacaagctgatcttaatttatatgaatatgcaaaagacaggataagccaaaggacccatgaagaagaggaaggattgctttacttgatactaagactttttgtaacacactaataaattaagtcagtgctgtattaccacagaaacagacaaatagaccaatggatcagaatagggaacccagatacagatacatgattaatatggacaggttatttataacaaaggggcatcacaaattagtgaggaaggaagtctctttcaacaattgtgctagaacaattagacatactttaaaaaaaaaaaaaaagaaagacctaatttattcatgtctactccagttaatttatagacttaacacgtgagaagcaaattaataaaagaagttaatgtagaggaatttcttcattgctttggggtaaggaaagacttttaaaaaacaaatggaaagccctaattatagaaaagggttgattggccaggcacagtggctcatgcctataatcctagcactttgggaggttgaggcaggaggattgcttgagcccaggagttcgagaccagcctgacttgaacatgacaaagccctgtctctacaaaaaatacaaaaattagtaggacttggtggtgctactcaggaggctgaggtgggaggatcgcttgagcccaggaggtcgaggctgtagtgagctgtgatcctgccactgcactccagcctgggtgacatagtgagaccctgtctcaaaaaaaaaaaacacacataaaaagaaaaggggccgggtgcggtggctcatgcctgtaatcccagccctttgggaggctaaggtgggtggatccctgaggtcaggagtttgggaccagcctggccaacatggtgaaaccccatctctactaaaaatacaaaaattagctgggcgtggtggtgggcacctgtagtcccagctacttgggaggctgaggcaaaattgcttgaacctgggaggtggacgttgcagtgagccaagatcgcaccattgcactccagcctgggcgacaagagagaaactgcatctcaaaaaaagaaaagaaaaggattgattaataccactatacttaaatttacaacttttcatgaaaaataccaagagtaaaaagataaatgacagaaaagggaaaaatatttctaaagcatataactaacaaagaacttatgttcatatgtatttaaaaatgaagcaaaacaatgcaataagaagaagcttctgtagaaggcagtaagcattacttgattacttgcaataaacattactcgattactttcaataaacattacttgattatgacattttttaaacatgctgttgggttttagttagctaatattttgtttatgttcataagcaatatgaatttttgtaatattgtaatgtcctagttttggagacaaaattacactagcctcgtgtgtgaggcatctttcagttttcttattttctggaacagctagtttaagacaggaattgactccatgtaggtctgaagtaactgtcataaaattacatgggtctgtggggtttcttctagaaaatgaagtcattaccagttcaattcaaagattttttttcttggaatatgtattccataaatttgctccccacttccaaatttttttctattcagctgtctgtttcatcttgtaccaattttctcatgttatatttttctcagaacatatacattttatctaaaatgattcatgatacatttattatttttgaatgttatttttgattggcaaatcctaattgtacatttatgagtacagtgtgatgtttcaattcatgaatgcaaagtggaatgattgaatcaagtaaattaacatccattaccttgattaactctcatttgttacttgaaatttactcttaagttggtgcaannnnnnnnnnnnnnnnnnnnnnnnnnnnnnnnnnnnnttattttaaaatataggtcaccctgctatgcactgtatctcaaaacctattcctcctgtctcaaccttcgtatcctttgcaccaaattgttattttaaaatataggtcaccctactatgtagtatatctcaaaacctattcctcctatctcaatcttcatatcctttgaccaacaacttactatttccttcttcctgccttaccttctccgagtgtctggttaccatcactctactactggttcttttagttcaacttttttagattctacatataagtgagatcatgccgtatttgtctttctgtgcctggattatttcacttagcatgatatcctctagattcatctgagttgttgcagatgacaggtccctcccgcttctctctctctctctctccccactcttccttaatccccttcccctcccctccctgcctcccttcccttcccctccccctctttttctacctccccttccctccctcttttttccttccttctctcccttcgtccctccctccttcccttccttccttccttctttcctttttttctttccttcctttctttctctttctctctctytttttttttctttgaaagggtgtcactctgttgcccaggctggagtacagtgccrtgctcacaactcactgcagtctcaacttcctgggctcaggcaatcctcccaccacagcctccaagtggctgggactacagttgtgtgctcaccacaccaggctaatttttaaaattttatgtagagatggagtcttactgtgttgcccaggctggttttgaatatctgggctcaagcagtcctccagccttggcctcccgaagtgctgggattatwggcatgagccaccactccccatcctcccgcttttcaaggctgaatagtattccattgtttatatataccatgttttctttatccattcatctattgatggatacttaggttgattccatatctggctattgtaagtaatgctgtagtaagcatgggcatgcagatatccttttgacattgatttcagttcctttggatatatacccagaagtgtgattactagattatatggtaattctatttttagttttttgaggaacctctttaccattttccataatggctatactaattgacacccccacagcaatgtacaggactcccattttttctgtatccttggcaatacttatctttcatctttttaatagtagccatttgttaggtgttagccaatagccaggtgttacgtgatrtatacttgttttaattttcatttccctaatgagtagtgatgctgaacattttctcatgtacctgttggccatttgtatgtgttcttttgagaaatgtctgttcaggtcctttgcccattttttaatcaggttgttttcttgctgtttatttgggttccatatatattttggatattaaatattttctcccattctgtgggttgtctctttactttgttaatattttcatttgccgtaaggagcttggtggtttagccatcccatttgtctattactgcttttgttgcctatgctttcagggtcatatccaaaaagttattgcccacatggaactttctccctatgttttattctagtagttttatagtttgacatccgaaacataagactttcatctattttgaattgattttttgtgttatgtgagacaagggtatgattttattcttgtgcatatggatatacagttttttcagtgccatttattgaggagacagttctttacccattgtgttttcttggcatctttgttataaatcaacttagtgtaaatgcgtgagttcattcctgttccattggtcgatgtgtcttcttgttttttgagccagggtggtatttgtagcccaggctggagtgcggtggtgtgatcttggctttctgcaacctctgtcttctgagctggagccgtccacccacctcagcctcttgagtacctgggactacaggtgttcactaccacccctggcttattttcgtatttttagtagagacggggtttcaccatgttgcccaggctggtttcagactctgggctcaagcagtctrcctgcctcagcctacccaagtgctggcattacaagtgtgaaccaccatgcctgtccagatgtatggtttttttttttttggtgccagtaccatactattttgattacaatcattttgtaatgttttgaaatcagacagggtgatgcatccagcattgttctttttgctcaaggttgtttcggctgtttgatgtcttctgtgcttccatataaatttaaggataatttatttctgtgaaaattgacattggaatttcgatagatattgcattgaatctgtagatcactttgggtagtatggacagttagtttcacagtattaattcttccagtccatgaacataggatatcttcccatttcttgatgttttcttaaatttcttttgtgagttttatggttttcagtatacaggtcttttacctccctggttgaaattacacctaagtatttaatttttttgttgctattgtaaatgggattattacattaattttcttttaggatcgtttgctgttagtatatagaaatgctactgatttttgtatatttactttgtatcctgctactttatcaaatttgtttattagttctaacagttttttggtggagtctttagggttttccatatataagatcatgccatcagcaaataaagacagtttcacttcttcctttcctactgggatcccttatgtctttctcttgaccatattgctctgcctaggacttccagtaatatattgaaatttttatattcagtattttatattttatatcaattttatattcagtattttcattatgattttatttcacatattgggatttccattttaagtgaaagattcttaaacaatatcttttctagtttccaaatttatttatttatttatttatktattttcttgaaagggagtcttgctctgttgcccaggctatgcaatggtgcgatcttggctcactggaaccaccacctcctaggttcaagcgattctcctgcctcagcctcctgagtagctgggactacaggcgtgtgccaccatacccagctaacttttgtatttttagtagagacggggtttcgccatgttggtcaggctggtctcaaactgctgacctcaggtgatccacctgcctcagcctcctaaagtgttggaattataggcatgagccactgcacctggccagaagattttaagttatccatttattatacatttttagttttactgcattattgtcagagaatgttgcctgcatgatgttggtcacttgctatgtatcatgtattcttttatggcctactatgtaatccactcttgaaatattttaatatacttgaaaagaatgtgaaccgttagttgtagatagagctgaatatagtatctcaaactaatttattatgctcaggtaattaataaataatgaacaataaagatgttcaatacttaatttttattggtttgacatagtattttctgagaaaaataattaaaatcttccactgttgttgatttaatttttttagtcttccagttttgttagwayaggttgagtttctcctatccaaaatgcttgggacaggccaggtgtggtggttcatgcctgtaattccatcactttaggtggccaaggcaggtggatcacctgaggccaggagtttgagaccagcctggccaccatggcaaaactccgtctctactaaaaatacaaaaattagctagatgttgtggcgtgtgcctgtagtcccagctactcgggaggctgaggcaggagaattgcttgaacccaggaggtggaggttacagtgagccaagaccgtaccattgcactccagcctggacaacggagtgagactccatctcaaaaaaaacaaaaacaaaatgtttgggaccagatgtgttttggattttggattttttttggattttggaatatttgcacatacataataagatattttggggatgggagacatgtataaacatgaaatttgtagggtccagccccacaggttcggtgggttttctccccgtgtgcggagacgagagtatagaaataaagacacaagacagagataaaagaaaagacagctgggcccgggggaccactaccaccaagacgcggagaccggtagtggccctgaatgccaggctgcgcagatatgtattggatacaagacaaaggggcagggtaaggagtgtgagccatctccagtgataggtaaggtcacgtgggtcacatgtccagtggacagggagcccttccctgcctggcagctgaggcagagagagggaaagggagagggagagggagagcttatgccattatttctgcttatcagagacttttagtactttcactaattttctactgctatctaaaaggcagagccagctgtacaggatgaaacatgaaggcggactaggagcgtgaccactgcagcacggcatcacaggcagacggttaggcctctggataactgcgggcgggcctgactgatgtcaggccctccacaagaggtggaggagtagagtcttctctaaactctaaaagagtttagagactccctttcccggtctgctaagtagtgggtgtttttccttgacactgacgctaccgctagaccacggtccacttggcaacaggtgtcttcccagacgctgggaccaaggactcctctggtggccctgtctgggcataacagaaggctcgcactcttgtcttctggtcacttctcactatgtcccctcagctcctattgctgtatggcctggtttttcctaggttatgattgtagagtgaggattattataatattggaataaagagtaattgctacaaactaatgattaatgatattcatgtataatcatatctatgatctatataactattcttattttatatattttgttatactggaacagctcgtgcccttggtctcttgcctcggcacctgggtggcttgcygcccacagaaattcatttatgtttcgtatataccttatacacatagcctgaaggtaattttatagaatatttaagtaattttatgcttgaaacaaagtttatattaagtacttaggtgtgaaattttctacttgtgatatcatgttggtgcttaaaaagttttgaatttcggagcatttcagattttggattttcagattggagatgcttaaccatctctttcagattcgagattcattttgagaccagattcatgttggtctgagtatatggttatgatcgatatctattatactattyatcattttgttagtgtgtaacatctttttcatctctaatgtcatgttttctttttgacataactttcattttgtctgataaaattattgccactcaaacttccttttggtttatgtttgcctggtatctttttacctcttttcccatcaacatttttgtccttgttttatatgtcatttgtgtttatacttccaacattttttgcacctattttttttttttttttttttttgagatggagtcttgctctgttgcccaggttggagggcagtggtgcgatctcggctcactgcaacctctacctccctggttcaaacaattcccctgcctcagcctcccgagtagctgggattacaggcgcacaccatcaatgcctggctaatttttttgtatttttagtagagatggggagggggtgggtgggtggtgtgtgcttcaccatgttggccagagtgatttcgaactgacctcaggtgatctgcccaactaggcctcccaaagtgctgggattacaggtgtgtgccaccacacccagctgcacccaattgttagatctaattttaatctaatctcaaaaatggtcttttaattggtgatttttgccttttaattggtggttttggtttacattattgtaatggctagtaagatttcgtatgctattttagaaaatgttttttagtcactgtatatatgttttttctttcttttatttgtttttgaggtggagtcttgctctgtcgcctaggctggagtgcagtggcacgatctcagttcattgcaacctccgcctcctgggtttaagtgattctcctgcctcagcctcccgagtagcttggattacgggcgcctgccaccatgcctggctaatttttgtatttttagtagagacggggtttcaccatgttggctgggctggtctcgaactccagacctgtgatctgcccgtctcggcctcccaaagtgctgggattacaggtgtgagccaccatgcccatcctctttttctttttaaaatacagrcagggtctcactatgttgcccaggctggtctcaaaatcctggggttaagcaatcctcctgccttgacctcccaaagcactggggttgcagtgtgagccactgttcctggctgagttgctgtagtgcgtgacatctaatgaggtacatgaagaggagcctttgtgtgggttagaattcccctgtctttggtcacaggtgttaacatagtctcactgtgtttcacacttggcttctagcaatttcttaaaaatttttactgagttcttatcaccctgctggtatgatatcagtggcctcttcctcagaggtgctattgtcacatttctttatggaagtgtctttcatttggtggtgagttggttgccttgtgatttctgccctctgatgggtttcagaaaagtgaatttgcagattctctggttgggttatgttgtgtggttgggcacaatgttgtttgcagctttctacagccagaccaaaagctagaaatttcccttgacctcgtattaaaaaaaagtcaacaataaattactctgaggtgtttgacctcccttacttcatayaaccttttctaattctttaataatttaagtacttctctaaaagtattttcatttttgatctgttgtctggcaaaatttctgaggtcttctaagccagagagtaattttattataccttcacatttaagcgatagttttgaatataaaattgaatgctaaggtatttttctgcaatagctttaaaatattgctccattttctaatcagtgctgttacaatcaatgttgataagactaatgtcaatctgattgttgcttctcatgggtagtgtttctaggggaagaaacaaaccagaaatgggatatggtgaaataaatgtaagcttaatagctcagagaaaattacaaataaggggatagtaagatactggcaaagcataaggtggtggtctctttttggaaagaagaaattttctttttcaacttgacttgatttttttttttgaaattacactacatttaatttgtgtatgtctcggtaccagcagacaacatagtttmtcatgaacttgaaataggtaatttattacaaaaacaaagctaattttgataaaagtaattagttgagagtccaatatgatttaaacctaagttttaaaaagtcacctcaaaaggctataggttagttctatcacctggtaatgcaagatatgtaagatcatggggtaaatactgtagaggtaactttaatgcccaagaaggaggatttgggtatagcagcagtaaatatcttgtgaagtgtaaatataatcaagaggaagcagtccttttaatttcattctttctaagatctcttagtaagtgtatattctatatatgtatattgattgttgtctcttaattttttaatgttttctccttttttattaatagacttagagcatttttaggtttacacaaaaattgagctcattctcccacctctacccccagcagtttccctcatgattagtattgtgtgctgtgttacagttggtaaaccaatatggatacattatttttaactacagtccatagtttacattagggctcagtatctaccattatagtatcatataaaatggtttcactggcctaaaaaatcccctttgctcctaatcatccctttccttcttccagttcagctcttctgcttccctaaaaatctactaccactcaacccaggaactatttaagtttatatttttatatctccccgtgtgtatgcatgtgtgtggtatatatatatcatgcataatgaacgttctatcaagtggttaaataaaactgtcaccatatgttttacagaactgtcatacagttgggtggctactaaactctaccttctttcccatttttaacttgcattttttttgtttcctgagacagagtcttgctctgtcacccaggctggagtgcagtggttcaatctcagcttactacaacctctacctcccggatacaagcgaggtgcctcagccacccgagtagctgggattacaggggtgtgccaccacacccagctaatttttgtatttttagtagagatggggtttcaccacgttggacaggctggtctcgaacttccacctcccagagtactgggattacaggcatgagccaccgtgcttggcccccacctttagctttcttacttggatttttttctagtcaaatataaaagaaaataacttttctaactgctaactagaattttttggatttgatatgtgtactactttttaaaatgctatggaaaagtagaattccaaatgtataattattaaacttaattgttcttatgggtaatcactgaatagactgtagaaaatagattgaaaagcttagcttgtgctttagacataatttaaaagcacaagtatctatagttatcgcttaaagcagttgaatraagctacttttctccttctctgacttacatttcatttttactagtgaacagctctgcgctttttgttactgtggggaaaaaagttccttaggacaaggagacttaaaacaattcagaataacgcctggatttatcttgccatggagaaaccaaccttctaacaagaaggacattgatgacaacagcaatggaacctatgagaaaatgcaaaactcagcaccacgaaaacaaagaggacagagaaagtaagcagtttcgactttaaatgttggaatagattaagactgcatataatttatttccattataatgtttataaattttcaaatgggattgttcttgttgaacagtttctcctgttctccacatttatgggatactctgactcaccattaacccaattaatccaacaaactatccttttcacaaatttttcttgttattttttaaaaagtttatattaattgtatatgaaagyggtgtgatcacaaaactaaacttttggaagaaaacttcaaagaacataacacaagctgagagggagggagttcatggaatttataaatggaaakaatgtaataataaaacagatcaataaagtccttcttttgtttctctaaataagcttttaattttaagaatataacataatacaatagcaaatccagaattggttttcactactcatgtcttttgtgtcattcattcatcaatccattcagtcatttatttaatttatatataagtttgtgtgcttcagaaaatgttgcactgtcctatacattcttccctccctccctcccctgccttccctcccagaagatgcttttttcttttttaaggaattttttttttgtaatgatgtgtgtatgtctgtattcacgggcacattgtaattacctaaaggtcttgtctgatatagtttaaaatattttgtacagttgtgtttaaagaccatattaatatggagacttggctgtgctggttaagggagtagaagtttctgtagttgatgagaatgtgtaaaaattaatttagcttgcaaagctaacactgcctcttgagggttatgatgtaatcactcaagtgcttatctggcttatatccaaatttaagtactaaatcattgttgtgttgtacttatttgattggctcattgttttgaactgctgccaatgccttgaagacctgaagtaggaaatgaaacaataaaaagagggagaatcttttaaaagaatttaaggtggaacagtttaaggaaacttagaagtactatatttggagagttgtgatgttttggaggctatagctttttctttagttgtcagttgagtacacacatcttaataaaataatcaaaaggccagcaaacttaaaatgtctattagcaaatttaatggagtgaatcaggctgtatcttatatcctcatgttctgccttaaataatggcaattatataaaatcctstcctgagaaatggaattggtttcatttccttgttttaaaagtgaaattaatttttagtgaaaattcttatgagctcagataattatataaaaatagcctttgttaaacgaaagtctttatatatacttagtgcttaccaacttaataagtaatgataatatggcagttaatgaagtacacttaaaaatttggcatcattgaagggtaggcaattaatttagcttggtaatgatttcaaatatttacaaaatgtatgttgctaatgaagtttaaatagctagttaatttaaaaaacaattttacaaaggttttgaaaatgtctttgctcattttcactaaataaaaaaatcaagaatttttttcctttttttgttttataactaagaattttgtgggtatgcatttcagctgattcctcttgatatctctttctaagctgggctgctgtcatccttagtgttgacattgatatcttactgatatggtatatacatacaaaccagtctcaaaacttgaaggttgaatttgattaagctgctggttaggacctgattagtaataaattagtcattctcttggtttttttacacccctttccctcatcaaatactagtgcaaaacagtatgctaaaacaacatttagtagttatagatgaactgttggtcttttttttttctcccaataaaataacaatgatttgtaatggagcatatatttgtaggaatagagattatacttataggaaagaatttgttctcattttactgtgggcatttattaaaatgagaatttaaagttagcatagcatgctataccttttaaaaaaagtctatgcatttctaatgctgaacataaaaacattactggttatttttatatggtttgatatttaaatgtacttattgaaatatgttaatactttttttctttcaatgattccaggtataaaaatgtttagtaccctggtcattgtgctgattttctcttaataggaatcatgataaatatccagcatacagaagtgcagtgagttatgatctatattcaatagtgatttaatccagaattatgatcaggttaaatactatgatattaggagaagatttaagttttagtggtagtcatctgatttcccatatttaataattaagtacaatagccatttttatttatttaatggtcttaaataatacctaaagtgttagaccttgaaagcctgaaatctcccatatgttgtttactttattcaatgttctttttttagactatagtttttgctgttatactatcttccttattctacatgcctttggtagctattttgcttttgctttttacttccaatttgtgacatacagtcttgattgagagtacttgcaacgtcatgccacagaccagctgttgagatttgttgacgggaccataagaaagctacagctgatacattccattcctcctgcctctgttttcacactctgtagtgggttttcattttccctggaaaatatcctttctttacacagttaactgccacctctgttgtggcagtcctcagtcaagatacagcagactaaacatttctgatttgatcaagttttgttttgtaagcgtttaagtaaagccaaaggaaatactcagtttatgtgttaaatacaattcctgactaggatatgagagttggttttaaaaacattatattatggaatggaaaaacaaatttacaatttaatacttccctgtgggtttggagactctttttcttacttgttacttatacgatataatatggcaacccagtttaatattataccatggataatactaacagatgaattctaaaagttgttttatgacagttaatggctgataaattaaaattgatttggcagtacattgcatttaaacagttaaaaatgaaacaattttctgcttgttttcactttcacagttattttattttattttcagagaacgatctcctcagcagaatatagtatcttgtgtaagtgtaagcacccagacagcttcagatgatcaagctggtaaactgtgggatgaactcagtctggttgggcttccagatgccattgatatccaagccttatttgattctacaggtatgggcatgttttcaataatgactgcctcttaattctggaagcattttaattttaatacattattaatgtcctcaataataaatacctttcatctagaaataattataatcatactataaaaaaatcattattaaatatgcctggttaggtaaaagaaaaggtttatctatttaaaatctgtacagtaccaccaccggactggatgctttttaaaatacttgtattttttcttgtgtagatagcggtgccatggagatctgacaattgagaaaagagaaaattttaaaggggaaaattttaaagtgagaacttggggaatgtggcattctgagtctattttatttgggcatgaatgaaaataggtcttagccgggtagattatcttattataacagtattgtaactcagcactcatgatatggtgctactggaatttaaagtacatctcattctgtagttgaactgcagattgactgatagtggttcaagtgttatgtgatggataatttaaaggctgaagtgttaataatcattgatacgtgctctcactgtgggatgagggaagtagaggtgtatgtgtagtttattttctatacatttcctttgtatatcacctcaacaaagtactaagtaatactttgtttgctttatataaagataccagaaacatatcaaatacatatataatatttaaataaaatgactaaaaactaattttgtttgttgaagaaataatcactaattcagttattcttaaacttgtgtgtgcatcataataaccagacggcttgttaaatcacagattgctggcagggcacggtggctcacagcccgtaatcccagcactttggcaggctgaggtaggtggatcgcttgaactcaggagttcaagaccagactgggcaacatggtgaaaccctgtctctacaaaaaatgaaaaaaattcccggagtgtggtggcatgtgcctgtagtcccagctatttggcaaggctgagacaggaggattgcttgaaccctggaggttgaggctgcagtgagctgtgttcatgccactgaacttcagcctgggcaacaaaaaaagtgagaccctgtctcaaaaccaaaacaaaacaacaacaacaaaaaaaaacagaaccaaacacagattgctgggccccactgcacgagtttttgattcagtagatctcacttgtgatctgcgcttctgcatttttttggtttttattttgagacggagtcttgctctgttgcataggctggagtgcagtggtgcgatctcagctcactgcaacctctgtcccctgggttcaagcgattctcatgcctcagcctcctgagtagctggaattacaggcgtgcaccaccacgcccagctaatttgtagagacagggttttgccatgttagccaggctggtctcaagttcccagcctcaaaagatccaccagcgttggcctcccaaagtgctgagattacaggagtgagccactgcacccagacagattctgtatttctaagaatttctcagtttgatattgatactggcactcagtggttggtccacatttttagaagggccactttactgctatcacaaatacaggatgccattgtatatttacatattagagttgattttgaagttttatgtctttatttattagctttaatttttttaatgtttgctcatttgctccttttcatttttcccattttaggcacttgttgggctcatcaccgttgtgtggagtggtcactaggagtatgccagatggaagaaccattgttagtgaacgtggacaaagctgttgtctcagggagcacagaagtaagtagacaaagcaaatatttaaatcatagttttataacattcactttaatcagaagttcacttgaaaggattattaaatgattgctgtagtgtaaaagctctcaaaataggaaattattaatttttattaagagaaattctaggccaggtatggtggctcacacctgtaatcccagcactttgggaggccgaggtgggtggatcacttgatgtcaggagtttgagactagcctggccaacatggtaaaaccccttctctaccaaaaatacaaaaattagctgggcatggtggcagtcgcctgtaatcccagctacttgggacactgaggcaggagaatttgcttgaatctgggaggtggaggttgcccgtagccaagattgcgccattgcactccaacctgggtgacagagagagactccgtttaattaaaaaaaaaaaaaaaaaaaaaaaaaaaaaaagttattttatgcaaaaattagccgggcatgctggtgcacatgtgtagacccagcaacttggggtgctgaggtgggaagattgcttgagtccagtagattgaggttgcagtgagccatgattgcaccactgcactccatactccagcctgggcgttggagtgagaccctgcctcaaaaaaaaaaaaaaaaaaaaattaatttgtgtaagccattggaatgtagtatgttactcagtgaacttgaatcttttaaaataagtagtttacatttaaattagaaattaaaattttagaaatgaaaattttgcactatgcttatacattcatgtggtaactttttaagacaaaactatttgataatgatttaaaatgaaagaaaatatttgaaaagatttgaaggtcattagtccataatgtggactacctctgtttgatattttaaaaagtgattaaaaaaatttttttagttcggtcagcagttcagttcatctttattgcattgtatcaaagtaatatgtgcatagtctgccatttttcagagcttttcctgtgattttcatgtaattttgaaacaaatgcaaatgaaacggcttcctcccatctataaagacagcaaactctgtgaagtgatactgctttgctgtctacaaattgcttttctttttcttttttcttaaaatgtagagatggggtctcaccatgttgcccaggctggtctcaaactcctggacccaagggatcctctcttctcttcttggcctctcaaagtgctgggagtttagttgtgagctactgtgcctggccttccttttttttttttttttttttttttttgagaggagttttgctgtgttgtgcaggctggagtgtggtggcatgatctcagctcactgcaacctctgcttcctgggttcaagtgattctgccgcctcagcctcctgagtagattggattataggctcgtgccaccacaccggctaatttttgtatatttagtagagatgtggtttcactacgttggccagcctgatcttgaactcctgacctcaggtgatctgcctgccttggcctcctgacgtgctgggattacaggtgtaagccactgtgcctggcccctttggtttttaacaagtatatttgggagaagtgagacagcccttccaatggaatattaaaactggaaattttgaccttagaaactatatgggctttaatagatagaacataggcaaagctttcaaaagtatagttgagacaaggacttagattcaagtaaaaattcaatcattagaacattagctttacttggattatcaaaatgaactgatttacatagatgagtaagcatcacctcaagagtagtgaagtcagagtgcttgttttggaaattttacattaaagtgtatatgtcatcaaattttgaacagtttaatgcataatagtattttcccyagcctgaacattcttagagactggattaagacaatgatatttcagtgaaaaccatctgttttatgaattacttcataaaagtaatttttattttgggctattttgtgacagtgaaaagtattacagggaaggtaacaaaggctaaatgagctttttggtggtggattagaaccagaggaatcaatataaactcgtagtgtttgatacttagtacagaaatgtaggtgtatgtatttgcatgagtttgtatgtgtccatgtatttcctacctctgtttgctaggaaggtagttaaaagaaaacttgcctcactctgtcccttttggacagaagttaccatttttgttcttactgattaataattaaatggtatttagagatgaagactgtgtcctaccactggcagaggaatcacaagcccttaggagacattgcatcccttccgactttgtttaggcattagaatttggtgggcctaagcaagttaaatgcagattgagtacttggagttggtagaccatgtggggattagaagggatctagtggtaactctgtcaaatctttacctctccactagattgaatcactcaaaactcacaggagtgtcagttttgtgtcgccatttgtacggttgtttgttttgtccttcttccttctcccctcccttcctccctccttccctccctctctccctctctccttccctccctccctccctccctctttccttcctcttctgtccttcgtcttccttccttccttccttccttccttccttcctttctttcttccttccttccttcctaccgtccttccttccttccttccttccttccttccttccttccttccttccttccttcctccctcttctttccttccttcctcttctttcctcccttatttccagggtctcaccctgttgtccaggctggagagcagtggcatgatcacggctcattggcacccttggcttcccaggctcaaacagttctcccccgagcctcccgaatatccgggaccacaggcatgcgccacctcgcctaactagtttttaaattttttgtagaggctaggttctgctgtgttgtccaggctagtctckatctcctgagcttaagcgatactcccacctcatcctcccraagtactgggattataggcatgtgccaccacgcctggcttttgttcattattcttcattatcaaataggcacaagatggaccagttagctagaactttgtctcaagaaaggaagacttgtctcactggcaaaaattcaaacataaaacaacacatttgttgacagggctgtggggaaacaggtactctcattctttgctgctgcagatgcaaattggtacacatcttttggagggaaatttggtgatacctaacaaactgtatgcatttacctctcaattattctaggaatctatgctgaatatgcctctaacaatacaaattatgtattacttaatgttattaattatagtattatttaatttgcgaaatatyggaaacaaactaaatgcccacacagaggagaaggtttgaataaactgtgttacatccatatagccatataatggagtaccatgcagataaatcagaaactagagattggttacctgtagggagtgggagggagaagaagggagtggagatctgtgtagcatggatgaaatgtgagtggcacttctcagagtatatttgtcagtataactctgattcttagaaccataggaatgttttaaatgcttctatgcaattgccaccaaccaggatgtgggagaccaaataagcaattaccacctacccagatgcaggagaacccaaaaaggaatagtaaaattcacataaaagaggatagggagggaaagaactcayctaagtaactgtagaaaatagtgtcttgattaaataacataaaactagaggcaaaaagaactgtacagtcatgctgtagtgttgagatcagaagtatgaaaataaactcatgttttttaatatttacacagacatacagaaatatagatgtgtgcatatgtatgagttaatttgaatatgtgtatttcctacctctatcccctgagagggcatagaaacaatgacaccycagtagcattgagaatacctagtgcttagatcttggtctccaaccattgctcttcaatgaaaggaaccagggctccttgagaagtagttccttacgggactggtgcagagaaaatacaaggtaagcctagatcatcttgtggtgccagaaagtaatgaagtgcttaaaaagatgaaaacctgttcaaagcacgggaacctacctgaaggagctcctaagaactggaccaattttagcaaccacaaaaataatgataatattgcattttcatccatagaataagtacacgagtccatactgatgtaaatagattgtccagtcatgtcactgctctacttaacactcttcagtgacttcccattttattctgagaaaaaaaaaaaaaagattccttgctaacctgtaaggctctacatgatcttcaccacacctcacgtatacttctcagacatctttcactataaccgtttgttcatttacttccttcagccatgctgacctcattggtcttactcaagtacgcagacgcagatccacctcagggcctttcataatgcatgtgttgccccctcatatcctttatgtatttattcaagcgtgactttacagtgaggcctttgctaggcttgctgtcaaagatttcaaatgccttcccataatatctgcttttttgttttctttttcgtacttatcacctctgacagagtgtatattcacgtaataatcttacttattgttcatctccctctcactagtatactagtgccattcggatggggtttttttctgttttggttattcctcagtgaatatttgtagactaattaatagcactgaagatcattcatggaatcattcataggcagcaaataagttctaagtacccaaaagtgttactggaggttatcaatatggctaattacatgaaagtttatatacttaatctctaaatagagcaaatctttacagttctacagaaatgattgggaaggaggagccaaggaaaatttctgctatcacaaaagtttccctaggggcgatatagctattgaacttagaagacgtttttattttgccaaaaggtcgattttgctgaccttggctaggtgcagtgcctcccacctgtaattctagcatgttgggaggccaagatgggaggatttcttgagcccaggagtttgagaccagcctgagcaacatagtgagatctcgtctctattaaaataaaaaatgaaaaatgaaatttgctgacctttattatgtagctgagtatattctgatacctagctctattttcaaagaaaacaaacacttaacctgccccttcaagataaagatgacatttcaacattgagaatgcagtgacttttcaaagaaacatgtcctggggcgttgaacattttgaaaacagatgttttgaactatttatattgatattttattgtcagaaataatgaaggttgtaaaaacaaaacaaaaaactctcatgtttgtcaccttaaaagaaacttgaacatggaattttctgatatgtttaaaatattctaaagagctctggtttaagcccatttattaaacattcaatatttttattagagagggtgaaattttatttgcttaaattttgataatttcggttgagatttaaaaatggttgcagaaatcatgtactacttctaattagatcattttacttttggggagaacctgtttttttaaacctatgagagccatagaaactaggtattaaaataaaccaaagttagaattaggctttttaatctaagaaaatggaagggaatgagatactataaagctcaggtgaggggttgcagtattttgtaaattttttgattgtgcacatcttttaataagaaatgtttgagtatgcagctttattatacattctcagtggaatatgtatgtcttctctctctttttttttgtttttggagacatagtctctctctgtctcctaggctgagattgcagtggcgcaatctcagtttactgcaccttctgcttcctgggcccaagtcatcctcccacctcagtctcccaggtagctgagatcataggcgtggaccaccacgcctggctaatttttgtatttttagtagagacagggtttcgccatgttggccaggctggtcttgaactcctggcctcaggtgatccgcctgccttggcctccccaagtgctaagattacaggcatgagccaccatgcacagccatgcatatctcctttatgtaacttaacatctgcagcrtttgtttgtgtgagttttttattctgtctgcatttgtgtatgtgagtctttttctatggatttttcccaccatggctgtaagcaccatgagagtgaggaaaatagctgttttgctttatcatattttctctggtgcctaacaaagtatctggaacacaagagagtmactaatgggataaatacaygcattaatgggatttgtcaatgaagggcaaaatttagtgcattagcttgaatgaggaggtrggtcctactggctggccycttgggtagaggccaggactgccgctaaacattctgcaatatgcaggacagcctcccacaccaaaactatacagcttaaaatgccgatagtgctgaggttgagaaatcctggtttgacatattattcctgtgttaaaattaatatatttaaagyaatttcctcggttgttaacatggcatttttgtcaagcaattttgttttctctgaaacatacctcagattgtttttagtttttccagrggaaactttattcattttttactagagaaaagaacatggcaaacagtgaatctgtgtttcaggaagggtaacgtcgtttttcttttaatttcccttttgaagctctcrgggtgctaccaacatcttggaaatctggataatttgagtattactgagggaatattttcattctacatgctacaaatgtttaatcattttatttatctaaagttcctttcttggccaggcgcggcgtctcatgcctgtaatcccagcactttgggaggctgaggcrggtggatcacctgaggtcaggagttcgagaccagcctaaccaacatggcaaaaccctgtctctactaaaaaartataaaaattaacygtgtgtggtggtgtgtgcctgtaatctcagctacttgggaggctgaggcaggagaatttcttgaacccaggaggtggaggttgtagtgagctgagttttcrccactgcactccatcctgggcaacagagcaggacttcttctcaaaatgaatgaatgaatgaaagaaggaaagggaaaggaagctcctttctcttctattcccagtattgccccccaaaaagaagtaatccataaacccccaaygtatatttctgttttcttaactatttctgaataaaatgttcagtgttggctgggcatggtggctcacgcctgtaatcctagcactttgggaggctgaggctgaggtcaggagtttgaaaccagcctggccaatgtgatgaaaccccctctctactaaaaatacaaaaattagcttggcatggtgacktgtgcctgtaatcccagctactcgagaggctgaggcaggagaatcacttgaatcctggaggcagagattgcagtgagccaagatcgttctattgcactcctgcctaaaactccatctcaaaaaaaaccaggtgttttactcttaaaataagacattaaaaaaatacttctgttgtctcccctcatagaattggyaatctcttccttctccaccctcatcccctgctgtrattctatattgaaatttcattgtattttgtgccagatgtctttgtgtaaaaccaacttagttctgtgagaagagttgtacgtttttaatatttttgttctttttgtagactgcagaaacaaaaatagccttcctatagtaaggtggcaattcacattaagaatgtagataggcaaatttaaacttctaaatgtaatttgtctaaaaaagttgaaaaacagtgtatagtaaaagtctctcytccaaccaatggaaagyacttttatgtaagatcctttaagttactgacttgaatctttacgtaaggtaatttgctagtatctattttataaataatgttatttaatactgttttattttctatagaatcctagtgtttttccatgtaaatttttagaaattcttaaagtatgtatccctcattttcccctatagttgtttgcttctacttctgtttttaagagatagcatctcagttgtttaagctggaatgcagtggcacgatcatggcttactgcaaccttgacttcttaggctcaagcagtcctcccgtctcagcctttagagtagctgggatcacaaatgcatgccaccacacctggctaacttttcttttcttttcttttttatttttttgagatggagtctcacactgtcagcgggctggaatgcagtggcatgatctcggctcactgcaacctctgcctccygggttcaagtgattctcctgcctcagccttccaagtagctgggattacaggtgcccaccaccatgcccagcgaatattttgtattttttttttagtagagatggagtttcaccgtgtgggccaggctggtctcgaactcctgaccttgtgatttgcccacttcggcctcccaaagtgttgggactacaggtgtgatccatcacacccggccaacttttctttttttttttttttttaggagacagggtcttgctctgttttccaggttggtctcaattcctgggcccaagcagttctcccaccygggcctgccaagrtgctagtattataggcgtgagccactgcgcccagccctttatagtttytttcttttttttgagatgaagtttccctctgtcaccaggctggagtgcagtggcgcgatctcggcttactgcaacctctgcctccctggttcaagcgactctcctgcctcagcctcccgagtagctgggactacagatgtgtgccagcatgcccwgctactttttgtagttttagtagagacggggtttcgccatgttggctaggatggtctcaatctcttgacctcgtgatccacccgcctcagcctcccaaagtgctgrcattacaagcgtgagccactgtgcccggccagctctttatagtttaagaggaaggataaaccttaagagatcacaaccatatatttgtgtcaggggtccacaagactgcctccatgtttggagatttgctagaaggactcatgggatcagcttagggttgtaatggctaagatttattactgtaacatagtatggatatatagtagaaagacctcaatggcaaaagacactgacagagtctggaaaaatccatgtaccagcttccttatgtgctgtgccttccatgaggatcacacagactaccttctttccccctyaacgaaaatacaacaacatatgtgactgcccaagaaacacagkttttatctyggctggtcatgtaggtgtactctctgcctagcatgtgtgaaatttccagactcataaaaagaatagcaggataagccacattatttccatagtctagatatagtaaaccatgattaccagttakggaaccctcttgaaattcaagttctcagaagccagcctaggaccaactgtgcaaacagacagaccctccttcacaggataatgtaatagtctcagawctgckttgttaatttttgtttgcatagagttttataattggaagrtgtctyaaatgctacatatttctgtctaatggactatagtaagagtgttgtatagyatataacattgaattattctccattatwgacaggctgtgataagtgttctaatgtttatacaaaagaactttgtaactttgagcagagtaaaragactgttaatgatacttttgactgcaagtagtagaaaaatgttgtgtttaactctgaaatatgctttgcctcatattagtatttctaytctagctttctcttgactagcgtaagcatggtgtatrttattccattcttttattttaacctgtttgcatctttgtatttaacttgtgtttcttgaaggygatagttttatttctctgataaaaacatrtaagaagacaatcacattaaatgtatatggtctaaaacctctgctttttaattgggggtatttagaccatgtacatttaatgtgattgtcttcttatatgttttctatttatctctatctgttccttgcatcatttttcttgcatcccccacctgccaagatggggtcttactctgtcacccaagctagagtgcagtggtgtgatcataccttactgcagccttgacctgctaggctcaagtgatstacctcagcctcccaatagtggagaccacagttgtgcaccaycacacctggctactttgttttatttttttatatatggggtctcactatgttgtccaggctggtctcatactcctgagctcaagtgagtctcctgccttggccacccagagtgctgggattacaggtgtgagccattgcacctggtcttcttggattcttttactttatttatttatttatttatttatttatttattttttgagatagagtctcgctctgttgccaggctggagtgcagtggcgctatctcggctcactgtagtctccgcctcctgggttcaagcgattctcctgcctcagtctcctgagtagctgggattacagacgtgcaccaccacacccagctaatttttgtatttttagtagagacggggtttcaccatgttggccaggatggtctcgatctcctgacyttgtgatccgcttacctyggcctcccaaagtgctgggawtacaggcgtgagccaccgtgcccagcctayattatttattatgattccagtttgcctcyttttattacttttacctgtttttaaaaattatttttgtagttgctttaagattatagtgtacatttagagaggtctaccttcaagtaatattgtacacttcatctataataaaagcattccttcatttgctttcttttcctccctcgtgcactttgtgctattgctgccatgcatttgrcttttatatatgtyataaactctgtaayattttgctgtyttttattaaacatatatctcttagagatttaaataataaaaaatttaaaagatgtttgctcatatagttaccactgtggtgctctttattccttmgtattgrtccagattttcatctgacatcattttgtttctggagaatatcctttaacatttcttgcagtgaaagtctcctggtgatgaattatttcattatttatgtttctggtgtgcctttatttcaccttcatttttgaaagatatttttgcyaggcatggaattctagttggccttttttcttctagaactttagagatgtactgctgtcttctcacttgcattgtttctcaaaagaaatctgatgttgttcttatctttgttcttctataggtaacatgtctttttatacagctgctattaataatrtatccctgattttgaacaatttgattatgttatcccttaatgtaattttcttcatgtttcttgtgcttggggtttgctgagtttcttggatccgtgagttaataggtcttsttatggctagaacattttcagcagttgtttcttcaagtattttttttctcttcctcttttttctcctttgggractccagttacctgcatattattaggctatttgaagttgcctgactgctcactgatgctttttaaaaatcactttttaasattttttttttctttttgtactttagctagtgtctgttcttgtatcttcaagtttgctaatcttttcttctgcagtttctaatctgcyttagttcatccaatgtaattttcatctcaaatgtttttgtctttgaaagtttgattttggcttttcttgtttatctcccatgtctctatttaactttttgattatatgggatacatgtataaaaacagttgaatgtcctcctctgctaattttaacatctatttaagttctgggtcagttttgattgattattttcagtttgcatcatgattgtctgctgctttttatgcctggtaatctttatttagttgtaaaatttaccttgggttctggctattttctttattctataaatcttcttgagctttgttttgagatgtagttgagttacttataaaccgtttcattcttttgggttttgtttttatgatttattagacagatatgaaggagtgcttagtccaggactaattattcctcaccactgaggcaagactttctgtggactctgttgaatgttccatgaattaatagttttcccagtttggctagtgggaacagatactattcctggctttgtatgagtatcaggccctgttccctcccattgtttctgatggttctttttctggattctcatagtttcctcatatgcatatgctgatcagttatctggtgaatgcttgagagaagatctctatagacctctggggttcttttctatgcaactgtctcctctcagcattctgtgcagttattccttgctgcttttttctctcctggctcttaactttctctttccaactcaggagtcagctgagatttgcctcagttgccactctctatgccatggcctggaaactcttatcgttgtgtgctggggcatatgtagggctcacctcttttgtttctcatttctcaaagctctacagtcctttgttgcctgatgttcacatagcatatatatgttcacatatattcacgtctttctttctttctctctctctctttctttctttctttctttctttctttctttctttctttctttttctttctttctttctttttagtggtgatgggatttcaccatgtttgtcaggctggtctcaaactcctgacctcaagtgacgcacctgtcttagcctctgaaagtgctgggattacaggtgtgagccaccatgccctgccatgtcttcattttttatggttgtttcaggaggagcgtaaatccgataatccggtctctgtgactccatcttggtcagaattagaagtattatgcaagtaactaagaagtttattatttcacaatagaaaattaggagttagggtgatgggtagttcagtagcttcatgataacaagttgtcagggtcttaacatcttttcttggtgcatccagaacatattggtctctttcttgatccagttcctctcatgagcaaaagatagtgggcaggacctctaagcattgtactctcaggatagcattcagaggcagaaaggaaaaaggaacctttttattattatgttaattaaggaaaaatccttgccagatgcttgtcccatcctagcatatttctctctctctctctctctcttttttttttttttgagatggagtttcgcctttcgcccaggctggattgaagtggcgcgatctcggctcactgcaacctctgtctcccaggttcaagtgattctcttgcctcagcctctggagtagctgggattataggcacccaccaccacgcccggttaatttttgtatttttagtagggatgggatggggtttcgccatgttgcccaggctagtcttgaactcctgacctcaggtgacccgcccgcctcagcctcccaaagtgctaggattataagcgtgagccaccacgccctgcccctggcatattcctcttaacattttattagctagaattaccttgagtgttcatatcttttttttttttttttttttttttgagacggagtctcgttctgttgcccaagctggagtgcagtggcgtgatctcggctcactgccagctctgtctcctgggttcacgccattctcctgcctcagcctcccgagtagctgggactataggcacccgccaccatgcccggctaattttttttgtatttttagtagagacggggtttcaccgtgttagctaggatggtctcgatctcctgacctcgtgatctgcccgcctcggcctcccaaagtgctgggattacaggcgtgagccactgcgcccagccgagcgttcatatcttaaaccaataactgataaagaagttgagacagccatgatggctttcctctgaggctggggagagtatttagcccctctgaagcatgtttctgcttagagcagggtgcgtatctgaaaaagtggaaatctgtaggaaggaaaaagggggaatggatattttataggcaataaacagtgtctattattggaaatatgttttaactgagggaatctgaaaatatttttaaagaaggaaagatttaaggtggtgcttggaggatgggtaagtttcagtagattaacatagggattctagacagagggtcaccctttacagggtttgaaactatgagggtatatggattttggaaaaatggcacatacgtaagaatgactggagaataagtagggtagagaatactaggggacaggaatggaaaatttccttggctttgcataccaagatgaggaatttcagtaatgtaccttttaaataagaagagcagtattaaatgatctaaattcccccagccctttgtaattgaattggaaaaggtttacttgaagacaaacatatttaggattactgctataaattaaaggccaatgagtgtaaaatcttgagtttaggtattatgtgtaaaacataaagatgaaatattgtaatagaatgcatagtatttgattctttataaattagatggaggaactgcagatgtcttttttttcaagtctaagtatgttggaagatcacaagttttgtttggttgtgctgagcctgaaaccgtgtgaaatggctttgacactaaatgtcagggtaggaatcatagacagttttcctaactagcagtggtggcaaatcaaactgactttggagaacaagaagagaaaagaagatggaagattgatcctttggtcaatgctctgaggaagaaccagtgaaaaggtggatgttaacacagaataagttacaggaagtatagtagaaattatagtagtttggattaatagatttaaggaggtatggtcaataatctcaaatgcctctcaagtgtgtttttgtattataagattttctaaataaaagtttctaaataaaacctaataatatttattttttaagagatagagtcttctattttgggagtggcgggtccggcagagagggatcttgctgtgttgctcatgctggagtgcagtggctattcacacatgtaatgatagtatactgcaactatgaactctagcaatgtttccagctcagcctcccacatagctgggactacaggtacatgtcaccatacctggtcataattattatttttaatgggaagcaatcgggagtcttcacttcttaatctgtctctgacattgttagctaatgtcaagtgacttcttccccaggtcatgttacctgtcagtactcaatcatcatgtacacagtaagaaattgttttatcttttcactctgaaatgcagggatagaaggaaggcatcaaaaaattaacaatggattatttcatcacaatgttaagtgcaaggtgtcggtacagcaagataatcctagatatttatttgaccttggaatgccgttaggcatatatctacttaaaaattgatgtggctgggcatrgtggctcacacctgtartcccagcactttgggaggctgaggcaggcacataacttgagctacaagttcgagaccagcctgggcaatgtgacaagaccctgtcttttcactaaaagtaccaaaaaaaaaaaaaaaaaggcaggtgtggtggtgcacacctgtagtctcagctactcaagaggttgaggtgggagggatggcttgagcccaggatgcagaggttgcagtcagctgagattgcaccactgcactccagcctgggcaacagagccagactttgtctcaaaaatgaatgaatgagggaatgaatgaatatgtttatttcccgtcaccttgacaccttgactctggagctaagaggaarctgaaaaatttgttttagaaaattaagagttttgtatgcctatttaaaaacagttaaattttggtaggcccattcaatgaagatgtctcaatttaattttaatctttctttttagtattaaataagtttaaagaaatgaacttacctttgtgatgaggtgggtggtattctttggtattgtaaaggaccccttgaatgtaaagtttaggggaggggtggagaataatatgaacttacatctgcataaaatatcttgtgaaggatgcataggaaactggtaaaattctttgcctgtaggaaacttattttatatagttgtatacaaagtgattttatactgcataccctttaggaacttttgaaccatggtaatgtttttatttcaaaaattaaaaaccttttaacagtttctaacttgttttgaaaatatacttcaaaaacttatttctctagttgtgcactattgtgtgttttatctatttgaaattgatttgtgtatcatgtgatataaggggtccagtatcattttttcacacatggacagccaattgttactacaccatttattgaaacatctttttcctccacatttgaaatataacctattatatagcaaacgttcaatgtattttagattgttggtaggttctctgttttattctttgtgtatttgagaatcccagtgatatatcatgatgtcattgttactgtagctttatactaagtctttctattcggtagtataagtgttatttccacctcttcctatggcagagatacttggtttagactagcctttccactgagaacaattagaaaagctgtataaaatgttgtttcaaataaatatttaagggatcagaaaactagaagagtggtgaggacctgagggagtgagaattcagagggtaaggttgtgcagagtttggcctgaccttaaattttcttttccccttgagttaattactcagttcaaaaaaatccagctgagaggttgaaaagctgagaagcttctggcagtctgcagagctgggaagacaaaaagggaatttaggggtcattaaatgctatagaagtttatttaggaccctgaaggctacagaggggtggatggaggtgtcagcaaatgacagcctgtggggtcacattcggtcctccagctgtgtttatgtgggacatgagctaaaaatgttttttaccttttaaaatgtctgaaaaaaatttaaaagggaataatattttatgacacaggaaatcataacgacattcaggtatgagtgtttaaaactaatgttttatgggaacaaaaccacacccatttatttgggcattatatatgacttctgttgcactacagtgtcagagttggttgctgcagagagcacatatatttcaaattgctgctctgcatgctacgaatcacaatgacatagttacagtttgtcagtatgtgtgtgtgtgtgtgcgcgccacacatattgccctggcatcttatttatttctctcattaccagtgcatacycacctatcatgttaaaayaagaaarggagaaaagtggactttatatgtaacactttagaggtatagtggaatgtatattattattaacaaattagatagcaaagcattatatttattatgctagaagactatggctgtgctaaaagaatataatatatgtcagcattaccagacttggcacttctcacaatattcccagccaacaggaataaaactaaaaggtcagaaaaaaaawtagtaaattaaaacaaaattttatcacagcagaatttcttctcaaaaacaaaaaatggaaattargctataattaaagtaagtttttcaatggcttatttgttagccaagcaaggaaaaccattaccaacagtagttaattaaattatgtttwattawggtaaacaaagatgtgtccrtagaaaataaactttaaaaaagactattagcctttcagyragagtaattgctctaaaagttaaggacgttgggagtaatatcaagtcattttggaaagaagggtgaatgatttttcatggttttcttaggcttttgatggwtgaataggtgttaccagtactgttcagttgttacatactccagaagttagtgctgagtttgaagtgatggaagaattagtrtttatgcatagtctatgtgaaacaastrcaaragaaaatattttcagaaaagttgagcaaacactaacttagtacaacctgaagtggaawcyrctaagatgyrttacagwtgatagtggcaaaaataactgtggagcagaaagacttgagttggacaaatttacaaagcttgttaaatgtcaggtgtttaaagcctgattatttactgtattatttattagcaggtactttgcagaaaatatttaaatctgtcatgttttagtgaackattatataatagtgtcagcagtgattttgacttgcatttrtrgacttyatcatcaaatcctatgaatttttgttagatatagaggcagaatatactgaattgccattmtacakagcaatttagtgacttggcagtggkaaagttttattkcagttttttgcrctgcrgaatgagattgaartttttctgaataataatgccctcaactattaagtcaaatacttaatagctttgaaagttggcytttcctrtagatttcataatattttgtaacaaattcacctaaaattacaaggcagaacagtgattataagtgaacyttatactgtggtaaggtcacttctacaagaataatgaatcatgaaaatcaagagaaagaacaaatagtaggaaaatrtcttccaattccttttagcccttcatatttctacctgaactcataagcttttaaaaagrtaattatttttatttatatttaaaaagataatataggataatatttttgtaaaagagttcttgagatacagcactgaayrtaaaggaaaatattggagcattcaactacatttgagaaataacttctgtttattaaaakatacyataagaatgaaagcacaagccctaatgaatattcttgtttgatactaaamcaaagcttgagaagtggtagtttcgcaagtttttcaagtggtttggtgcaatctgaagactgcaatcccatcartgaactttatatctttaccctttaaaattataatttatgggccgggcgcagtggtttacgcctgtaatcccagcacttcgggaggctgaagcgggtggatcacgaggtcaggagctcaagaccagcatggccaagattgtgaaaccccgtctctactaaaaatacaaaaatcagccgggcatggtagcaggcacctgcagtcccatctacgggggaggccgagacagagaatcgcttaaacccaggtggtggaggttgcagtgagccgagattgtgccactgcactccagcgtgggtgacagagtgagactccatctcagacaaaaaaaaaaaaaaaaaaaaaaaaaaaaaatatatatatatatatatatatatatatatatatatacacatmcacacacacacacacacacacacacacacacatatatatataaaatttattagactaccttgcaatttcaggggatcttttacccatatatgattttataagattactaagtggtctttggaaaatattggttcactgagtgatccagatattccaactattgatacggttgtttttgtttgtttgtttgtttgttttgttttgtttgttttgagacagaatctcactctgttgcccaggctggartgcagtggtgcgatctcagctcacttcsgtctcctgggttcaagtgatgctcatgcctcagcctcctgagtagctgggactataggcatgcaccgccaggcccagctaattttcatatttttagtagagatggggtttcactatgttggctaggctggtcttgaactcctggcctccagtgatcccaaagtgctgggattacaagtgtgagccaccttgcctagtcctacacatttttaataaataacaaaattcacatttgttataatccactgatctcatcagaaaagtctttaagtattggaatyagttaagcttacattgttggatataagtttttcaaatcttcttattgtccactcatgttctaagttgttttccttgaagtgacaggctcactttattccttttttcaagaaatatgttagawaatcaagttttaataattgtggtttgttatttgttcttacatgtaaaaccrgtgttccatkaaaaaagcatttatttcagtttataaatcacatgatcacaaattctttcctcaagaaaaactrtggtgtracaattattttaytcttyatttctcrttttgtcacatagataattaaaagatgtgtattcatggatcaagacttaaarcattaatgatttttgctgcttcatcagtgatattctcaatgatactctacattatttttactgtagttgtagtrcyarttgagaatgtgacaacttctaatacagcttggtgccarctgctttcagttttggaaatgcatcaacagtwttacccaccatagcttttgcaycrtgtaacaatttttgcttyaattgttaaacattattttgraaactcaaggaacagtraagtctgttttattgcccatakttttactatttgtttgttctttcttccttcaggatgttctragaatccttctttttatcattctcctttctggttcaataacttttctcactattcttttgstgtagttttgtctcatractaakttttagttctcattcatctcacaatttcttgatttccctttcattactaatggatgtttttgctggatatagaattctttgttgtcrgttcttttaggacttrcaaaaatgttatgytgctttgttctggcctccatggtttcaggtgagaaatctgctgtcatttgagttgtttttcatctgtggataaggtgtcatttctcttatttatctcagggttttttagtttagtcattagttttcagaagtttatgatatatattagcattgatttatttrtgtgtatcctcttaggatttattcaatttcttgaatctgtgggtcttcgaataattgttcagctgcgtcatgttcyttttctgagaytccagtgacaggaatgttgcatcacttattatagtcccacaagtgtctttaatgtcttttttaaaaaaaaaatatttatttatttatttatttattgtcagagttttgctcttttgcccaggctggagtgaagtggtacgatctcagctcactgcaaactccgcccctgggtctaagtgattctcctgcctcagcctcctgagtcgctggaattataggtgtgtgccaccatgcccagctaatttttgtatttttagtagagacagggttttgccatgttggccaggctggtcytgaactcctcacctcaggtgatccacccatctcggcctcccaaaatgctaggattacaggcctgagcgaccgcacctggccacttttttttttttttttttttaaatcagttcatttwcttctcttgtttaggttgggtaatctctcccattttgttgttcagcttagtttgtattttatttttgttagcatattttttagttttcaacttggtatttgtttctttcttgatttctttgyaaaactttgtattgtttcctttgtttcaaaagtatgtttgtaattgctttttttttttttttttttttttgaggcrgactcttgctctgttgcccasgttggaatgcagtaaatgatctcagctcactgcaacctctgcttcctgggtttaagtgattctcatgcctcagcctcctgagtagctggaatcacaggcgtgcaccaccatgcctggctaatttttgtatttttagtagagatggggtttcatgatgttggccaggctggtctcgaactcctgacctcaagtgatccaaccacctctgcctcccaaagtgctgggattgcaggcgtgagccactgtgtccggctgtaattgcttgttgamgcagtgttatatagtttaaaatctttgatagataattatgacmtctatgaattctcattgtttgcaccttttgactrtattttcaaattcctgttcagattttcstggttcttagtatggtatracatgktatatttggttgaatcctttgcattttaagtgttgtgttatgaagctctgcattttatttaaatmcccccttttagtaggatttatctgaaactttgcttttggggtggaggtggggcayagccttgttactactcccaggtrtatgtgaagattccagttccttagtaggcctttgttgactcaytgatggagacgtrcacctagtaaatgctgagtaggagtgaaaactytggacttgcattacacctttgtgaataccaccctggctcaaaaggttcctgcttttcacttggcctccactgaatgggatggaggggtggttaagttatcactgrgcagtgctttgagtttggattctccaataggcctctsctgtcatatctctgtagagggagggatagggatatgtccttatcactgggtgggtgttgaactcaggctccscactttttttccacycacwctctagagggaggaagccrcgttactgctcagtgggtatgaatgtcctgtgtcccagttggcctgctgtggtatyatgttgtccgtgggcaggagtggggaatggctkactatgtcctccttttaagycttkgcaaaaggtatatggcttgggcttttatttgtwccatttggcttaaactggtttgttgttgtctatgagttttttgtcttggtagcctgccgcttccctgcttttttgacaaaagacagyagaattttcttggagttttayrtatgtgtgtgcctgttggtgtttctgagttrtctgcttctctagcaacttttcttgtatayatgagtcagaaaggaaacctagggaattcatcctcttttktttcttggctcctgaagccctaattggyctgccstctctctayattttgttgtcttcytttgtttgtcttatgtatcacggcyaagggtttttaaagctgtatttagtggaaagaacagggaaaaktacrttttctgcattttgyctggaagtggaagtctgcatkcatttttyytgtttttccstgaatayagagttctgggatgattatgtttttcttcttcaagcatttaaaagatgttgcattgtttcctgtcttccatggtttctaatgagaagtcaggtgtggygtcagtagtatcattattcccatgtatatartaatgttttgatattctctggctgctttcaggattttctctttatmtttggttttcagcagtctgactatgatgtgcctaggtgtggttttctttgtrttcatcctgcttgggggttgctgagcttcttgmaastgtaagttgatatttttcaccaaatttgtgaaaagcttgacttttatttcttattctttttctgtctcatttctctctcctcttcctctgtaactctaattacatgaatgttagtatatttgatattttgtagrttactgagggtctgttcrtyttcttcccagtgtttttacttttagttcctcagaatagatacactattcatgtattttcaaggagatggrccaattttctaccaatctcttgttaagcccatccactaaaattttcattgaaaktaccatacttattagttgtagaattttcttttcttttcttttgagacagggtctttgtctcccaggctggagtgcaatggcgcgatctcggcttacagccacctccacctcccaggttcaagcgattcttgtgcctcagcctctcaagtagctgggattataggtgcccaccaccacacccagctaatttttgtatttttagtagagatggggtttcgccatgttggctaggctgctctcaaaatcctggccttaggtgrtccaccttccttggccttccagagtgctgggattacaggcaggagccatcgcgcccagactgaaactctatttaaatatagattttagccaatgatattcygctttttttccaagggtataatgtcctcccattccagccagtttttggttatttacaggtaacttcaattagttagcttttacgttttcttcagatttgagacattttaggaaasttactctgatattagyccctatgctgttacccaataaatraataaatttatgtgtgagagccattgttttgttaaggtatattttgcatacgctrtaattcaccctttctaaggtgtgtattgaatgtgatttggtaaatatgaacagtcatgtaattaccatcayagtcaagatacagaatagaccctttacccataaattcactcatgacyttttgaagttactgcctacctcccactccagctcctgccaatcaccgatctgttgctttcctatagttttgccttttctagactaatatatgaatggaaccatacagtatagaatcttttctrtctgccttttyttrcttagcataatsgttttgagattggtccattcactagcttacagttaagtttcgttcaatttttggccagtatataaagctgctgtgagcatttatgtaacatgcttygttgtggatgtatcttttcatgtttcttgggtaaatacytaggactggaatttctgacttgttggaaatatattcttaactttggaaaacagtttcacagtttcttaagtgtctgtatacttctccrtttctagagatctgagagttccwtttgctgtacattgttgccagcacwggatattgccactgtttctaaattttagccatctggttggcatttagtgataatttattgtgggtttgattttgcattccctgatgattaattagattgagyytctttttatgtctttttttgccatttgtgtawctttggtgacatgtctgttattttgtctctaccatttttttccrattgatttacttgtcatcttcttgagttgtragwgttttttwatatattattcacagaagtcagttttggagatgcattttwtaaatatttttgcctaatgtgtgacttgttttcatttatttagcaatgtttattgaacagcagagggtttaattttgatgacattggtcatttgttaattttttggaagttgaaaaaattatgctgtttatrctttattaaaaaatctttgcttgccccagtgttagttgtaggtttaaaaaatccatttatggttaaattacacatatgataaaagaatttgagataagattcatgtttctttgttttccatacggattatttagcagttccagcatcattctaaaagactatttattgctctcttggattatcttgrccccttggtcaaaaattaattgaatatggaaaagtgagtctatttctgtattttctgtttttctgacttatttrtctctccttttaccaaaaccaaacataaagattttttttcaaaatcatgagttgatakttatgktttcagtttaattcaatagcamaattacatatctttaaaacagttttatacctgtagctaagctatrgttgtatatyttcttttaatrtcatctttcctrtaactgaaaaagtcattaaaagaagaaaagattattgtttttgyttcaatttcaaagtaatcaaaactaagtgtactagtattaaatagttaaagctagtagatcaataaggaaatttaatgttattgctttttkctatcmttttttgagtttactagtgatgtaaaagatttgagttatttgctgtgattatataaatactcttttgatgcataawtcagsagttaacatcatgttaatttgtgrcmttagtaattttactgatagcycttctgtgattctgatttttggyagtggtttttacctggtaagtagcattttatcagttggcagktactggaaatmtgctttatcacttcttttttaagaaaagtggaaaacacaaasagtttgttcaccaaagttatgtttsaaggattccattcraccagaatctggttcaccttattgactcaccttgggggtatatgtactagatttttacatacatctgtttggagaaactcgttttatctgtgtaatgtttgtaagaccagaagttcttttactgttcttgaaataaaacttttaagaagctgagtatwyttctgttagtttcaaatttggactawaattacacccaggttttggactaaagagaaagcaaataatmtgttctcatgttcttaaaagacatgatttmagtgtatccaactaacttgattcttactgtgtctgtgtttactcctactaaaatgaaagcttttaaattttttcccactttttgaagtatttaactcttctgtaatadgcagtgttttcttattaactttaaagttgtgttaagcaaacgtgtttaaattmatatttcaatttcaaaaaccctaatttgaaacaataaattttatcattgtatacattatgagcttttaagaataaccaaaaaaatgrgggtggatgttttatgtggragttatgtgtatcccttttctgcttttggctraggacasataycttagaattagctttatgryrcattcatctatctgattatttcagttaatatcatcttaatataatacaggttacttgagaagaaaacaaactcttaacccastattggagagatrccaggtaggatactaaccttgatatagratttcatgtgagaaagaaaaaggaaaatattttccattaaaagttgagtttttatctaaaattctcttrattttctagaaaaaacttaatttttctaaaaatatgttgaagaattatatataaaattcactttgctatatatatagcaagtgaataataggtacacatttctaggaataccccaaatattagaacgtatatactaaaatcacatcaggaaacaaataatagcgccccagaaattccattcagcctcctgttggttactattcctaactccccaaagacatgcactatcatctagtaacaacataggtgagtcttgcctatgtttgtactttgtrtaattggctttgtactttrtataattggctactaagtactgttttctgtcatctttcatgtatatatttrtgagataaatccaaattgttccttccagtcgtttatttttctcattgatgtatagtattctgttgttaagagtactataawttatttattttaccgttgggcattttgaggactttcratttgaggtcattatgaattgtgttctatgaacattgcagtacatttcttttggttgacactgagagtattttatggattctaaccccaaagtggctactttcttttctttctttcttttttttttttttgagacaaggtccagctctgtcacccaggctggagtgcagtggcgcaatcttggctcactgcagcctccacctcttgggttcaagcgattctcctgcctcagtctctcgagtagctaggattacaggcgtgcaccaccacgcctggctaatttttgtattttttttttggtagaaatggggtttcaccatgttggccaggttggtctcgaactcctggtctcaagtgatccgcctgccttggcctcccaaagtgctgggattacatgcacgagccaccgtgcctgtccatrtgttattttcttacaacctaaataaaaaccattacgtaaacaagacaaagtacttagtacatttccatagtcgatgaatttgtctttattayttgtatataactaattatgaactccttgagttcagttcctttcatttcctgactcattgggcttgaacaaggatatttaacctctctgcttcatttgtaaaatgaaaaatagtaatatctacctgaaatggtggtggttagatgggaataaartaatttctttttttttttgtttttgtttttgagatggagtctcactctgttgcccagrctggagtgcagtggcgcgatctsggctcactgcaacctctacctcctgggttcaactgattctcctgcctcagccttccaagtagctgggattacaggcgcctgccaccaggcccagctaatttttgtatttttaatagaaacggggtctcaccatgttggccaggatggtctcaaactcctgacctcaggtgatccacctacctctgccttccaaagtgttgggattacatgcgtgagccactgtgcctggcgtagatgggaataaagtaattcttataaagwacttggcttagctgctggcaaataataatgcttactgattcttgcatattacccatagtttattggctaacttatgtcttccttaaattatgaaattctataaactatccttgtctattttaaaattatactcatttttataacttacatgctttatttgtatatatccaggataytagatatttgyaattcaaattggagrttattttttgtcacttgattttttttctgtaatgtgtgttctcaccacatagaagyttttacatttctatgtagtcagatttattcatgtttttatttatggttatgttaaagattatagctattagrgacctatttcttcagggtttataatttrtgtatgttgttacaaatagagagattaytttttctttgacccaataggtagagggcayttttgtggactcagaaakcttgcctctcctatttttttwggaaaatatctgagawtctgcctcytcatttccaagccagagtttaaaatatttacatttttacttcatagtgttaagacattgtgtaatgtaagtataatgtttaaaaaaaaatyttaaaamtgtaatagtgatttggcagagaccaaagcakggagggccttgaaatgytgctctgtttrttatctgttacaataaagcaaytaccataaacttaatatcttaaaacagcatccatttacttaggtcagaactcagggtaggctcacctgtgctctctgtttaaggtctcacaagattcaaatcaaggtgttacctgggtggaagctctgggggtgaatcctcttctaggtgcattcaggtgtgggaggaattcagttctatgcagttgtagggctgagctcgccattttctttctttctttcttgatctgccgcccaggctggagtgcagtggtgcagtctcggctcactgcaacctctgcctcccgggttcaagtgattctcgtgcctcagcctcccaggtggccgggattacaggcgtgcgccaccacgccggctaattttttttttttatttttatttttagtagagacggggttttaccgtgttagccaggatggtcttgatctcatgacctcgtgatccgcctgccttggccttccaaagtgctgggattacaggcatgagccaccgcaccctgctgagctcaccattttcttactgcctattggcttgggtcacyyycagttcctagaggccactcyttggtttttcctcgtggctctttttatcttcaaagatagcaacagtgtattgaaatgttcccttgctatgaatttcccttttgctactagctggagaaaactccgctttcaaagaggttatttgattagattaggcaaatctcycttttgattaatkcaaaggcagttgattrgtggcttyaatcacatctgcagaattcctttgccatataatatattaatggcattatccttgccatgatatttcatcatatttacagcctctgtattagggtaggaaatttggtggggtcggtggtatgygggcattwtagaatactgcctaccacacattctgtattgaggggtttgcgtgtgattcagaatatatttgtattccttcagaaagattactgtrgmagcagggaggagaatgtggcagaaaggaaaggtactggcaggagaaaaatcccactcttagcagtctccattttgattttgtratgtcgtttgatgttattttttttagcagatgtttcaatcagaaatrtgtgtttaatagtatgccaactagaatgattagcctggaccagaacaagagttatgagtcagtcaatgaactgttcattacttcaggtcaattcatatacagaataatttcatagattaggttttatttcagtcagctttatttcattttctaaagtgaacagttgtttaaacctcrgatctcattaacagcattttaataaacacagtattagggtgggtttacttccctagattgtgaatctcatggattatatgttgattcttattggcttaatttttgaattgggcattatttattttaattctttagtcttatagttttgcatgtttgaagctataygttttcctctgaagaccacatttgccacgtctcagwgatttttttgatgtttcttaatcatttaaaaataatacatgatttttcttcttgattgaaactctgccgttatatagaaaggacttttaaattttgccagtggrtagatttgggactttatscttatattgtgaatttctaatttttattgtattaggtctagggacacatctgcttttactgaatataacctaggaaatacctgctttttaaaatmtgtggacatttctttacgaccatacatgtggatttttttttgaaaattctatgtayatttgaatagaatgttttctctatttttggaatacagagatctgygtgtattttatgtgtctgtttgaatcaaamccgatcattgttattatttatttcatatctacttaatatcctsatttgagagctatgttaaagtctaatctatgcatgttatttctactcagctttactttttatatgtgacatatatttattaggtgtataaactttaatgactatggcttcttttggaatttacactgtaacataaaacttakgttattatgaaatattatctttgacttgttcactgctttttagtttaaattctrtttctttgcaattattgctatacctgcattttttggttagcgtttgtgttttttcccctcaagtctgtttttgaattgtgtatgtcactgtgcattgtgcatatatatagctgctcctgtgttgctgtaaagaaatacctgttgctgggtaattgataacaaaaagaggtttaattggctcacgattctgcagacagtacaggaagtgtggtgctggcatctgcttctggtgagggcttcaagaagtttgaaatcatttagccaggcgcggtggcaggtgcctgtaatcccagctacttgggagactgaggcaggagaatcgcttgaacctgcggggcagaggttgcagtgagccgagatcaggccactgcactccagcctgggcaacagagtgaaactctgtctcaaaaaaataaatataaattaaaaaaaaaaagtttgaaatcatggttgaaggagaagggggagcaggcatctcacatagccagaacaggagcaaaggagaggggtggagatgccatacacttttgaacagccagatcttgtgagaactcactcgttatcgcaaggacagcaccaagccatgagggatttgcccccatgacccaaacacctcccataaggccccacctccaacattggggattacatttcaacatraaattttggcggggacaaatatccaaagtatttcatttatttcatattatatatgtgtacacacacacacatacataaatgaagtctgtagtaatatgtaaaatatgtatatgtgttatgtagtatattttgcatgttttgaaagttgctatcttttaytagagaatttaacctatttacatttgttatccatggayttgaatgttagcttaacagacattaaaattttggttttaaataattttttataggcctagaaaaataatgrttttttttgggtttctttttaattcagtattgataatgagaactgatgcccgattcttctttttttgtaatgatctgttttcttttttatgtggctccaagaattttccttttatccttgttatttcaaagtttctgggaagtttttacctgaagctgccattcagggagtttaaggagacattgttacagatcaagagtgggtatttttgtaaggatatagaaataagtggaacagtgataatgactctttcggttttaggttcctcatctgttgaatgaggattatgcttaattaaatgttagcttttattattagatatttacataacttttcctttagaattttggtgattataatccctcccattttctcccattctggtactcatataaaacagacattgcaccttctggatcagattttcatgtcattctacctctttctcttactttccatctttgttctttattactgcatcctgggagaatcctagttgcctaatactaaaaaaagactggtgaagattaaaaacaaatttggagcatggggagccttataatacttatttattagagcacgtagcctaaaaccattgctatagttggtacagaataaatactggataattaattaaatgaactgtggaatatttaacttcttggtatttttttatgatacaactttaatctcaaattttgttcattctgttttgttttatggatacattttgacagattatttcaaactattaaataaaagtcttgaaaattcctcagactcattcttaaaattggtaatacgagttctcactgagtttttgttgttgttgttattgtgttcttggattaatatgggaaaatattattataacatgttacttttttccttttcttactccctgtctttttaatgatgaataaaagtaaaaagaaaaaatgctgtctaggaattttcattattgattcaaataaaccatttagttgatacaccatttaagggcctttttttttttgaattttatagactggttctcacttttgtttcccaggctagagtgcagtagcgtgatcacagctcactgcagcctcaacctcctgggctcaagcagttttcccaccccaggctcgtgagtagctgggactataggtgcatgccaccatgcccacctaattattgtattttttgtagagatggagtttcaccatgttgcccaggctggtttctaactcctgagctcaaatgatccacctgcctcagcctcccaaagtgctgggattaaaagcatgagccaccatgcccggccaagagctgtttactttatccctcctccccaaatgttaattagcttcgtaattgttacttatgtattatatattacttattrtattattaatattttaacttgcttgatttcttttatgtgtagtgtataagagtgttgacatttgagaagttccctgtggaaatccattctttgatattgtytacgattttacaagtactttttacttggtttaggaagatacattccagactgtgtatatatagtaaacattttcttttaatgccgagtgctcttcattagctatttaattgtaacagatgggtttgaagcgttctcctaaatgtagtgttttattttccttcttttattcactgatatctttatatgatattgtaaattagtatgttagatatattccagtacttctcatagtagtttagctaatataatatttttcattgcagatatgattaagagaacatattggtgtttctaaaatgagaaagacattgagaagctggtcaatttaaattactttctgttattatrtacttacctctcattatattttatctgccaagattatttttagtgtaaaaggcttctgcaaaacttgccatatggtatcaaaataagcgattttagattttaacaatttagcagaaattagttatgytaatgagttgttataaayatttttcaacagattgattgtacttttcctttcgacatttaygtggtctttctsttcagacatttagactaccgaggtgttgtatttgyagttaattctgggttctgttaatgcactaaacatatttagataccttgggagttataaaaaattacctgttttgtaaaagctggttattacactttatcaatgaagaaaaatatttattttctgtgtttctaatrcattaatacycttgagtgccaaaatagcactgaaatgttattctgtatacttataatattatataaaattaaagtgtcacaacagtaattactgtttatgagttatttagaagcttctcctgcttcagcctcccaagtagctgggactacaggcgcccgccaccacgtctggctaattttttgtatttttagtagagatggagtttcactgtgttagccaggatggtctcgatctcctgacctcgtgatccacccgccttggccttccaaagtgccgggattacaggtgtgagccacccggcccagccaaatttttgtrtctctttsttttcttctttctgattcrgccctcaggagtcacttagctttgttatgttgattcartgcagkagactgatgacartgaggaagagtttgatagtatgtgatatacagatttacacataaaacattgaaaacaattataattttaactnctgtagtccctggttaattagcagaatataaagtcartgtagtaacatgtgaagatatccacagtaatgttagcagggtccaactgtctgtgttacrtgaggctccagttatctcagctaagctgtttatgagccacactcacaaaaaagatcaccaaaagttaagtmtttttggtatatgtataggaacacntttctattagggcctgtttcaagcagcatttttggtgctttggatacaaagatagtatrgtgcctcaaytgaaggatcttggactaggatgaggaaaagataaactgatcatgtaatggcataagcaagtaagtaycatgtaatggtgtaaacaaaaatttatgttagatagtcatttcccacagagagatgtcatactgtayagtacagggcccatcaaactctcttcaaagaaaatgatrctcaaagtggacttgggagaatgaggaagagtttgtgaatcattctaagggaaaactgaataagtaaatgcaacattttacataatttcttctgayttcttatgtgttcacttgccctagactgcccctcttgtttgrggcttatttctgtgyrttttamcacttgcaagataatggaggcaggttgaaatgggaaagataccagatgactaattttttttcgccmacatttccatcttttgytaagaaatttgaagttgattgytacattgaagtatgtagttttgtgtttttttctgtgagtctttaascatttrtgtccctgttaacttacaattgatgagtttattttgtatttatttttargcaggrtaaaaaatagtaatatgtctcataaataaaatatatgttcctattactagttttggtrggatttaaaaactttataataatcctcaatatagaaacctgcccttttaaccatattactatttgctttaaaaaaaaatctttaggttttgtttcwaaaatgcttcaaaatttatttttgaaaatataaggaatgaaattctaactttctaatttgaatggaaggatgagttggtagcacacraagcgcwaaattgagtaatgtagattttattatttytaaygaatcctttgtttaatattttgcaggttcmatttgttttacttgtgatrtacagagagttttttataccttcccagcttatatttgaatattccttttcaaggttttataaagmgatttctctcctttacccctttcagcratgtgmattttgtaagcaccttggagccactatcaaatgctgtgaagagaaatgtacccagatgtatcattatccttgtgctgcaggagccgrcwcctttcaggatttcagtcacatcttcctgctttgtccagaacacattgaccaagctcctgaaagatgtaagtttactaygsatagacttttaaacttcaaccaatgtrtttactgaaaataacaaawgttgtaaattccctkagtgttatkctacttgtattaaaaggtaataatacataatcwttaaaatctgagggatcrttgccagggatcgctgsggagggaaatgttatcagtggtttcattgaaattaaatccaaaaagttatttcctcagaaaaatcaaataaagtttgcatggtttttattcttaaaacattttaaaaaccactgtagaaagatgtaaatagggactatgcagtatttctgatttatactataaaataatttattaaaaagtcaatcaacactaaaaagccatccagttgaagaattagaagacagttcactcaggtgttatttcaggatttacgttaataagaacaccaaagacttctgaaattcttagaaattgtgtttccctgataggtataatagaaatctctgctagtaccttttcatgattcatctatcttagtcttctgtaatctgcagttgtgctgtttttcttttccaaatagtattttataattcaatgaaaatgtttaaatgcgtgaaatttacawtatacaggaaattataactctttactrttgtatcattaaatagagatctctcctttttcttactakgtgttttccctatgagcatatatgttttrggatcttttttctcytagtctattgaatttccaatctcattatgraacctccatgwtattttattcaatcttttttatgtcacctcttagtyacctaatgttagcttttatctgttccttagcaatgttaataaaagcttttttcctatcttctccaggtctgtgaaacgtaagtatagctacccyaggcttaaactaatctcaaatayagttagtctacatgatcattacccttttctttgttgagtamcataatttcattttccattaaaattattttgtgtccacatatgtaatcatatcaccattagtaacctagtgtacaaattataggtaaggcaaacyaraattttaaattatatttaggctaataagggatttaaagttttaaaatgcgttagattgtacactcttcaatctggaagagaagaacttcatgcactgcaactgttacggctactatttatgtactgagttacttcagcaagtgcataaactggcagttatcagagtggattatattctgggtggcmtaayaaatatactttgtcatctcaataaaacaattttgtgtgtatakaggaatctgaattttattcagccttttgtagttaatcatgctttagacctcagcaaacaacatgcaaacttttacaagaatgttgttgtagtgttaraatattttwttacttaatggcagtgctactttctactgaaaactgtgttctaacagtgtataccttcagttacatgttagcaatcataaatcagtttgtaaaataataaatactgaggtgagataatatgctgttgttgatcatgtatataatgaaargtttatggcaacataaagctaaaagatacactaaaattatgagtactctgcctttttccaaaatagacttatggagactcataaaaatacatgagcaataggataaaactaaagtaaggaaatttggcaatggaaaattkagataggataartatgaaggtaayagagagaccccccccaaaaatatataactccagacgtaaccacaaatttggccccataccttttcagcagtcaatacaaagaaggaaatatgagcccttaatctgattcttactattyataacaagacgtcacttgatataatgatataataataacaagacatcacttgatacaatgcaatgaaaaattatcttaaagtagccacyttgcagtagraaaatatcagtttcatarggctgtttcttatagcagccttcaaactaagtcggtggtgtaaaatyaaggcctaaatgactaaattagatttctttggkgttttttttttttttttttttttgagatggagtctcgcactgtcactctgbctggaatgcagtggcatggccttggctcactgmaaactccgccttccaggttcatgcgatttctcctgcctcagcctcccaagtagctgggattacaggcgcataccatcacacccrgctaattttttgtatttttagtagagacagggtttcactgtgttggctagattcgtctcgaactcctgacctcgtgatctgcccgtytcagcctcccaaagtgctgggatacagaggtgtgagccatcgtgcccggcctccttggggatyttaarcagtgcattctaactasacagcgttctgacccatctgttaagacgatcataatcttggattaagtaccaaggatataatttaaagaatattgcagataggatgttttgtcacctttttaacatgttttataaatattttttcctatcctaattgtgtgtcatggcagaagttaatttttatgcttttaaaatgatactgtcttaaatcatastgttattatgagggttaaatgaaaacaatgaatggaattcacataasattgtgccttgtatgtattaattgctttaaaaagyrtagttattttacctcctatctaaggattaagttatgagaatgataatacatattgagtatatgtattttctgttgcttcctaaggggcagagcagtagctgtgatagttgaytgagttaggagtaaggttgacatctttttataaaagttgagaaatttaacaaaakcatgyatctcattataaagaaattcrctaaagagagtatctgtgaagaaggccaagattttcttcaggaaacacttttagggtgctctgtcatagktaaatggctggtcattgttgcaacattrttttcatgatgatacaaggatacrttaaccttgtctggaaattttaccctaaaaatccatctagtagatacaacsagatatacttcctgaataggaaaactgaatggcacaaagccartcatgcaagataagaggaaagaacattccaggragagggaacagaccactacacagaccttgaggaatggatttggcatgattcatgaacaggcagcatrtcattttacttggagcatagtagcctactaggrgggtagtagagacatcatcaaggygaacaaaggctagatcatgtaggccttstaagcaagggaaggagtttgggtyctattcggtctgcaatgagaagtctttgcaaggtttaaacatggaaatgctacayatcctaattcaccccctgttcctcaatgtatttactcatcatttagctttaattccttttacttcacttaagmtttaactccagcctcttttctttggttatctttgtatttcttgacattaagtcctgttgcttttcttttrccctaaattctgtcagtcctctgacctttcttatctacctgccaatgatacggtctagcctctttggatgacatccrtgatttattttttcttcccagagattctcttttatagacaaatcastcagcacagtgtcctgccagtratgaaaattggcagatgatagggtktgatggaaattagaaagcaatrctgatttkgtccttcttaaattyacactgtatgacagctattttgacttttgttgctgttcaccaatgcttttattcttatgtgttgtctggattttcttaagyaayagtttcatcaggtttaaggatctgtgataagctctgttctaatttaagctcaatgtttttgtcttttttatttatctcttctytttttacggctgtcttttaggaaatgaccttytytaaagatgatcattttgtttcctctcacttttctcctgccataagaaccttgctccctttacttcatttagcttcatcttatgccactgttggcatttcrtgtctacttttgtgtatactcaaataytcatcactttcattgatcastagtaaagtttgctgaggagtcartttgattagtagtcaagagcctgatcttagaatccaaatagacctggaatttactcctctgcccttttaaattatctttagttatagcctgtctttgctttttcaactgtttaaagaaaaatttcttagttgattattgctttaaacttagtgtctctggcttacagacatgtgtgtctaaatattcatatttaatttctrtcwtgacaccaaagytatccagtagtatygataatcttgtacaygacctccraaaggttgtttcagtattcccacacatcttctcyctgactgggagggttggaaccaacctcatttctttgtgtagtgcttttaaaaattattgtgtttcacataaggcatattaagtgtttttgcaccagatgtatgtattacatggatgttttyctttgactaatttattaccaatgatccatagtaatcaaagaacacagcaaggttatcagtaaggmattggtggaaatcatcatagtctaaaawgtgatttttgtgacaatgacagttgtcttgttgcagagcgaactttgttgtgtataacagtgctgtgcagtrtaaatacaatgtgagcaacataagtaatttttctagtgggtatgttaaaaatttgagraaaaggaaacattgggaataattgtagtaaattttatttaattcagtaatccaaaatagtaatatctcaaattttgagatactttttctcctgttaagattttggaatccagtgtgcattttatgcttactgcacacctcgatttgaactaattacatttcacttgtttggaaaccacatgtcgctagtagctaccatggcaacttgaagtgtcaggggagcaaactctagaaagtttcacagaagcattttagtgttcctaggaaagtataatagaaaaatgaattgtttatctgataattagtttattatttcccccaatttttaaaagttttacggtgagcaaaaagatcaatttttaaatgtacatattttgaaagataaatactggtactgtcttaagaaacataacatcccagttatgtcctttctatcaaaaatgaactaatttatgatgcttccattgttagattaatgatttattttaaatgcctatcacttaaagagccatttaaaagtkattttagcagtaagtccttcacttaaaatatgttcaataagacttgattcatgttaggcagttggggatacaaagttwaaaaagttaaggcycctgtccttcaaggattcacagagttgtgctgtrattaattgattatgtaacagaagtttcttgtaagcatatgrgtaaaagtaatattcracaactaaagrtatttgggtgtggtaataggtattcaggaaataatgtgcagagtttttttttgagacagggtctcactctgtcccccaggctggagtgcagtggcgcaaactccagtcacagcagcctccacctcccgagttcaagcgattctcctgcctcagcctcctgagtagctgggactacaggcatgtgccaccacaccctgctaattttgtatttttagtagagatggggtttcaccatgttggcccggctggtctcgagytcctgacctcaagtgatccatctgctttggcctcccagagtgctgggattacaggcgtgagtgtctgtgcccagccatgagcagagttttgaaggctgggagcacagcagaaaaachaaatttcaagcmgagggaacagaatgtgtaaaagcacacagacatgaatagcatgttatgtgaggtgcatggcagacaacccaccatgaccaygagatagtgagtggttctgagattcagttggaaagggagataagggcctttttgcmtcatacttgaaaattctgattttcttttrrgtgaaaaatgaggtattggtggakttttaatttatacagaggttaacaattagatttacatttttgaaagattgttctggatgtgcagaaaatgawttagacaggaygtcagaaccrtaagtagagatgatttgatgcagaagatactgcagttagcgagacagagtattaggtaggtacaaaggtaattgcagtcttcgccattaaaagtaatgtcaaaaactgcagttacttttgcaccaacctaatatratagactaaactataaacatacaaggaagaatgatgtgtaggaagtttaatacataagaattgggatctggctggatgtgttgggtcarrgctgagttcagagtgaacagtgatactaaggtttctgcctttatctrttcttgagaaaaatggatgatgtttcgggtttttaaaaaagtttcactttagagcagttgagattgagtgtttttagaacatctggctattgagatccagtaagacttgaagaataaaggtttggggtttatgaaagaattctagggccaataatacagatttaggaatcatggtggcattttatggcatgagagttgatgtgatcacaaagggaaactatgggggattaggaaagaaggaaaaggatgaaatcctaagaaactccagcatttagaaagattgtataggtacaaaagccaacaaaggaggatgagatgaaagtaagggaaaactaaggagaaattaggagagagttgccrtgatagaaacwaaggaaaggggcgttttaatgtgggagtggctagcaatgcaaatgctacaaagtgcaaaaagccaaagactaaaaagtaacaatcgggtttcctatgggcattggcaacctcactaatgtagcttcagatgagtattaggtgytaagccagccttcatgaagtacgtcagaggtccagccagcgtccacattttgaagcctgtttttgtactgccctcaagcgagraattatttttacatttttaraagagtgcaaataaaaacaaaaagtctgactttttgtcagagactgctatggctcacaaagcctwaaatatttactayctrgcccttttcaggaaaagtttgcaractccggtacaaataaaagaaatatatttttactctgtttcaagatgcttgactggaaaagaaagaayrtgtgagtcagagagaaattgataggattgaccaaaccttcaaaatygaaaaaaggctgagtgyggtagctcacacctgtaatcccagcactttgggaggttgaggcaggaggattgcttgagctcaggagtttgagaccagcctgggcaatgtggcgaaacaccgtctctactgaaaatataaaaattagatgggcatggtggcacacgcctgtaagcccagctactggggaggctgaggcatgagaatcccttgaacctgggaggcggaggttacagtaagccgagatcgtgccattgcactctagcctaggtgacagagtgaaactctgtmtcaaaaaaaaaggaaaaaaaaaaggttcatatactttgtgatacttgttaaatacaggcatatttatatatattatctaaggttggtatgataggcttgactgkaaaagaaagaacgtatgagtcagaatagtagataggaatgatcaaaccttcaaaaaatgaaaagattcatatactttgtgatacttgttatatacaggcatattttttatacattatctaagattrgtatgattttagaatacattattttycttattttgcagtatgcataagtttaactgtrtatttgkcagggcagtttatccttatattttctgttttatatggtaaaagaactgttagtacattttcttttaatccacatttagggatggatgatgtccataattatgtggattttratgcttttacaactagaaattaatatagaygaatatataattartatattaagtaatgtgtttgtgtatgaatatgtagcttctgtctttaatgttcttccacataaggcattttccagtaatyaaaaaaaagcccttatatgayttgaatagtctgtttatgcttaagaagcatcttagtctaattgrtattaatgtttcttaattttgtctcttatctgattttgtaatttcaaaatatatttaacatkcaaagaaaatgtttatgttacactgcaaagcatttcttaatttgtrttttccttgttykgttctttccagtaagcatatattgagcattaattaggtatccagcattatcattggcattaggaatagaaaattaaagaagacctgcttayggtctcaaktagatatagccamaaataattgcaaaactataygattaaatttaatgtggttacatttagattaaatammctacagtgtttttattggtacctctttytgattagatgacaattcaatgtgaataacttcaaatgtctgaaaggttcatgatgcaaatcctttcaaatgattttactgtatagtcagaaaaaatttaaattcttatacaacaatttcattgtttcactgttaattatagcgaasgaagatgcaaactgtgcagtgtgcracagcccgggagacctcttagatcagttcttttgtactacttgtggtcagcactatcatggaatgtgcctggatayagcggttactccattaaaacgtgcaggttggcaatgtcctgagtgcaaagtgtgccagaactgcaagtaagttttcatttcaattcaaagctgtgtattgggtttaagaggsaccctattrctaggtgctaaaggtttgtgtaatataatagaggttgttcatattttagctatattcattcagtgacttcatcatacttaaaaaaattactggatattataacatttatccagtatatatccataatataatttgttattatattataatataaataacatttatataattttgaaagaagtctaaacaaaactgattttaatcatttaaattgctctggtcgtctaaagagctaatttaaatttgccaacaatttaaaaaataagcgatattaacaatttaaaacaaacagaagaataaagtagtttttcttaaggggtacyggggaggagatttaataggatttaaacgtctaactacagaagtagaagaattagagttgagcyaaaamatcagtcatgtgtttgaatttccattccaggaaggacaatttctactattattttaatgtacatctgcatctctctaaaagccaccttgagtagatcctggtcagcataattccaaaacgaaatatgtggcatttacaaatttgtaagggggttatattttcctatgktatttcatctcttggtcatttctccagtcttttctgtgatttcygcttgcacycccatgattctaatgagcatgataatttggggatgttaccagtatcttcayttacaggctgagaatttttgttgtaaccagcaagaattatgcccaactgccatgatcagtctgtttttattatttagtttgawaagaaataaacgtcagtatcttagagttacrtgacataaataggactatgtacctccatattttggtaaaaattagataaaatattcagtaaacatttaytcgataccttatatctgcgctcagtttcttgggaaggattaaaagarcttgaaggaagagtacttgtcctccaagatctttccacgtagctgaggagataaaacgtgactttttatrgagaggctgaactgaataataattggaggctaactgrcccatcttcctgttgacatctatktatcccccagatttcattcagagattcctctctcagctcttcttgctttcccygttktttctsttcccctcctcttgaatttaaaatcatagtatctgaaartgattatagtcaaaaatctcaacagagataayrctgtaggamaggggcccaatctttgggggcagaagagtgtttagagaaagattttaggttttcaactataattcttaataattatgacaagrttcrtattttgaaataattwttcagcatttaattgcttaatagacattmtaagcacttgaacccgcattacctttaattctcgcagtaatctttattattcccsttttatacctggaactcagagagctttagtctaagttgtttagtgacacagctagaaaacagcagcctgratacaaatagagatctgatgycaaatttgatcctctttayrttatacgacagtgtcttttcaattcgctgtgccaagatttgttcctttccacacagtagcacctatcagttayagcaccttcctctcaaaaattctattttaaaagtaaagatcagaggctattcatcttgccttaacccttcctcctttgcaggaatcctaaaatggctagagcaagttaaccataggtgagcattgagtaaagatcaccatttaggaggkaatccttatggcagggttacctctgttactatctgcagagacaaaacagatactgaggtatttatgaactgtgcagttcccaggactgattattttcatgattacttatgttacaaaacataagtttaaagataaggcatcattaatgctatcttattttttagacaatcgggagaaratagcaagatgctagtgtgtgatacgtgtgacaaagggtatcatactttttgtcttcaaccagttaygaaatcagtaccaaccaayggctggaaatgcaaagtaagttgtttatttatttamttttttaaatcctctctatgttttatrtggagaccagacaaatcggatacctattcaaatctgtacatcatcaccatcagctttttaaaaacagctttaytgacatataactgacatataataaactgtacactcttcaagataatgaacatagtcatcaccrtcaaaagtttcctggtgccwcttggcttgctttgtggctgttcaaacccaaactctgtcttcctagtctgctttttcactatagattagtattcacttcctagaatttttaataaaagcttcatatastatatactcrtttttggtctggcttctttaactmagtgtaattattttgaaatkcatccatattgctgcacagatcagtagtgattcttttttattacygagtgctggagataccacaatttgtgtattgaatcacctgttggtgaacatttgggtccttyaaaattttgagctattacaaaaawtgccratgagctcattaactaacttcctacctcacttggcttctgcccttcagggkgaggygttcagagccgggttgggggcagtggggtagtggasatagcccttggaatccaaggtgcggtttagcttttaagcttagycttcctgggctgctggtgttrcgaggttgagggatggagatgaccctcaggtgctgcatgggcctggagcgggttyttcctggagctggagagggcatgatggcccgtgtgcrggmgtggaaggcacagcattgtcattgctcttcttggaactgctttttctagtgwggaggtggagggcctgggaaaggagggtgatgtsgccagaaccccaggtccccagctgggggaggakgtggagcagackcagggagattctgtacctgcaccctgtcctcrccagtgargtttggcacctagaactgcaarcagtattaccaggttctwttgtsstcttcagcaagtcctattaggyatctgcctgagtggtggggrttgaggggaggggctttctctcctggggggaaaaagagctgctgggtaactgtgctcagctgtggctacctgggaagtggggtctgagggctgaaggattgtgatgaactctggcctgcttcctcaggywgttcagattcyttctcttgctgaatgacttatcattggaaaggaaaaactctgctrtttgactratttgtatatttacactcttatcttcactcagttcctctacttgcctttttatttttaataygaagttgaatttgtaattcattktctttcctttcctaaggaaaaaggacatttaagactataagtttaccttcggctgtagctttggctgaagccaaatttattgtatttgtaactttatgtatgyatataccttaccraatatctttawrkyttttttaagytgtgctgaagtatgttaatttatgctttcatttcatttaatcagataatttaactaaggtaggtttyttaaaataaatrtgttgatacttktaktgactttttaaaggtgtagcatttgtgtttattaatttcatttagttagatgaagtccttttaccttattttttgacttgttgattcaacaagttgttacaattgaccactattaattgttcctatcaatttatcatatttttaaacaaatacyttgtggctgttatttagcaagtaggtcacgccagtgttaatatattgtgctttttaccagtatraaattgttmtttattctatgtaatgtgttttttgttgagggatcaggaarggcaggtattttgctttgcctgacwctatggccacgtagggtgttagtttaacrgttgaatgrttatcttttcacatctttttattttggattcttttgtgttataaaaatgttatcttttgaaaagcttaatagaggtaactgtttggattgatggttgtaattgaaatgcttggctgttttragrcaaaattgttcttataattcctttctacttttctcttcttttacttcctgcaatgatttataattcagaatctcattttgtgaatgtaaatgattataaatgttaaagatataaaatttctcccattccccactgamaatgaagtttttattccccttttctctgtttgattygattaacctagattataaaccttgtcacarttttctttcaaaamtatatttcctctgttaaytccaactttaccctcaayctttcrgagtcttggttatgttcctttaaaaataattataamktttctgaaaccctacatgtyrgaaagagactgttccctttaggctataagaacttggmacagtataatgtttcatattacaaatttttctttcttatactctsaaaacattttcttcagttttttcagtttatgytgtcacragaaaaatcttaactttaaaaaatttaatcataatcctttttttcttcctgaaagctttgggagatgtgtgagtccccatcccccacgccrccccagcacctttttaaaaaaatatatttacttwaaaaattaccttctttacactctctaataatatctagtaactactggataatttttgttcttgytcttgatcttctttattagggttttcattatcttgagaactggtagagaattctgggtgtctttctcarcttgttctgtctccyctttggtgtgcttctttctnatttgctctttgtaatctgctattctcttttgagagtgacagaattacataatttctgggaatactattggatacttaatytttttatcctgttctatgaagggactatagtgtggtggttcaaagcttatgctgtggagtcaaaatgyagttttttcagttactaaattgatgatctttggctacctgtttaacttccctaagtcagtgtatagaaggttaanggtacttacctcacagggatgttggatttartgaagtggtatctataaagtgcccagcacaatgcctaacacaaagtaagtacagaaatagttaccagagtttttcwtrgattgaaaggtttgtcctttgaaccatttgaagagtgatcatctttctctgctgttkaattcttctgtagttctctctgtagtcttgagtcataatttgctcatttgtttgcatttaacttttgagtgtttactgtgtgtgayactgtagtgaaggctggagatgttgggacaaatcagtgtgyccccrcagggctgtcagtctagtttggggctgctccctggtgagctggagtgggggtaatcttttmaggatctttattgtaaaccagtcatygtcagataggtttctttttcctayttttatctcaagaatgtctgtttgttggtatgttatgtgtttttagaaagtttttacttgaaaataagttcaaactctaaaagttggagaaaataaaaataatacccatgtcgcatttacttagatttatcagttgttagcatttcattgtcactgggcatgccctctcttgctttctctgtgtgtgtgtgtgtgtgtgtgtgtgtgtgtgtgtgtgtgtgtgcgcgtgtgtgtgtctgtgtttttgtctctattccccctaaccccctactatttgagggttaattacatacgttgtgcctttttaccaccatttcagtatgtatttcttaatagtaggaatattcttaaaaaatcacaatcctgctatcaacttcctaaacttacatcaatgtartatgtttatctaatgtactagccatattccagttatgtcatttgatctkmwgtccytcataayctaccccttcctccaagtaggttctaggatttagtttttgtcattggtatttttgaagaatagagttcttctcgatatacttgtktttttctttttttcaaacaaatttccccattttgtctttgatatccccttataattagatgagaggcatgcattattgrccagaatactgcaaagtactgatccatcctcagggtatcacagctggaagcacayattattccactttccctcatgggaatcacctggtcaggctgttgtccaatttcttttccccctccyttgtatctaataaagcagtatgtaaggacacwttaagaccatgcaaatatcttgcttttcctcagaatttccttctagatttgaaaaacttactccctaggctgggtgtggtggctcatgcctataatcttagcactttgggaggctgaagcgggtggatcagttgaggtcaggagttcgagatcagcctggccaacatggtgaaaccctgtctgtaataaaaatacaaaaattagccaggcatgatagcgggtgccatgtaatcccagctactcaggatgccgagacaggagaattgcttgaacccgggaggcagaggttgcagtgagccgaactcatgctactacactccagcctgggtgacagagatagactctgtctcaaaaacarcaacaacaacarcagcaacaamaacaacaacaacaaacttactgcctgatgatgccattttaacctrctttgttttggttgcaaatgatgyatttccagstctagcactcccaccgcatttaccagttagccctctgctttcttttgtaagcaagaacacttctttcacatgttaaacttacttattaatactgactcatgagctcctattatcttcaatcatttacaactcattacctaattattttttggctgaaatagtcrcatacttgctgtcagttgctccttcaagctggcgctggtgttgtrccctcaccacttacttgaacayttcatactttttggtgtaacaagatgttacaagctcatcttatacctcctgtgcccsagccctrgaataagtccattgttaaataagtaacccagattcctttagtggggaatgggtgcygggtgygctcattgctactgaagggtgtttrcttcttcatcctttcagcaggtggtgtcaggaaatacatgcgtgtgtatacacttacagawgtttgtccaaccyatgacccgcaggctacatgtggtccaggatggctttgaatgtggcccaacagaaattcataaaatttcttaaaacattatgaggtgttttttttgtgtgtgtgtgtgtgtgtgcgtgtgtgtgtagctcatcggctatcgttagtgttagtgtatcttgtgwgtggcccaagacaattcttcttctttcagtgtggtccagggaagccaaaacattgaacacccctacacttaacgtatatayacataaatattcatatacatatgcataacttagaaataatgaatttacaccagtacctccagttcttgtccttctccactgaattctttgccttctcattcttgcatgtctgttctyctacaayaaaaatwctgggttgtagcaacarcagcacatttattcagttgctcaatctaaaaagcaagtctgcttcagtttgctctcagtaatagattttattcccctttcttttcttagtgatttaattttttaaatatagaagatattagtayactttcaaaactcaatactatatgaagttttactcagaattgtcactgcctcttgtttattatttatactccatttctcccaacctcttggaagtaactaacttcattgttttctgttttaaacctcctgttatttttcgtctaagaataagaagatatrttgctcttattttcagtgaaggtagcatgttgtgtatgttcttttgcatgttgcttttttcgtgtaataaaatctggaaatcacttccaggcaagttaggcaagttcaagrgatctcattctccttttaaacagctgcatagcactccattgtgtatctgtgctatsggttacwyaaccaatggcctgtgctttggtatttcagtagtttacgayawtttgcattataaatgattttacactccctagctttgtgcatgtgtgtttttgaattctcagggacaaatctgtagggtaaattcctagaagtaggattattgcctcaggagtgtacacatatgtagctttgttagatactgtragattcccttkctkggggcttatggyactttgcattgccaccagagatgtgtgagagaacttttcttacgtctttgctaacrggatgacttgttcagcttttgaatgtttgtctgtcttctgggckaaaagtggtgtatcaatgtagttttaatttttgtttatcctgagtgaagtygatcrttttttcatgtgtttaagggtcagttttaatttcttctcgtgaattgtctgttcatgtgttttgcctgttattgaagattttggcattttcccctaaatttaagagttctttataagttagggatgtaagcttttatctgtgttacatgatgcagatactttctgccagcttatttgttcttgttttttttgcttatttgtgtgagacagtgtctcactccatcaccccggccatagtacagtggtatggtcatagttcactgtagccttgacctgggctcaagcagtcttcctgcctcagcctcccgagttagctaggagttatgtgtaccaccaagcccagctaattttttacttttgtagagacagggtctcactatgttgtccaggctgtattatgtgtcttttgactttgtttttattattttttttttgccatgcaaaagtttctttcttatggagttagatttattaatcttcttttgcttctggatttttgagtcatattcagaaagcctttccctacactgagggtatagaggagttcatattttctgctaggatttgcagtttttatgtttattttatttttgagatagagtttcactctgtcgctcaggctggagtgcagtggctcaatcttgggtcattgcaacctccccctcgcgggttcaagtgattctcatgtcttagctcccccaagtagctgggattacaggcatgcgccaccacgcccagctaatttttgtatttttagtagagatagggttttgccatgttggccaggctggtgttgaactcctggcctcaattgatctgcctgcctcggcctcccaaagtgctgggattgcagttgtgagccaccatgtatggcttgcattgttttattttttacatttaaatctctgatctatttggagttgatgtttgtgtatgatgtgagtatctttttccaactggctattcagttttctaaaaaccattcattaaaaagactgtctttgccctagtgacttgagattccagactacaatgttagatttgattgaacttatatctggaacctcttttccattccatcgatctgtctattcattcaccastacgacactgtttttgttatagagcctttgtagtatctggtaatgttgggccccttcagaacttatccatttcacaggtttcttatctgtgcttgtgtatttgtttttctgtataaactttaggatcaccatatgtagccccaataaaaacctcattggaatttttattggaatcacatttaatttattgagtgtctgggtgcagtggctcacacctgtaatcccagcactttgggaggccaaggcaggggtgttgcttgagctcaggagtttgagacaaacctgggcaatatggtgaaactgcctctctacaaatacaaaaaaattagccaggtgtagtggcacacgcctatagtcccagttactcagaaggctgaggtgagaggatcacttgagcccaggagttcgaggctgcagtgagccatgatcatgctactgtattccagcctgggctacagagcaagaccctgtttccaaaacacacacacacacacacacacatatatatatatgatattatatatatatatatatatatatatatatatatataagtgagagttgattgacatcttgattttaagacatcctaaccaagaacaagggatgtctttacaagtttgttaaagtctagttttgtgtcttttaggagtgttttataattttcttcatactgattttcaacatttaagcttattcttgaatatttatttttctgctgttataaatggggttttcttaccatcctttaactcgttatttgtgtgtgtgaattctattgccttttgcatgctaattttatatcctagtactttgttgaattcttttattgaatttttgaacaattttctaggatgttccaactctgtttacaaattaagagttttgtttcttcttttcctggtcttatgtttctgttttcatttgtttcaatgcttgcattggctccagaaccatgttaaaatagtagtggagataataggcacccttgctttttcctgtccttagtgggaatgcctctcgggctctcccataaaataagatgttgcctttagaattgaagtatttatgttggtcacattagagaaatacccatccatttttactttctcaagagttattagtaatgggttttgattcttcccaaagacttctttctttaatcatctgttgcattgaaataattttttctcctcagaccttttaatttgttaaactttattaatggatttttctaatattaaatatctttgaatttcttgtataaactccacctgggcatagttattattttcttaatgtggtattagagtctgtttgatagtattttatttaggattgtttttcttttctccttctcattagataaaggataatacattcttttaaaaaatatatgtgtatgtatttcaaaagatggggtctctgtgtgttgcccaggctgaattctacctcctaggctcaagagatccttctgcctcagcctctcaagtagatgacaccacagttctgtgccaccgtgcccagctatttaggatttttgcatcagtgttgttaagtgcattcattttaatctttaagactagctgatctatggttcctggtagtttctctttttaagtgagcatccctttcatatcaacctggtagcacagaaagataaagttcccttttattgatattttagattcaaaatttggggtgggtaatgagagccccacaatgtattaaccttacacccagggatacccagggttttaaggctgactagctcacaggcacagaagtagttttggctggcctctggttggccttttacttcataaacaattctaatttggtaaggataggacactctctctattctaaaaacatgaagggccatcattggacttttgatgtggagcaatatattttcacattttcagacaccaagtcacatggcgttgaccgtgctctgtgtttccccacccaccatggcagtctcacattgttgcccaggcttgagtgtagtggcgtgagctccctgcagcctcaaactcctaggctcaagcaattctcctgcctcagcttcccaagtagcagggactacaggtgtgcaccaccatggctaattaaatttttttttttttttttttttttttttttgtagagaaagaggtgttttgccttcttgcccagattggtctcggatccctggcttcatgcgatcctcccatcttggcctcccaaagtgctgggattactggcatcaaccatcacaccaggctggccatgctattgttttagagttgagcagacttactccacaaaaattacttcctgctcctagcatatgtttctttttttgaattttgagttgctgtctttttggttttatctcttccacctatatgttttcctggatatccccattcccttatttaaattttcctggagattttagtgcagattttgtgaggccacatcagacattgaaaacagctttttaaaaggtgtataccctaaggccaggcgcagtggctcacacctgtaatcccagcactttgggaggctgaggcaggcagatcacttgaggtcaggagttgaagatgagcctggccaacatggtgaaaccctgtgtctttagtaaacacaaaaattagctgggtgtggtggcacacacctgtagtcccagctactcaggaggctgaggcaggagagaatcacttgaacccaggaggcagaggttgcagtgagccaagattgcgccactgcactccagcctgggcaacagagtaagagtccatctcaaaaaaaaaagcatgtaccctaaattagtgtcatgaaaataaaagcttaatgtataatccacaaatgattcatgactttttaaaggtttacatcagaactacaattacaaatgcataacaaactgtttttgtttttatttttcctggtgtttagaattgcagaatatgtatagagtgtggcacacggtctagttctcagtggcaccacaattgcctgatatgtgacaattgttaccaacagcaggataacttatgtcccttctgtgggaagtgttatcatccagaattgcagaaagacatgcttcattgtaatatgtgcaaaaggtaagaagatagttattctattcagttgttttgtcgattgttttattcatgtggtcatttgctctaccatcttacagcttctaagtttttatcactctagcaattccatcagtactgattgctgttatagatggaattaaatgatgtttttgagtctcaaaggcataaggaagtaaatgggcaaaagataagaccagaccacatcagaaatgagcactaatagggaaaagtaaagagaaaatagcttaaaaatgtcaagtaaaaatacggcagcatctctagtgacatgcacaaatgtgctttaaaaaacctttgtcagttagcaactcctctaacctctctcctctcatacttaattaactgttttcatatccagcttttcagcaatgccttctctttacctagataataactcgatgttagaaatttttatttaagtatacttatcactgcaggtgggttcacctagagtgtgacaaaccaacagatcatgaactggatactcagctcaaagaagagtatatctgcatgtattgtaaacacctgggagctgagatggatcstttacagccaggtgaggaagtggagatagctgagctcactacaggtaaatttgagaatgatttttttttaaattttttgtttttgtaatgttgtgccattgtatcaccaatatattgctttaatcaggaagagaggatcctgtattccagattccatcttgttctcagtttctcaacctttaaatgtatttgttatcttggtcatctctgaatctgatggctaaaatctaatctaacttaagatagttttttttagtatttgaattccgggtctagtgtgctttccttcacttgtgttcttcaggccgacagtggaagttccccagtctttgggtttgcttagtttgttctttataatgtgggttatttttctctaagcatgttgtagttttgtaatgtccttcttaagttaattatcaccttttcagcccaagattttgttcaggtatggaatatttttagtagtatcctactgttaaaaacatgagtcttagagagtaaaggaaatagaactgctcgccagattgtttttcattttcatcattatgagtggcagcttttgtaaaacttctctttatcatcttcaaggataactaaacatcttaattactaacctttcatttccagaatgccatcagtatttagttttgaaatatccttttaaaataatgtgccagttaccttttaaaaaaaattgttttagagatgggttctcactatgttggcctggttggtcttgaactcctggcttcaagcgttccttccgtcttggcctcccaaagtgttaggattacaggcatgaactaccacggttggcccaccttttgatgcattataattttcatgttttttaaaaatgtaaatatacatgtggttcaacagagaaaaatctgaagaaaaacttaaagcatttttggtgatgatttgcccttactcatacaaaatcataattgttgacttaatgaacaaagaaaaaaactcattctgagctaaagaattaataattttttgttaagattataacaatgaaatggaagttgaaggccctgaagatcaaatggtattctcagagcaggcagctaataaagatgtcaacggtcaggagtccactcctggaattgttccagatggtaagaatgtttaatggatatactctgtttttgaagaaaatgtgtatatacaataaatatgtgaatattgactaaaacttcagtaaaagccaagatgcagtcacttaggaagagttttttagtaaaataatcttagacaaattaataggagaaaggacatgcgtgtatttgtagttcagctaccatctagacttaatcataagtacttacttggttaagggaccaagtgattttctattaaaaagcaattcgtatttttatttctttagttgtagttgctaagtagagctgttgctgatgatgagatgtttcatgctgagataatgaaaaatttactgtattggatcatctcagcagtcctattgagggttatttcacttatttccatgatgtttcaattaagctttttgtagtaaatattgataagagctattattgtacttgcagatctggaattaataagagaccatgttgggggaaaactacttgttacatttaatcacaggctcatctgaaagtctttggtgttgtatgtgaagttgtatgttcaattatatagtatacataaaaattataatgtatacataaaaagccactgagatgttttgaaatttattaagtttacgtataataactctcattaaaattattttctataatctttcttgtgaggtctagttgttaaagaaaaagagaaaaagacaattaaaaaatttttaccatagtgcaaagacttctaattttgtcttcataacttactaataagtggtacaatgtttcatgcttatattggaaattgacatttagtagaataaaactctttactcaaattactgttgagggaacagtgttacagaaattttgactccttagagattttataaatgtgttactcacagcggttcaagtccacactgaagagcaacagaagagtcatccctcagaaagtcttgacacagatagtcttcttattgctggtaagcagtatgttcatattgtctaatttgattgagttacaagataatgtctttatcccaaagacatttttgcgattgctgtatgtatatacattacggtaactaaatcttttagttaagagattctggaaaagaattgacaatggatctaaagaaggttagtttcttcttgaaaggttttttttttttttttttttttttttggaggggggaggtcatgattaaaaatattttgtactttcagatctgttacttggtagttttcttttatccctacctgtagtctttcaataaagtgggaaagaagatgagatttcagtttgatatcagaacatgtataggcctgggcgatatagtgagaccctgtctctacaaaaataaaaaaagtatctggggatggtgacacatgtgtgcagtcccagcagcttgggaggctgaggtgggaggaccacttgagcccaggaggttgaggctgcagtgagccatgtttgtgctactctactccagcttgggtcacagastgagaccctgtwtcaaaaaaaaaaaaaaaaaaccagataaattttagtcactkattkgtaaatgaggctagcagtgtctttttactataacttaaaaattaccttgatgagattgagttaaakgtttaacatactggtatcctgatttaaaatttaccrgtgactatgtttctgatatctaagtttatagatttcctgagattagtcttttaatttatagacagtgatgaagaacaaggattatatscaaagaatattttgggtaggttggcaggtatggttaagcaaaataaatattggtggttagtaaatcttttctgtctgtgcttttgagtctatagtaactttgttacatctgggtatctactattagaaaatgcctacacattctagatcactctttactttttaacttaggtacctcacataacatgattgatcctcrwtttcttaastaaaaaatgagtatgagracttttcctgygtaattttcaatccatttggaaatccttaagytgtaaaacataatgttttcattaggttttctggtgtrtggctgattctaatccawaaatccttgtgtactttggctttcaytcacttaataatygtctgctttgatgaataccttctgatttaagttctagtgtagccaaatgttttatatatctatagttagaaaatttaaaattkgtttgtacattgccataacaaatgttctgaattttgyagtatcatsccaacawacagtgaatactgaattggaaaaacagatttctaatgaarttgatagtgaagacctgaaaatgtcttctgaagtgaagcatatttgtggygaagatcaaattgaagataaaatggaagtgacagaaaacattgaartcgttacacaccagatcactgtgcagcaagaacaactgcagttgttagaggaacctgaaacagtggtatccagagaagaatcaaggcctccaaaattagtcatggaatctgtcactcttccactagaaaccttaktgtccccacakgaggaaagtwtttcattatgtcctgaggaacagttggttatagaaaggctacaaggagaaaaggaacagaaakaarattmtgaactttctactggattgatggactctgaaatgactcctacaattgagggttgtgtgaaagatgtttcatacyaaggaggcaaatctataaagttatcatytgagacagagtcrtcattttcatyatcagcagacataagcaaggcagatgtgtcttcctcmccaacaccttcttcagacttgccttcrcatgacatgctgcrtaattacccttcagctcttagttcstctgctggaaacatcatgccaacaacttacatctcagtcaytccaraaaytggcatgggtaaaccagctattactaagagaaaattttctcctrgtagacctcggtccaaacaggtaggktgattttaatgatattgacwgaaaagatattggaacaattctataaaatcagaaggtatatgtgtagctttgktgtggatggcaactttttctgtcttcagatagaacttcwgkgkaatgttgattatrtgtttcagccattattttttaaatgctgttaatgaagaatgccatttattaaatttgaagkgatcttatttggaatttcaactcagttgggycataaagatgcaamctatkgataatagtttctaatagaaagaactttaaaaattcttttagttctgtgctgcagtaaatatagagcctaaaatacagtatagktttgggtrtacagtaactaacatctattatttccttctaatatatttatttattgatattattyattgtatatatttttaactggataaacatcaacatktatgacaggaattttccatgctggggaatttctcattttgatgtttttattaattgctaactcttgtgggatttcttttttcaagtaggacttatttcagtagtttcatggaaaaaaatcttagaattgtactgttgaytytcagtaagtaaagrtaaatcttcctttgtctgctttacatcatgtrcattctaccctttaagaatgagttccatttctttttaagtgagatttaagtaaaactgcatggcaaaatgaagatacwgtaggtayraattatttattgttttacaaaattgctgctttctgaagtgttttttaaaattgcaagataacamatagtggagaagtgttaattcacaatagtaatttggagttttaagtttcatgattgaaattgcttcaagttaagttttaagtttcatgatttaaatggattaaagtttggctttttataggaataatatattgattttaatcgtataatttttaaactgtaaggccargcttttaagaaaatcattttttaatgtgaaaattagtctcctctatatcaaamccagatatattttattctctaaagacaaggtacacgaaagggaaagtagttgtcagatgggatttagctgtttctgcatggcaaaagacgtgtgcagtaaaactaggccactctttatatatgmctttttctaagtattttcyttgacagttatttctgctctaccatgaaaagwttttcttctcaaaccagttgtgctcctttctagtaagttwttttttgttttgttttgartagttatataataattatgttgttctgactctgaaaakactttaccaatggaaatttgaatctcaaatttacttttggttgatatatttacattctttaaagatactgcttcatatrtattcctgttaaattttrcttatctytccttccttgtagacttttgtttcarttgagaaaccaggttcaatacattaggaytctttttctgtagactttatgttccgaaatattggggaggrgggtgtatttccaggcttattccatcttatatgagccatgtcctagtattttgytragctgtctttgattcccaaatccgatgataatctttctrtttttctgcccctcttgttactacttcatcawttkctgctactcttgtaagtattttgtaggctgtgttttccctccctccagctttttagttttccaatcttggttttagttatctagcaaacagccttcacttgatgatgaacctgctaatatagtgctgttattagggagagtatgaattgaatagtwcaagatagatcttccattggtgaggcacwgggaccataacttgcaggaaatattctacagttagcaggaatgtgtatatccgtatattagaaatactgaagttcagtattctgttacatgaatttctttggtattaggcatttcygtattatactkcyktttttatttactgtttyttctacatattcttcacgtyggggatyggckgtaaaataagctgcattttcctgrctgtgattgtgatrtaagcaagattctttggtttccagctatyttttgttaacatcactgrcattttcatawtttgttgaacattaccaattctttggtctttaccagtaaagtaaatactaaccaaagaaatgtagatttacyttaagttctgtttcatggtgggcaaattattaagttgattttaatgattttctataatagtattatatgagcttttctaggaattcacttcaaawttaaacraacattttaataggaaacatctgaaagatctagtttgtgrtagctagtgattggattatcagatgttatctggaggtacaagctagccaactagtagaacggtaagccagtgctgtctaatataaatataatgcagaccatatgtgtaattttaaattttcaagtagttacactttaaaaaaacaaaaacaggtgaaataaattttaatrtattttatttaacctggtatattcaaaacaatatttcagcatttagtataaaartgaacaagatgctttatacttaaaacatcagttctggctagctgcattagaagtgctcagtggtcacatatgatggtggctgccttattggangatgcaagacaaaacattttgagaaatataaaaacagcagttccrgaattattggtgaaattaaaataccaraagaattcaagatcgacaaactaagactgtggstgtgctttcacaatttttaaggactgaagtagaaatattctttttctgttgttcatggaacacattttaatrcagataattgctaaaccatttgttgyrgcaacaaatctttcacattttcaagtatattcagttttaaatatataatccaaataacccaatattggagattttctgaaggtgagatgttargacacagaaaatggaatttatatctcaggtattggacatccattatcaaatatcaaatcatatagaattatnttcctttaaggaggttagtaattaaagtttagtttttygtatttttcctttcatatggaatatttcaggtgytatttagtgagaaatatgatgcttattttctttatgacatgtttcaaatatatctcaaatgtatgatttagaacctaactgactrcaggaatagtaacacatttttctgatggctgtgaatagaataagattccttttgttttttgttttcttgcctattgtagaygcaggatttcacaaagatgaggaaaaattagacatgataaggtaggagaagtaacagacagcaaattggatattgtttcatacaaattgtcctaatgacctagttgtattttctcatcttttattgaagttatctattcataaataatttagtatttcatttttyagcatttaaaaatattttttatttttttatagagatgggggtcttgctgtgtagaccaggctggttacgaactcctggcctcargwgatcctyccatctcgggtctcccagagtgctgggattacaggtgtgagccccacagcrcctggcccatttttcarcatttytataggtrtatgtrctttgcgacytgggtttaagaaagtgattattgacactgmcacatattgtaatcaactcrgtagattttagaacatcaagctaatgrccytmccctagaccaattaaaatgcacttctaggatcatctttaactgtaaccctgaaagyggagwyytgaactagagaaatgtgctacttgtcttactgatttttaaaaatgcattaaamtkaatactrtaaggaatgctctttaaaaatggtggaaaataaagtggaaattttaaatttgtcatattaaatyataacatttgtttttatttctgtcttcagtccatttctctcattgcacagttgtattcccattctaattaggaaattctgagataataatcttaggtcttcttgtattatttaccctgtatgtatcatcacrtcttatagaaagatattgaatgtaatcacactactatgatctagttcagacaccttcatgttctaattgctttcatgatggtattgaaagtttttattaagcattttatgaaacgtattatttgcagtagacatttctttattttatttttacttatttatctgtttattttgagattgagtcttgctctgttgcccaggctggagttgtggcacgacctcactcactgcagcctctgcctccctggctcaagcagttctcctgtctcagcctcctgagtagcggggactacgggcgcacgtcaacacacctggctaattttttaaatatttttagtagagacggtgtttcgccatattggttaggctggtctcgaattcctgacctcaggtgatccacccgccttgtcctcccaaagtgctgggrttacaggggtgagccaccacgcccagmctacagtaaatatttcaagaaaatttcataaatgraaacataggtactgtattttgatatctcttggacaaattataagaagtttactttatattataagaagagtactttcagttttaaaagtagccagagaaccatagtgttaaacctaaaaaatayctacccctttggaacaccaagctaacaacacagccrattagaagtaccagamtttycttttagttcacttgtgcttgttgtgstatttttggagatattactgttgctagtgcyacctaatttgtattgtgaaattattgaagsstaaagctgryaatarctgttyctgtagttatcaaaacaggattaggtctaatttcttgttctacttgatatcgaactcaattttatatatgagacttcttttaakaattccctaaatagtgaagtgtttgctgctgtagctccactgtatacaagtgattatatttaccaaaaagacaaactgtaaactcttttgtttcttttaccagttatcttcctttcggctctctctcttcattgctttcacttttcsyaaattagacttactgtttataagcaaccttggttttacatagtatgttggaagagtgtggkgctggggttgatttaggatttggaggygtaaagtttgccagtgagacaccaaaccttctcyggctgcttttaaaactgatagtactcttgggctgtaagagtgactttgatcrtatttaacaaccagcaatagaatttgacttttaatagaaagttgcttctaaatagcctatcctcmacgtgtcattattgttctcatttccccatcccacagtccttgtataayttactagcttggacagtttacctgagaaattggcctcaaaacagaaagaaacttaatgctaatattaaactrtktttgggttaaattatttttcttrggttcaaattcagtccctgccaggtagtgtttttttagtttctgtagtatttgatagcaagttgattctatttacaacttaataatgattacattaggaastattttgcttttaattcagtttgtagattaaggaggcattatatagattttttagtaatttttagtaactttttttaagtgaagaaattcaagattctaggttattactggtggaggcattagtgtgtttcatatcatagttcattgtttattgatgaattcatacacatatgcaaaaaaagataatagatgctcagcagaaaaaaagttcaataagtgctgaacagkgtgcttaacatagcagtgaacagaaaggggcatgatctttaattacagtgtaaaaagtgctgcaactggattgtaggggaagagcccatacattacaggggcagstaaccttttctgartggtttgtgtaarttcttgatcaaagctaagatctgaaggataatttaaactttggtaattatagctatattttagttttaaggtctaaggaatatactagataatttgtcagaatatctaagtataatgataatttttcttnagaactataaaattacacaaagtctgtcttcttttyraagtgagataaaattttggnatcaaagctaamttttaaattatgatgaataatacataattrccagaaaattcttayttstgaaataaaattattcaacattatttttatcttagagtacgactttctgtctcatatttttgagaactgtctactgccaacataatattaaactatcgactaaaargaatttaagatgtatgttagccaaatctcagagaaaaaccaatggaaatattgagagaagtaatttaggtatcttttgcccccacwgcctaccactaaataaaattacaaacaataaaaygtcytaggtggtgatgcartgagaggcactaatggtgtggtaagagagatgatggttcaccgggagcactaaggaaaggtctgctgrtgagaaaatatgtaaggccatacctgaasrgttagaaaaygccagacatggctggccrtggtggmtcacrtctgtaatcccagcactttgggatgccaaggctggtggatcacaaggtcaggtgtttgagaccagcctgaccaacatggtatcgctcctaaaatacaaaaattagctgggcctggtggcgcatgcctgtaatcccagctactcaggagacttgaggmaggagaatcgcttgaacctgggagrtagaggttgctgtgagccgagatcgcaccaccgcactctagcctgggtgacagagcgagactccatctcaaaaagaaagaaagaaagaaaatgccagacatttattgaggrgctggaatgatatagtgaagtgttstgwgtcagtcgggctctgattgatraagagcttggcatgtttgaaggacagcaaggaagccagaatagctggagcrtagcagcrgggagacaartgccacahgrtdagttrgagaaaggcaytgggaaaggtttgtmttttaagtgctctgagaagcaattgaaggtttgaaatagaatagtgacttgcttgatcacatttgtacttttgaaaagttyctctggctgctgtggggaaaggyttsagtagaygcagggtcrgagaagcwtaaccagcagtagactcttgtagcaggttaggtgagagatggtggtggccacgactgagctrctagtggtggaagtgacaagaagyagaaggatyggagacaaaacttgaagataaaaagtcttgaatttgctgatgatttgcattgaygargtgttgggggagaggactgaagragcaraggagagtgacaagggactggatgccatttataaggatggggaagactgggatgaaaccggttaagggagaaattttaamcatggcaaamttaagargggttttrtgtgagaaaatggaaatgctaagraggaagttgaaaatcctgctaatttggagatctttgattaaarcyagaaataagaatatgggaagcatcaacttscaagatrccctcattgtagataayaccatttaggatctaggctcaagccctgggaaactccagggctttggaagycaaatagaggaagaacacgtacaggagatgaagaaagattagcgaggaaggcagtgaawtatccacaggtggactgctgccaaatccagyagaacagtatgccagatgtyaggagcatgagtaaaatgagaaargagaaayggcttttgacaacasttccttactaatagtagggaagaagacataggtacagattcaagttgattggaaattatgaaagtgaggtaattgacctgcagtggttgctgctcagtgaaatcagcmtagtgattacctgagctaggttagagatttgatgggtragaaagaacacctaacggtaatcctggagggaaaaaaatwaagtgtttgctggagagaatgarttgrattgctggacttcaatgtgtgtggattcagttwgtgacttaaaaatkaaaccagkctattgcttgtgtggcttttctcaaaatacygttattccattacctatctcttaccccaagagtagtcacattcttatttctggttattttaattcctggtggtattttyatgtgattaatgagatagtacttkttaatttgatgatattctagaaacctggtaagtactatgtaccttgtcttaagttttggttmcttrattggyaaaattatagcatgcaccattgaattacctaaktcaaaatatattcttktattgtttgacatttgtcttgtttttctttaaaatgttatctttgtggagtaaacatttttctttatgctgtttarcatcttcatcagattagttcagggtattgctgaatgtggktgtttggaagtaaaaygctttagtttyagttatatagattttaataagatactamtttctatataatttatcaggyactttaggcattttaatttgcaaatttaggacaatttgctttaacgtttcttcacttttgtccattggatgtaatttccataragtattcatttccctrartaaaaaccaaaaccaaaccgrcaactartggtcactgaagaaagagtgattaaatgcttagattataatggtatttgcattttaatgttaccagctctctacagtktaacgtgtatgcatttatckattgcttatgtttctccttgcattctttggcctactggttttggttgtttatagctatagaatatagaatyccttayggttatccatttctccttttaagtagaktgatagttgttagaagaaaaataaccccccaatactttyttctagtgttaattcttaaagtgtgattgacttttatttactttttggtgcagtaattgcagttcatgagtcaatgttgatgtcmtataaaccttaatttttaatgtttcattgtagtgatgtctcaggcagaataaaatatttaatgtaaattgtagcagcaaacatttaagttatacttaaatgtttaaatcactgttagtgattarcttattttgccttccttgaagcaatttgtcctaaatttccatacgtttgcatttgtttttgctgtyctaaaattccttagttgctggctttgaccttttatgttgctgagttttacacatctattttctcaactgccatatcctagggggcttggagtacccataatacagtgagcccaccttcctggtccccagacatttcagaaggtcgggaaatttttaaacccaggcagcttcctggcagtgccatttggagcatcaaagtggtaaataaaattgcatttacattcatatatcatttctgtctgatttgttttgccctactggatgttaagaattaartctttcttttctagattgagcttccaagaaacactttttaaatctaaaaattttaatgtaaagaaataatrtgcttgcatttaaaaatcaagtatacatttttaatacctctttttatggttaattccttttgttgtgattactactgtttttatgagggagaagtccttgacatgtagaccaaaakgtaattaaggaycttttcattcatgatatcataaaaccttgttgcttagaaaaaagcaaaagaaaaagctccattaatttattatgttctcatggasaagaaataccaaaattgtggcatatttcattgtctggttaataccttaaaatgacaaggctttttcccycatgacattggttgatggctstgccagtccttsaagtgagttaagtagtgtgatgcattttgaagagaaaaaaattaatttgaaaaagtattaactcaaaagttaaaatacttcattgacyggagatgacagtttttcttcatattctatatttaatattctggaatatggctgtttaatttagactaatcaaggattttaaggaattctagattatactttattttctttcatgactggaagwactattgttttttaacctccctacctccccctgatatcatccaagatattgaggtataaatatacctcatttgacagtttgataatatagaccaccaattttcacttactttttttctgggtcagcatttcatgttcgagaaaakaaattgagagattactgtagtctcgatttttaatcactaacttaatttttcaaaaatcttttataccaayttaaaaacaaaacaaactcggccgggcgcagtggctcatgcctgtaatcccagcactttgrgaggctgagggggcagatcacttgaggtcaggagttcgaggccaacctggccaacatggtgaaaccctgtctctactaaaaatacaaagaaatttagccgggtgtggtggcatgtgcctgtaatcccagctgctagggaggctgaggcaggagaattgctggaacccaggagacggaggttgcagtgagccaagatcgcaccattgcactccagcctgggcaaagaagcgagactccatctcaaaaataaacaaacaaaaaaaacccccaaaaaactaacctgacgccatccatctrttgtgcaaagaagctgatgcacttctcaaaagggatctcaaggagagcagggtaagagaagacaggagtggcagtttgaaactgggagctgrctgtatttgttacatccaaagggaaaaaagccattcctcccgttccttttgttcatgtgtatctattttatgcttacagtatcaccataaatttttgacttggaaaccattctgctaaatagggaataagttcatttcaaactatgataagggacatcagttgaagatatgacatattatttaacttawcsrtgagggaaacatctaagtattttcctgagcatctggataattttaaatatacataattcwtctacttagggaggtgccaggtttyttcaaggagtaattaattagtacaaacaagggtgagggggcagggaacaccatactctggtacttaatgtctgaaattatcagggaatttaacacattttcccataggtttatttcttgtgtaagaagtcagataaattatttccatttcaagtatttattattcagattatttaaagcaaagctttcacaaagccttttgtcagctttcctataatcctcamataatttttcctggctggaygctttggcttactccyrtaatcctggcactttgggaggcagaagcaggaggatcacttgagcccaagagttctaggctgcagtgagctatgatcacaccactgcactccaacctgagwgacggagcaagttcttgtctcaaaaataaamgtaataacaataatgataaattttcctctaaatacaayggtgaatgaggtagaaatgttgagttcataagagaactgttgaatagtgaaggaaactgacttaattttaatgagaggaagaatactgttacacaacactagcaaaaatraactttcacgctgatgtagcagtacagaatatgcttccaaccccgggacgctgcagccagacttgctagctaagtgaccttggacaagttacttaacctttttattcctcagcacactcatctcaaatggggataataaaacctactatatgggattgttgagagtaaaaaatacttagattagtacatagtaagtactcaatagatgttagctattattgtaatcaccgcgagaccagttaatgagagagttcttccttatacttactctatattgaatacaatttgttgcacttcgaaatatctggatcaggctatagttgttgtcgtcaccaagaatgtaggagtgggaaagagaaaaatcatgcaaaggcttgctgatagcattcacagtgacaggcctaaggtatgattctaaggttgtaagcattttatatttagatttttaagttgtggagtatacgtttaaagataaaaataataagccaggtctyttaatacttatctaaggaagtgtttgtgtaacatttaataaaatgttttatctcagtggcatttggatttaaaaattattttggtctgtcacagaatgttgacttttcccaatctgttacatagggccrtgggtctggatttccargaaagcggagacctcgaggtgcaggactgtcggggygaggtggccgaggcaggtcaaagctgaaaagtggaatyggagctgttgtattrcctgggktgakgcttgcttcatgtatattttmtctaatctaaatgtcagttaatgatgaaaatctcatagcaagttattttgatywtaagartyatataaataggtcaaaatgtttattttactgtcctactttgcttttttttttgagcctctggttatgttttcttgtatakttactttctcatyctttctcttttcttaccttcctctttgactccttatctttctatgccaaccctctctaaaaagtcaktatgtaatatagttgctcttttatttaaaaaattttaagattgatagatatttgcttactatcatgttatgaggctttatttayatgtgtattgcaaatatatttgctaactagcaaatattttatgtaataacttygctattttattaaaattctgtttttaaaattctgaaatgtcattttaagtataggagacaggtgaaattgttcaagtttacyamtaaascaggaataaggaarsttagattcttrtccttttttcaaaaagaaaaattttaaaaccaggcttattgaggtacagttgatataagctatrtttgacatgtacaattccatmagctttgatytatatatatatatacacccttgaaaaygataccacaatcatgayagtgaatatattcatctcccaaarcttcttcatgcccctctgtaattttctgcattccccctgccatccgtccttgtccccaagattagtttgcatttyctagagttgtatataagtggaatcatacagaactgtacactttttggactgatttatttcagcacaattatttggagattcatctgtgctgttgcayttgttaacmgtgtactcccttttcttgctgwgtattaataaaactgtggatgcaccatggttgtagrcctgtgcactttttttycttctttttttttctgagacaggttmtcrttctaattcstggctggagtgcagtggtgcgatcatagctaactctagcttcgacctcccacctccgtctcccaagtagctgggcccatarstgtgtgccaccacacccaactccttttttaaaatttttgatagagacagcatctcactatgttgtccaggctggtctcsaacttctgagctcaagcagttttcccaccttggcttcccaaagtgctgggattacaggcrtsagtcacmatkccccascctgtagtcttamwttcttgtaatgtcttcgtctggttttggtatcagcataactacagcttcatagaatgaatcaggaagtatattctcctcttcagttttctggaaaagttgtgtagtagtggaaatgtatcttcttatattatacgttaatttattagtgaaaccatcttggcctgaaattttctttgtggggggtttttgttgtgttttccttttttttttcttctttcttttgagatagagtttcgctcttgttgcctaggctggagtgcaatggcacaatctcagctcatgcaaccactgcctcccaggttcaagtgatttcccctgcctcagccccctgggtagctgggattacaggtgcctgccaccacgcctggctaatttttttttgtatttttagtagagacagtttttcaccatgttggccaggctggtctcgaactcctgatccacctgcctyggcctcccaaagtgttggrattacaggcrtgagccaccatgcccaggctggagtgcagtggcgtgatctctgctcactacagcctccacctcccaggttcaagcaattctcctgcctcagccttctgagtagctgggattactggcrygcaccaacatgcctggctaatttttgtgttttgggtacagatggggtttygccatgttggccaggctggtctcgaactcctggcctcagatgatccgtctcccaaagtgctgggattacgggatgagccaccagtgcccagcctgtgggacagtttttaacaacaaattttatttctttaataggtacctatttaggttatctgtctctccttkcataaatttgcayctttcaagaaatttgttcatttygtctatcttgacaaattaaaggaatggagttgatcataatgtttcttattattttaatacctgtagaatctgtaatgatttcaccttcctcattcttgatactaataatttgcatcttstcttatwtttttcctgatcagtctgkctagagatttaycartcttattgaccttcttgagtcagcctttgttttcatggacttttgtctattttctttccyctttctgttttattgatttttattmtcatctttattttttcctatcttctcactttgagtttaatttgatcttctttttttgtttactcttacgtgtccctgcttggaaggsacacttgtgaagtttaggtcagaactttctrttctccttggctcatatctgtggtctaggaaaatgawatttctatcaccttctggataaatcacactattatctatgcaggcaacaatagcacgtattttctsaaagaytacctttgccctcaaggtaggttttatttttctagcagtctaamggtcatgaaataaattataaaataaaaacagtgggtcttcaagctagatgatactrttttytttcttgcatggacaattattttaaaatattttggtttttctgcacttattatttaaatatgacartatgactccccacccmcacttgaatctagggacattgtagttttctactgcagactttrtttctggtttatactgggaatatattktttatcattttcagtgaaagcrttcactggttaaayttccttttaaaaataataatggayctttacaatttctttgagctgctcagtgggtataatgtgttgaattttctgtwagtggttgggaggtagaaatagatactttatctctattttagccatttccawaattatatatctcaatagycttgtcaatgcatcattagttctatgactgaattaatgattacttttagtagtcacttaatttcttactgatgatgatgattctacttttgtgaatcatcttkgatgattctctaaaatcttagaaagctgattttgttaatactatgcatgtaacacatcaatacattttctctattaaaaaraattaaagcattataggtagatcagaatttaccattactaactcctcagtccttcttatttccctgttatcagtttggtatatttatatattaggttgatccatatgaaattgccaatattatttctgaactgatgaaaagcagcaatttcttatgattcaacctattrtatatgcccatagactacatataatgackttgcatgtttttatattatagtgctatacctcaaatactgttctgcaatttattttttcactcaacaacgtcttttgataatttctttcatggcagtctatacaagtttctacctccctacttttaaaatgttgcgtaattttctaatgtttggatttgtcattgctttacttactccctaatgatkaatattggcattattaacacttgtagtcattagggttcatatgactataaattgctcttataaagcattagtactatccattaaaactgcctttaggctgggtgcggtggctcatgcctgtaatcccagcactttgggaggctgaggtgggcagatcatgaggtcaggagatcgagaccatcctggctaacatggtgaaacctcatctctactaaaaatacaaaaaattagccaggcatggtggcaggcacctgtagtcccagctactcgggaggctgaggcaggagaatgccgtgaacctgggagacagagcttgcactgagccgagactgcaccactgcactccagcctgggcgacatagtgagactctgtctcaaaaacaaacaaacaaacaaaaaaactgcttttaaatgtatttgtattgaaaaatactgagatgtagtccttctgtttagttaaccaaccaaacttccttccttcttttttttttttgagacagggtctcgctctgtcacccaggctggagtgcagtggcgtaatcttggctcactgtaacctctgcctcctgggttcaagtgattctcctgcctcagcctcctgagtagctgagactacaggcgtgtgccaccacgcttggctgttttttgtatttttggtagagacaggatttcaccgtgttgcccaggctggtctcgaactcctgagctcaagcgatccacccactttagcctcccaaagtgctaagattataggcatgagccaccacacccagctggttartcttctttcagttgttcctcaagaaaagtaattcagttgttttatgttttgaccttgaacataacctgttgtgtttcaactctgtctttccaggcttagrttgtaagctttttaaagaaagaggattgtattttatgattttggcaatgccctccttgtcttcttctacagcttctagttcagagctttgttttgtttcataatcactctagaaattattaacaaaccagwgggtacttagttgatttagtcaaatagaactaagtccagactgagcaatattggttgataatcatatggctratactgaaattttgatgttattcaaaataatattctaaagcagtgytaatagaaatataatgagaaccacatatgcaatttaaaacttcctagtarccacattaaaaagttacagtgagytgggtgcagtggatcatttgcggtcaggagttagagaccagcctgaccaatatggtgaaaccccgtctctactaaaaatacagaaattagctgggcatggyggtggacaactgtaatcccagctacctgggaggctgaggcaggagaacagcttgaaccaggaggcagaggttgcaacgagccgagatcgcgccattacactccagcctgggyaacaagagtgaaactcctctcaaaacaaaataaagattatagtgaacaggcgaaattaattttaatgccttccatttcgaccgatatatctaaaatattaccatttcaacacgtaatatgtaattatgtgctgtattttmtgtttgcaggacatctcagttcagactagctacattgcagatcccaagtgtgtgtcattaaaatagtgatagatttgtgtgggtacatacmtatattatcatttatagtttcctgattagaattctgcataatcaagtcttactaagacaggtttattatattttctcattacttmttggtcyawaggaattctacctctaaagagagaatkagktgaataataaaatgtcacgactccattttacggtagtatcttagcattaatatttggaattgttattctagaccttagccaaaatatatgttttgattatgaattttctgaagctttycasttaagtgtaaaacaagtgaaaaatataacttcgtattctgtgtattttgctttttataggtgtctactgcagatatttcatcaaataaggatgatgaagaaaactctatgcacamtacagttgtgttgttttctagyagtgacaarttcactttgaatcaggttygaacttgamaatttactgtcttcctcattgaattcctccttgcacatttctgctttatctcatmtacacagaagtcattcaatatttagctatagagctatattagttaagaaggtatttttaaagtaaaatttgtaggtttttagcttagtctccatttaaaatatgttctgytttcttaacttcargataygtgtgtagtttgtggcagttttggccaaggagcagaaggargaytacttgcctgttctcagtgtggtcagtgttaccatmcrtactktgtcagtattaaggtaaacatccttaaaytgagttaacaaataygtaytgaatttttatttggttttagtagtaacatgagctccyagttctcacaattaagtattatgattattaaacrtatgtgacagtatttaaryacttaaaatactgcttttaagggtttcctatctsaagaaatttgctcctctataaatcttatattgtacaatatmyttgtcttgaaaaagtaaaacataaaaatatatgcatttaatttaaaagacawtttatastattcacaaagattttaggtttagctaattcattttgtctgctgatttaaaaagctgagaactggaatatttagtaaaaaattattagcccattctgttctttcccgcattctctctcctctatgctcactcgtatacaaaatgacattttctccttatagccaaaagaaacaaaacaagtgtcatatttaatgcaattggtrataatcgagagtcagcgctgctcactttgaagcatttcaggatagaggctttctgkggaaccttttaagtggtatcgtgtgcttggttttaaatatggacaggtctcaatacttcactagttgtatctaaggttcttggttttttctttttaagaactcagtcttaataaaacttacatatttgaataaagtgtcatggccactggaagcaagcatggaggtatagctgtacagcagaggtcttaaactgtatactccacaaggaaatcttttstagtactgccataccatgtaatataaatactaacctcagtttcagtaacaggttgtgaaccatgagtgatttttatrcctttctccccygcccttcaaacatcactgtattatatcattgtcagtaaaatgtcagtatagtaagcaaatcaacattatctccttcagamttctttgttgataactacactagtatttattttatagggtaatacaggtttttgtgagtttaggaatcaaaatgaaagattgtaattaatactatccaaaatagaagactagtacggttaatttatgtagtcttttaaaattagttgctcatgstatgtgactgaaaaacacagagtatataaagccaattaaaaaatagagttatatatgcataaaacatgtttcttttcttctttgtactttatattctgtataaaagttgctgctatcattagattttgttttttagaatacttaatgttttggacctaasgaaattgaataagatccctttcaagatagtaatgtatttcttttaacccatccaacaattaccgaattcccattttacagatgagtacgacttacataagttaagattggacaattagtgcactatcaaacacatagttactggtagagctagaatttgaattcctgtttttaaaaattatgtatggttccttttgcacgatgacactgttttggacagtatagaatactgcagtctcattgagaaatacagcartatctagaaatatactagggatatrtgaattggctcagcttgcatttttattgtaggaggcaattgtttgtggataagtttgatacctttgaagcttctttttaagcttgctggggcaagtctagaaagtcttcactctaaggtggatattttcaaactttatggttttagaaccttaacactctttaaaattactggggactccatagtttttgtttatgaggattttaactatsgactgttcagcattttagaaattaaaactaggaacattttataacrcargactacagaagcacaacctgtacaatatcaatgtaatattatgatacaacatgtagcctctataaacaccactgtatmattgtkaatgaattaaagtgaaaaaaggcaaattaaatcttagtattatttaaayttgttttaactttacagactcactggggttccctagaccacattttggtagctgcggtcctagcattaatttaaccctatacttaagacttggcctttctgggatcactactgaattctrctccctgttcaccagtgtctttgtaytctgactggttgtgcttcacttgtctttgagccttttgcaagctgtggtaattgtgcagyttacamattcccagtagatgtactttcccctggttgtgggtctttgggcttctagaagtacggcttggtgttccaccaaagacttcaggggatcctttgtagrtttctggagctcttagtcgttattgcttcttcattttgagtastgtgtcctrcaaattccactgccttrcctyccctaacctcagcgaggccattgattgtactctgctgmggttctccctccctgggcagsattctggaaaatgtttctaggcagaatatcataggactccctgagtgtttccttcctctcagagaccactgtctcctktactatgtgttgtccaatatctgaaaacagttgtwtcayacactttgtcccattttctactatcttatgggagaacaggctggtcccaymtactccattatmrttgaagcrtgtatcmgtattagattataaaacatayctgtaacaactttggacatggtaccatggatggaatcctggatgacatcttatttgaaaaaacttttaaaactaaggctagactggttcaayggaagaaaaaaatgatagtacaaccccagtacctaggttaaaaggaaatttcaaagagggagaaattgttgaagygttgaagtactagaagtcaagaaacacaaacactaatgtttccattagatttgagaataagaaggtmttgacaagcctggcttaagcagttatgagtggatgtgggtgtagagaccagactgtagtgttttgaagagtgaatataagcrgagaaacktgagagtttggttataaaagggaccacaggtatctgtgaagaaaacttagtaggaatgaagataaatatttttaaartkctrccactgaacacctcagatctgtctgccactttatcttcaggtcaytgtttaagccagggtcacgcagactggcccatagactaaatctggcccatttcctgtgtttgcaaataaacttttattgaaatatggccatgttcttttgtttacatatatttgtagcgstttttgcattacactggcagagtttttrtaaagttgcaacagatcatatggccctcaaaactttctgtttactctctggccctttattggaaatgtttgctggctactgccataagccaccctgatcttacccctaggccatttccttcatttgggcaaataatacattaacttggtaatctaagacaaattcttaaaaatcaataagctaatcaaaataataaatatacatgtttaaaaatcaaatgacattaaaagccttgtaatgggctgggtgtggtgcctcacacctgtcatcccagcactttgggaggccgaggcaggtggatcacttgagggcaggagttcaagccagtctggccaacacagtaaaaccccatctctactaaaagtacaaaaattagctgggtgtggtggctcattcctgtagtcctagttactcaggaggctgagccaggagaattatttgaacatgggaggcggaggttktagtgagctgagatcacaccactgcactccagcctaggcaacagagcagagcaagactccatctcaaaaaaaaaaaaaaaaaaaaaaaaaaggccttgtaatgarcaaccaactcttgtcttactctacstccacgtctgaggcagtcgcttttaatcttttcaggtctttttttcttgtggttaatgctatagctctaaataatcaactggtttactgctttatcaatgctagattttgttgactttctgctatgaataaataaattctgatttaggtcttaaaatacacctccatccttctcccaatatagttgtattactatgtttagttcaattaataaggtgttggttatgactcagtaaatgttcactgcaggtctaaacagtatactatgagtttcttttgtctttcatggagttttttataacaagaaagtaatagtgactctccattcgttctttgtktttgcctactctagaactatcatataagattaktttttaaagtactgtttttttctgggagaagtcctaccctcyttctagacattcccttctcctgctctgatatgtgccagtggcttctaggtrtgttgttctcatccttaaacttcctggcctgatgtcctttgtyrgatctgttgatttatagatcccaagtcttcctwttctttataatacatcctcattctgttccgcatatctctaagtaactttattagaaaggagaatgarggagctgaattttgagtcttcctgtgtctacaaygtgttctgtcttcacacatagttgcttgtgtagctaggttgagaattgtactttgaaaagtattttcctgtagaattggaaamttatactcttctagcatctggagttgggaagtttggtgccattctgatgggtgttcctttgaatttaactcttttattttcttctstggtagcttttaggcttycwtgtacctcatgatctgaatttttattctgtaccctcattacttgctgttttattataatrtgggcacttgattggttctgtctgaggatcctagtcttttgagatctttaagaagttcyacaatcttaatattacatggtgtggcttccttcagkwgtttattagggatttggagattcccaaatattctactaacttatacccttgagagaggggagaataaacagaggrgtgaatgtgaacttcagaattcctagcttcatagtctaaatagaaatcctctaagatcataaaatgtccctaagaactcatgccttacattawtttttttggtattttttctattgattctaagcatggaaatgtagatggagattttgttgatgtattttcaaattatgtatcaataatagkgaagcttacttgatttctttaaaatctggtcactatatctataaatatagtggacattaaatgtacagcataaggtaattatgtggactttaaaaaggcgttaaaatatgtgccattttctattaytctgctcagtaggcttctaaaagcrtgtatgaacatgcccaacccagtattgggcctccgtaggygctcaataaatgttagttgattgcctcttttctgcttctaggtacayaagcaccatattaatttatatagtatatttgattatgttaggttaatgcataaatcacatggattggttgtttcttttacagatcactaaagtggttcttagcaaaggttggaggtgtcttgagtgcactgtktgtgaggcctgtgggaaggcaantgacccaggaagaytcctgctgtgtgatgactgtgacataakttatcacacctactgcctagaccctccattgcagacagttcccaaaggagrctggaagtgcaaatggtactctagggtttgtttgccttgttagtctttcaagttcagagctttctcataccactttggtttttaaaaattagccacacctatttaattgaataatacacatattctatgatagataccagtaatcagaaaaattttcacatacacattaaatcatttcccccattatrttcgtatgtagcttcctgaattacagtaactgagtaactaagaaaataaaattgagacttttcggggggatttggatttcaggtgtgtttgrtgcagacactgtggagcaacatctgcaggtctaagatgtgaatggcagaacaattacacacagtgcgctccttgtgcaagyttatcttcctgtccagtctgctatcgaaactatagagaagaagatcttattctgcaatgwagacaatgtgatagrtattgtgctrttttttcatctttttaaagcttttctctttgaaatgtagcaaaaaaaaaaacaaatggaaaatagcttttccttaatcacaagttttaggtacagaactttttgccttgtagatttttagtcacctagaaacttacagaagcgatttcctgttttgaattctcaactccggactaaaattttgttttgttttgtttttaaatttagagacagagtcttgctctgtcaccaggctggagtgcagtggcgctatcttggctcactgcaacctccacctccgcctcctgggttcaagcgattctcctgcctcagcctcccgagtatctgggactacaggtgcatgccaccacgcccagctaatttttgtatttttagtagagacagggtttcaccatgttggccaggatggtctccatcttttgaccatcttttgaccgcccgcctcagcctcctaaagttttatgattataggtgtgagccactgtgcccgcccaagactaaagatttttaatttaggcctttttgagggtttaggaatcccttgaaattagatggagaattattgccttcatctatgccgtttcttatgaagggtttctgaatcttctaatwgattataaaaaatatctaacacattctgttctccttaaaccactttttcttaaagctctagatactagatatctagatattagatagcaccttctgccctccctacgtaattatgtggaatttcataatcaagaatgtttccttgctttcattggtatattgttgtactctttagaagttaagaagtgaacatatattattaatagtattattttatcagtagtacagtattcttgggactctggctactaattatytgttccattgcaagacaactttttacttaatttcccgattaccattcaacatcgctttccgtgagatatgtatacttcaagttagatgcattacctggagcacatacctgctagcactgccatttgcmgttttctgaatacctttgtgtttgccctaactagcttcctttctgtctttgaaatatttaatatatgatgataaaataattagcttccttatgtaatgtgctttgcttcctctctaatagttgttctcattcctttttatttccttcttagctgtatgaaagtttttctgttamtagagatagttaggagaaaagggcaaggtaggaggagcatgtgaggcttagggcttttaagtttgawgactcagtgttacaggttttaaaaggtagcagttctcagtatattccatttttwwwaaaaaatgtacaaatatggtctttttagatggatgcatgcagtttgtcagaacttaaatactgaggaagaagtggaaaatgtagcagacattggttttgattgyagcatgtgcagaccctatatgcctgcrtctaatggtaavagaataatttaaactgtgagtctgcactcttgtaccactcwcttgcaccttactgtccataaccaatgaattagcttagctcyactctattttgtctttgtgaaacttactttgacaagtattttatgaaaaatattatttttgrttatacatgacttatcacaacttgttataaaacaatttacatgaaacartaaaaagcrtatactttagatgtaaactataattttgcttccaaggaacatgatcttgtagttattgacaatatgtyagaatccaatrtgttgattstttcttagccaggttttcctccatgacttgagtatttccttcatcacttcttgttttgttgttgctttaaaaagcacttttaactttagtgttcaaacatttattttaataaaatgastatagaaacagaaattataatcatatrtaagtatttaaatacactttaccttttctgaaaagaattacmtggatttttttttttcgtttcagtgccttcctcagactgctgtgaatcttcacttgtagcacaaattgtcacaaaagtaaaagagctaggtaaaatttgaaatgctttacttgatttaattaatttactttgcttaatttttacataattggcttaccacttgtcaaacctgcttcaatcatatgggtgttctatccaaattctgtaatgttggtaatcatttccacaatgatatataaaatgtcatccagctttactggggcagtattcctataaatttcagcaagtaggcaacaaaaataacagctcttagaataaccattaatgccatacttgctttagtttcattgatatattactgtgcttaattatcagttagcagaaaacacggcctagttagcgaacagatttcttttagaattaattcaatckcttaatttttaaaataattaataagcctagtatggtgattcatatgatattcttattaaacagtcattcttttgaatatttgtatttaatagcacctgatacaaaaatgtttggatagtacaggaattgttctaaggaacaacagttttgtacatttaaaattaaatctgcaggatttgtacttatttattacttctccctrttagtaattatgttgatactctgatttttccagatgagcttctggagtattctctcttctcttacgtaaatagatccctgccttttgatcttttctacgaagaagctcatagtggattagctgagcattgmatwtagttgcagtgyttctaactctttttattgggacatgaaaatagaaattccaggaagacttttttgagacagagtctcgccctgtcgcccaggctggagtgcagtggcacgatctcggctcactgcaacctctgcctcccgggttcaagcgattctcctgcctcagcctcccgcatagctgggattacaggtgcccgccaccacgcctggctaatttgttgtatttttagaagagamagggtttcactgtgttagccagcatggtctcgatctcatgacctcgtgatctgcctgccgcctcggccccccaaagtgctgggattacaggcatgagcccctgcacctrgcycaggaagaccatttttwaaaaacatgcaacwtttctgccygtaatccaaggaaatttgacctattgttcytagtttttattgggtrtcatgaagttaattattcatgcatttcatagatacrtaattrytttctagaactacagtcacattcccttgayatgggtattttggaacagtaatcagtcaaatttgaaatgaaagtttaaatttgtatccttgggattttgtaattttagacccacccaagacttatacccaggatggtgtgtgtttgactgaatcagggatgactcagttacagagcctcacagttacagttccaagaagaaaacggtcaaaaccaaaattgaaattgaagattataaatcagaatagcgtggccgtccttcagacccctccagacatccartcagagcattcaagggatggtgaaatggatgatagtcgaggtaatactaatttattttccrtgaaatatgrgtgcaagaattaaagcawataaagtaacttttgaaatatgtgtatgatttaccaaagggtaaatcacactgacttagttaacccctgatgtgactgacccttgccatttccaaatgagtgatcttcttagaccttgccttttcaggttctcttcctttcacacattttagaacagacctaccttacagaaatctcaaggagcaccatatctttgaagatcacaggtggggaantacagagggcttgactttagtttgctagatnangacacaaaccttctcagatactgtgagcttggataataccatgtttcagttaaggtagttgatgcatacattctagaaatggaaaagctgtcatttaatgttacttcaggtataacttcatattcaccagtgtgcatcataaagtattggtttataaacattttcttgatcaaagtaaatataaggtttttctagctgaattctttttttttttttcagttgggagacagggtcttgctctgttgcccaggttagagtgcagtgacacgatcttggcttactacaacctctgcctcctgggttcatgcgaccctcctacctcagcctcctgagtagctgggaccatggatgygggccmccacgcctggctaatttttgtatttttttgtagagatggggttttgccatgttgcccagactggtctggaactcctgggctcaaaccatctgctctgctcagcctgctgagttcttgagatagcaaaayattttaatagtaacccaaaatccaatatgagttaaagaggattactgttggtttgctcatttttggggcggttatttattttcaactgattcagaaatgaagtgataattatttgtttgattatattttatttcatayttttttgttttttttttttaaggggcagtgtcttgttacgttgcccaggctggtttccaaytcctgggctcaagtgatccttctgcctcagcctctcaagtagcaggtactataggcatgcrccactgcagctggctttgagacaatagaatttattgaatatctactgtakgtcagatgttggaaatcatatcagtgtacaaagcaggtagaattctctgcatagagtttatattttaatgttaggtaacccaactyttaaaaaaaatcagttaattataatgtgtttggcaagtcccatggtaaaaataaagtttgatragaattgcctggccaggcgcagtggctcatgcctgtaatctcagcactttgggaggccgaggtaggtagatcacttgtggtcaggagttcgagaccagactggccaacatggtgaaacccattctctgctaaaaatacaaaaattagccgggctcagtggcatgcacctgtaatcccagctactcgggaggccaaggcaggagaattgcttgaacctgggaggcggaggttacagtgagctgagattgcaccactgcactccagcgtgggtgacagagcaagactctgtctccaaaaaaaaaaaaaggaattggargtacagatgggtgtttagggtccatatgaacagaaagcagtatttgagcacagattttaaagaggtgagtgagtgagccacttgattacctgagagaagagcatcccagacagtgaggaagccgatgtaaaggctctgggtgagagtgtgctgagcatgtttgaagaaagagtgttgtggagaccaacagagtgagcagaggggacagtcagaaggtgagaagattagagatgtgaggacaagaaggacggctcagtatatctcacacaaccataaggtgatgtgtcagtagtttgtgcttaatagcaatggaatgggaggccattgaatgttcctgaaaagaagaacaccatgatcttatttatattttaagaggaacactctcctatgatataaatagatgattaggtgcaagagttatgacaggtagatcagtgagaaacaatggtccaggtgagaggtaattgtggctttgaaaaggtatgtcatttgtggccgggctcggtggctcatgcctataatctgtaatcccagcattttgggaggccaaggcgggtggatcacctgaggtcaggcgatcaagaccatcctggccaacatggtaaaacctcatctctactaaaaatacaaaaattagctgggtgtggtggcaggcacctgtaatcccagctactcgggaggcagaggcagaggattgcttgaacccaggaggcagaggttgcagtgagccaagatcgagccactgcactccagcctggtgacagagtgagactccatctcaaaaaataaataaataaatgaaaagatatgtcttttgtatgttcttgataatttttgttttgtagtgtgttttgggtctatgttactgggagaaacactttctgatgcttgtatgtaactgattttcagatacaattgaacaggtaatttgatttgggcagttggagtttgcaaagaagtagtcyatatacttaggaggaattgatcagatcagctttaacaagaatttccayttctgaggatgttaaaaaatgtctgaaaaaggtttccatagtctcttaaatttgggaagtgctccatttcacaaaatatgaaaggtttcttgataatagtacacattgtttcccaaattatgagattataataccttttaaaaacaacacaaaagaccttggaaggttttccttgtgactaccacttgtaaacactgagaaatggtgatatgtttcaatttcatattttctcattgactygtatcayggtaaaagaaaatcagttgaaaaattacccttgcttttttaaaatktaygtgataaaatagcccatctgaatttactgaatttgtccttatttttattgaatatgaaaaaagattgtttagygtgttggatgttaaatgctaagacaattttagaatttaaggaattgaatatacagcattttcatgactagtccctcaygttcmtttacgtgccaggatctcacatcctttgcagaaggaaaggtacattcctagggataaaataagtgcatgttacttggacaacatttttgctttctgtttgctaaataaaaatcccttttaaaaattcagtattgccamactttgccatattaaaaatgttttagattactatattatcctgaaactrcatgtacacacacacccctaaaataagttttawggtatttcatatgcctgtacaggagaraaaatagggaaagaatamaatcatcgtaagttcttattattacattatgctgagatttctaataacactgyccttttctgggtattttgtattaaacctaaaatttgtgatgttttagactgtttcactaacgtgttttgataatrtctcagtamccttgggaaaacattataaagtagtgggcaaygatgaaacctactctgggtgtttttaggcaaattttttaacttctttgatkytagtgttctcwtttataaaataggwgaaccaggatgagcccataggatagttgtgctgatgaggtgcaaggatgcatgccaggcacccagcactggctcttcccacacatggagtgctcagtaaccgtgagctattagaatacaagtgctcaaccagtgcttgagcaattgtgtyytgtgtccaacagaactcaacagaatcccaygcttgtctttrtatgtgaattcagttccttttgagttrgtaagaaattatgcctgtgttggggtaaytgaacttttaggakgagggaattgyctgccacaattattctmtgarcttaatgtttccatgtctttttcttcattttggaagttgtggraaaattataatgaaagagtatataaaygttttcctctgtattatagcatatctgacagtttcctttattaaaaagtacaatacattagggagagacttgatgaatttaaaattaaagtttgaaaagtrttattgactataagtgatcttcagctgtgcagttttcaacttgaggttgtcagaatgtaatattacacattatattacacacatctayagaatccaaactgtgatgttcctggagtattggaacaawacctatgactttttgtttctatttatttttaactcttctaataaccgcttccttaagaaaagtcatacatyatcactttggtgtatcagaaacaaattccttatgcaataaaagcatacttctttctcattcacctmctgggatctagaaaccctgttaatgcaagaaaaaaatcccatacctcaataaaataacactctgtttgtctcaagagtggaaacacaacacatttcctctcaactggtggtcscagatcgaccatcacagtgtatggatgtgttgggaggtgtrggaatrggactgcactgaggctctagaaggccagcaggtggggcagactgaatggagggaggggactggcattcagtaactactggagartgggaagagtgaggtagactatccatctggtgaaggtggctgcttccttgaggtttgttactttctgtaatgttaattccctcaacttttraaatttgatttttagacaagttatacattcaaatgatttaaaattggaaaataatwaaaaggtaaacagtgaagtctctccctttcccctgccttcatgcccccagtttrcatctccagaaacctcagaggtttcttgtgtaaccttccagatgtgttttatgcatgtataaggaaatgtgtgtgtgtgtgtgtgtgtgtgtatatatatatattttgtgtgtgtatgtgtgtgtgtatatatatatattttgttccttttgtcttactactatttactgtccttcatttttttatggctgcaaatattcctttgtatggaaatataagcaatttaacttacctgttctttcccctgttgatagacctttgggtttctttcaatctttttttttttttttttttttttttttgagacagagtcttgctgtgtcgcccaggctggagtgcagtggcacgatctttgctcactgcaagctccgcctcctgggttcacgccattctcctgcctcagcctcccgagtagctgggactacaggcacctgccaccacgcccggctaatttttttgtatttttagtagaggcggggtttcaccatgttagccaggttggtctcaatctcctgaactcgtgatctgcctgcctcggcctcccaaagtgctgggattacaggtgtgagccaccgcgctcggctttctttcagtcttttactgtgaatagtacaatgaatcacctggtatatttataatgttgtatgtaagtgggcctgcaaaggtgaattccttgctaaatccaaagacataatgcatttaaaactgtttttggcaggtaggatacagttttttttttcatttatttttattacacatatctgaggtatacaacatgctttgtatacatagtgaaatgattactatggtcaaacaaatgtctgtatccttcaccttccatagttactctctgtgtgtgtacasctaaaatctctttcagcaaattttcattacaatattattaactgtggttctcatgctgtgtattaatttgatctctagaattaytcgtcttacctaactgcagatttgtaccctccgacctacttctgcccatcccacccatcccctacctccagacccttgataaccaccattctactctctatacgttcagcttctcacyccsctgcytaccattctgcttattaagtgagatcatacagtatttttctgtgtctggcttactttatttagtatactttcctcccggttcatccatgttgtcacaaatggcagtgtctcctttcttaaagctaactatyccattgtataaagtcctcattgtcatcagtaagttcttagaaactgtggttaagaggsggaaaaaagtatgacaaaactgatttttttttcattttgcattatgccaaaattagattgaaggaaacagtgttacttgaggacctgctgtatgttcatttagcttaaygtctcagttcccaagaacctattgatgacattaagggaggacttaatatatgtrtatacamacgtcacaatttctttatccattcatctgtccttgaatgggtaagtaaattgtscatyaggacacttagtttgtttccatatcttggctattgggagtaatgtcgccatgaatatgggagtgcagatgtctctctcagatgctgattttattacctttgaatataygcccaacagrggcattgttggatcttatggtggtagtttktttttttttaaggaaactctatactgttttcaataatggctatactaatttacattcctatcaaccatgtacaaaggtttcgttttctacacatcctcaccaacacttatgtctttgcctttttgataatagtcattctaagagacatgagatgatatctattgtggttttaattttcatttttctcatgattatgatgttgagcatcttttcatataccatttgaccatttgtgtgactttggaaaaatggctattcaggtccttgcctattttaaaatccagttatttgggrtttttttgctactgagttgtgtgagttccttatatgttttggattttaaycccttatcagatgtgtggtttgccaatattttcccctaatccctgtgctaccttttyaccccggtgtttttkttttttttttattgctatgcagaagcttatttgyttgatgtagtcccacttgcttatttttgcttttgctacctgagcttttggtgtgatatccaaaaaatcattktcaaggaggatatyaaggagtttttctcctatatttccttctaggagttttatggtttcaggtgttaggtatttaatctattttgagttgctttttatgtatgatgtgtaagataggcatcaggtccagtttcattcttttgcatatagatatctagttttcttaccactacttatygaagacaccatcttttccctattgtatcttattggacttgtcaaaaatyagctcataatatatgcttgggtttatttttgggctctgtattcagttscattgatccatgtgtctgtttttatgccagtaccataytgttttgttaactatcactttgtaatataacttgaaatcaggtagtgtgataccttctactttgtttttctttctcaagattcttttggctattcagggtcttttatgatttaatacaaattttagaattgtgttttctatttttgtraaaaatgcctttggaaatttgatagggattgcattgaatctstagatcactttggatagtatggacattttaacaatwttcttccaatctacaaacatggggatatcrttatatttatttgtgtctttagttttttttctgttttttgagacagagtcacgctctgttgcccaggcagaagtgcrgtggtgtgatctccgctcactgcaacctctgccgcctcctgggttcaagcaattctgctgcctcagccccccaagtagctgggattacaggtgcctgccaccacgcctgcctggccaatttttgtatttttagtagagacagggtttcgccatgttggccaggctggtcttgaactcctgacttcaggtgatctacccgccttggcctcccaaagtgctgggattacaggcgtgagccaccatgcccggctgtgtgtctttagtttcttttgtcaatattttatagtgtttagtatataaagctttcacttccttcattaaatttgttyctcagtgttttattctttttgatgttattttaaatggaaatgttttcttcatttttttttcagatcattatttgtataaagaaatgcatctgatttttgtatattgattttgtatcctgctacttgactgaattcatttattctagtaactgtggaatttttgggggtttctacatacaggatcatgtcatctgcacacagggataattttacccgmttttttctgctgatgccttttatttccttttcttatgtgattgctctggctaggactatgttgaatataagtgttaagagtaggcatccttgycttgtagcagatattgaagaaaagctttcagtctttccctgttgtaggtttgtttttgaataggcaatacctgtgcatgatacaagaaatacaraggtcttaaaaagagtgaacagtgttaagttascctaccttttgaccatcccttccttggaaagaaccagtgttttcttatagctttccagagattagtcatctagatacaagtatgtatatatgggagaatttctcatatttgggtgatatggtctttttcttttctttctgtctgtctktctttctgtcctcgtctcgtctcttctcttctcttttcttcgtttctttcgatggagtcttgctttgtcgcccaggctggagtgcagtggcgcaatctcggctcactgcaagctctgcctcccaggttcgtgccattctcttgcctcagcctctggagtagctgggactacaggcacctgccaccacgcccggctaattttttgtatttttagtagagacgggttttcactgtgttagccaggatggtgtctatctcctgacctcgtgatccgcccgcctcagcctcccaaggtgctgggattacaggcatgagccaccgtgcctggccgatacrgtctttttctttatttcagcctgtgggaatcagaaggcccttgtgaagatgttggttagaagagactttagcctacagtgataccacctgtgtgagggcactgtatgtgctactttatgccatttgtctcaacatgtatgcttactggtgtcactatgaacctcatcaataaaagtgctctcttggtttttactgtccttgtgtgcattgtttcaggtgaaaggtggcctttgtactagatccagtgttatccttggccacaaaccattacatatgattaacttggggatttcctcttcatcatcctggagatcatcttctgttctctcctgtgttacatgtgttttctgcaatttcatgaatttctctttattttttccctctatttgggtggaacgtatattccatagctccctgacagagaatgtgtggaaggtaagttttgagcattatatacttctgaaaatgtctttattttaccttcctacctgactcatcttttccaggttggaaayacattttcatttatcaattttagtcaattgatccactgtcttttagtttctagtatatgaagaactcggttctctctatgtgacctgcgttttcttggaagctgttaagattttgggaaattctttgtcctcagtgttctaaaatttcatgaggataacgtctgtttttgtctatttttgatttttaaaatctgttttgttaggcactgagtggtctctttcagtctgctgtcttatatccttcagtggtaggaaatgttcttgarctatattattgataacaattccctctgtttttccagaattctgcttttcagatgtgaaacatactcagtttttctctgcttctttycaattcatgtccttattttatcttcctctactgagttttatttctatttcagttatttcaagagctttctttcctccctttgaatgtttcttttgtagcatcctattcttgcctcatgggtatcttatattatccctcagaggattttaatcytttttaagattttttttcttcctacttagtctgttaattccaaattgtcttttatgttctcaggtctctgtctttcatgttacagatcaggggtgttgcagatcttctggcttccatggcccacaatggaagaagcattgtcttgggccacayataaaatacackaatgatagctgrtgagcttttttwaaaaaaaaaaaactcataaaaagtctcataatgttttatgaaagtttatgaatttgtgttgggctgcatttaaagcatcttggctgcaggttggacaagcttgttatagaccatwgtcggataatctttatggtacatgcatgattaaaagtgaagaactaaagatggagactggatagatagtatttttattttttaaaaaaggaattaagtagttgattagaaagctttswgtatgtggyggtgcttgtcgatttgtaagtttagtggggtgatttgtgctgaccatttggtgaaccctctggtttccgtatctttagatgttcttcttgaactgctcaggttccccactgcagtcttttcaaacctcatacttggaggctagagatctggctgctagctttctgagaattcagtggggaaacgtggggtctggcagcgggagcaggatggggttgtccacatttagtatgcccrtattttcttggtcctattttcagtcttcatcccattgttccatttaaggtcacccaggaatcctgcatcccacaaatgagagtagcagcttctcagtgtgtaaacctaggaagcagatgtaggragtatgacttctgcagataattaaatctcttgttgcttgggttttctcccacttatttccaaaggtggccagttttcctagtttctcagccttctgaggagtgttataaactggattctttttttcagttctttctgctctcaactgagaatttgcctttgttaagttgtttttctccyttcctattgtctttttttttttttttttaaaggagattgggtctttctctgttgtccaggctagaatgcagtagtgtgatcataactcactgtagcctcaaccttctgggctcaagcaattctcttctcccacctcagcctcccaaatagctgggattaccggcatgccaccatgccacagcttgattttatcttttaaaaatagattatttcagtgtgttttttagtagggtttcaggagaatgtaattttaacatatgaatttagtctgccatcttaactcaaaattccctgtcattttttttttttttttttttgagacggagtcccgctgtcgcccagggtggagtgcagtggtgccaattcggctcactgcaagctctgcctcccaggttcacgccatgctcctgcctcagcctcccacgtagctgggactacaggcaccagccacctcacctggctaattttttgtattttttagtagagacagggtttcactgtgttagccaggatggtctcgatctcctgacctcgtgatctgcccgcctcggcctcccaaagtgctgggattacaggcgtgagccaccgtgcctggcctttttttttttttgagagttggaatttcactcttgctgctcaggctggagtgcaatggcacaatctcggctcactgaaacctccgcctcccaggttcaagcaattctcctgcctcagcctcctgaatagctgggcttttaggcgtgtaccaccacgcccagataattttgtatttttagtagagactcaccatgttggtcaggctggtacggaactcctgacctcaagtgatccacctgctttagcctcccaaagtgctgggattatgggcatgagccaccgtgcctggcctataaacttttcttttcatggcttagtcataagccgatagccattatcagattgttatggaattggcctcaaatatagaccaaatataataaaaaacaaaagacaaataccctgttcatgycattactgaaataygttatctctaatactgagaatattgaaggagttaacaacttgattttaaaatgtatttgataaacatgtctttttcctgtaatacaatgtaaagcatatataacttggaaaagtttgattaccatagtgttaaaatagcattctctaaaatagcattctstaagcattccatttacctcattcagtgaagtatttattgaacatgtattaggtatcctactaacaatrcatctgttactaagaaaatctgtgtacctgttctcatggagaatatagtctagcagggacacagattttaaagaaccaataaaaataaagcatgacattaatacataggagcatacaactgtttgacataatcttttctaaatatcaggaattctttaatacagtgaagtttagaataaatcctgaaagataagttaggtagaaggcagaaattggggaagatagtggaagaaagagcttgatacattcaaagaactgagtgtagttcactggtgggagtgagatgaagctggaaagtttacaagagactgttgtaatgggccttgcaatttaaagtttattttgagggcattgggaagacatgaaaggattttaagcagaaaatggatacatatttatagaaagatcatttatgcagtaayttaaagaactgattggagagaggtaagctttaaggtggggaactagataggagcatgttgtattaatagtgagtcatctgaggttggactaagatggtagtagagagtgataaaatgcatttcagaggtattgagaagtcttggttgtaggaggaaagagattaggaatgattgaggtggtcttccaggcctctgtcttctccgggttacatttccatgccttttaatgatgataggtaacatgggaaaaaggagaaagtttattttaaattagtagttcattttggatatacagttttcagtaactaggtaatattcaattatagctgtggttgaagctcagaagagagttctagtctagagacctggacctgaagacataattaaaagcaagtgaatttgttaagtgcaaatggrttgcacttaacagaactctgagttctgtgttccccttctctgattatgttttatttcatgggaacactgcactaagcagcacaatttctasaaccatttggggctkcttctatctcctttcatactttccctaccaacagggatgtacaattaaaatggctcagcaacaaccctactttttattccccatkatgtagggattatatatttgataggtttttccagttttgtgtrtacatttacttttttccagaaggagaacttatggattgtgatggaaaatcagaatctagtcctgagcgggaagctgtgratgatgaaactaagggagtggaaggaacagatggtgtcaaaaagagaaaaaggaaaccatacagaccaggtatagtgcctgaggtagacatttcaatatcatcaacacttkgttaattaaagaaaaatacaatactgaagacttcaattaaaattaaatattcaggcttcagaactgtctaaacaaaaawatgtgcacataaattaaagaactaaactatttgaatacgactttttagctctagagttctttattttgaatgtgtgaatacttcacaatgaatcattattgaatgccttgtcccaaatgttaaccattttattaaaggctttactagattggcttttgttcatacttggactttgaaggccatttatatagttcctctggatgtgtacttctgtaacgcttttaattttcagtattcactttctaatatctttttttgaaaaaacttatttcagtgtttatgcagkagtgccagtaagtatacagtgtgaaggggaataagacagagttattatggctcctagaatttatagtccagttaaaaaccatgactgattaaacactcatttcttatctgcctcaggagtggagagaaaagcggtcttgcytgtcagttttatttgccttattggaaaaaattattaaaattgtcacaatacagaagttgtaggcttttatgtatttatttaaaaaatttttttcccgcttwtcacacgtgttgagtagkctttccttaggcagtttattaatatcttgtttaccaatgaggttttaaattggatttgtacaatctttatgcttcttattgcttatattttattggtaagagtgatctaaatcccttttgatatggaaggaagaactttcttacttcattcgtattccatgagaccttaaaagataacctatcttttaaataggtcatatctataataaggacctamgattagttgcttctgaattgttttatgaaaatgatttcatttcttcctgatcatgaggcttataagtgtacttttttagacattgcagatttcttccaggaacttgtatttacggttttttttttcttttcctctgcctcacatggaagtcaaccctctaattgagggacccattaggtcacggagtaaattgctagacaacgatatcatttcacaaaagcttatagtgttgactgtgtaccagacctctattctaagcacttcacttatgttatttgtccttttaacatgtgtatgagaagctgctttgcctcacccccttttttaaccagtgaaagaactgaggcattgagaagtatttagtaagcagaattacatagtctgactccagattccaygctgttaaacacagggctctatgtgtcccatgtataaatgccctcataccttggagtaccagacaccgtccccctgaaatcatatcagtcaaagaatatttgtgtcatctaggtagtttgtgccttctatcctccagctaatgtaccagttagccggttaatatacagacagtcatccatcacttaagttcagagaaatacatcaytaggcattttcatcgttgcgtgaacatcatagagtgcacttccacaaacctagatggtatagcttactacacatttaggctgtatggtacgctaaattcatttaaaaaaataaagtaattgtgctacggtgttataactacggtgatgtctgtatgtggtgggaatttttcagctccattataatcttatgggaccactgccttgacatgcagccctttgttgaccaacatcattatgcagtgcatgactgttatgtgatgtatgaggcactaatatttgtcaaatagataagccagcgtaatttagtgtttgatatttacactgatactgttgagaagaggaagtgcacacaggtctttttgtattctgtttgataagygataagagtggctttgccttttttttttttttttttggtcgtttttaacttctattttacctaaaaatcaggttattgatttagattagcacagatttaattttggaaaatgacttactattcaagataaagcagttttatcctgtgtactgtggaaatgtagggagaaattayttatcagtttacctaatttcttttttggataggtattggtggatttatggtgcggcaaagaagtcgaactgggcaagggaaaaccaaaagatctgtgatcagaaaagattcctcaggctctatttccgagcagttaccttgcagagrtgatggtatagtactgacttaaaaaaaaattttttttttaatgtaaccctttggtcttgatatttctattggaaaaaactatcctaaataatgttacagtcaataagagccttattgcctcttattgttactcaataagagtcttattgccttttattgatgaaaggatttgagtkcgtatagagttcatatctgtaatacagtaatcaggttttataaggaaatggtttaaatccaatagactttattcttttgagattttttgacaagctcttttttcctgtatcaaattattaaatatattttctatatttaaatataaatggtttagggactgaataacttagttacataaggtactttctggtcatctccaaagcctttctttgactgccttagctacttatcatataatttgaaattctcaagtgacagtgcacctcagtttttatctatttatgtatctgtctgtctrtctatctatctatctatctatctatctatctatctatctaggggtctcactatgtcacccaggttggcatgcagtggcacaatcatgggtcactgcagccttgcactcctgagctcaggtagttctcctgtcctcaacctctgatgtagctggagaccacaggcacacaccaccatgcctagctaattttttggctttttgcaaagacagggtctcactttgttgcccaggctggcctgcaactcctgtgctcaagcgatcctcctgcctcagcctcccaaagtgctgggattacaaatgtgagcccagctgatatctaaaaaaaattttgtttttgagacagtctycctctgttacccaggctggagtgctgtggtgccgtctcagctcactgcaaccttcacctcccgagtccaagcaattctcgtgcgtcagcgtcccaagtggctgggattacaggcgtgaaccactgcatccagccaggagttgttttttttttttgctattggtrgtgagcaggaggtggcaagtgatggtttgtgtgaaggtgtatttcttattaaactgaccctgagctttatgcaagtcacctctggcctgtctgccttggagagaggccttaagctttgtcttctattccctattcctcgcaatgctctgaaaattggagtttgaggtcattggatttcagcaaatttcggagagcttttacttttttgcttacttctgtggttccttatttatcttaatttttgtttttcatggattccttatgttctggctaggttactggtgcctttaaaaagattgttgtaaaaaatgtttgtctatttctagttttcagaagagtcaattcacttacgtagtctggtggtagagtgcccatattgattttcagaagggatgtgccatttgccctgccattatgaagcatctgagaatatcatttgattgtttatttgtcaaatttaagctgtgttcttgtttctttgctagtttcatagtccccaaatttatttccatttctgatttcaagaataagtgttcattgcatatttattagcatattcatcgtcatgttttcacaatgtgtatatcctacaaataatttataataaatttctgaacttggaattgctgtattaaaggacacactttttctttaaggtttttgttgagtattctcaatacaccctacaaaaaagttacacccacagaatttctcttaatagtttataagttgccatttcgtcatactcatgagctttgggtatttattattattattattattattttactctttaacaaaatatgtttaaataaatacgtttttgctttgtaatcgattattaagaaaataggaaaaatgctaatactaagtagacatgaaatcaaaattttatggcacttaaaagtaacaaacttgatttgagatttttttgttcaaaaagcttgtttgtttatatgaaactgtgtgtatgttggtaaggtataaaattaccttcagtgggtttgtctagaaattttaaatgtcacatatttataaatgtgactgttgtttcaggctggagtgagcagttaccagatactttagttgatgaatctgtttctgttactgaaagcactgaaaaaataaagaagagataccgaaaaaggaaaaataagcttgaagaaactttccctgcctatttacaagtaatattttgctttacattattttacatggtttgttaattgaggaaataaaatgtattgagttttaaaacataggtttgttgtttttgttaatgttttacttgttttgttgtcatttagtcatcataaatgccatttttacctttcaggggtccataaaaattaaatttactttttttgtgtgctttgatacttgtcataaattgcttttttaataccagttgttcacttctaagcattctataagatgtaacaaggacactttgggataggaaaaactcaatcttccaagtcattgatagctatgtataccccacacccaagttctgttgaaatttcctttgccaatacaagttacattaattatattcattgattaaagataggcttttcagccaaagttatagctttaataatcgttaccacttttagaggcctggagaaccaaagatttaagcagtattctttttgttttccaaaatacacatcagaaamatacctttcagtacgaataaattatgtttgatagatgtagactacaaaaaaaatttttttctagttcatcttgtaaacattaagtcagagtttaaggccatgtgatacggaaacagctcaatattagaaattgtactgagattaaatatctggctctgcatctaactaattgtaaattcctaagcgtgttattcatccttcctggcctctatttcttcatgtgttaaaattgaactggaacagactatcattgagaggccatcctcatttcattgtagacaactattcatctgatctgttcctcctaagaaactatggcttacacagataacccttcattgcctgagttgcatttattttttacatcaattttccagttaggtattactagtttaattggttttaaaatacattgcctttcaactagcatacaacttcctcaattttcttttttgtagctactaacatcttaatggcagtattcatgttagagctcagcctataaagtcaggatttaaacaccattccactaccagttagctgtgtgattttgttctgtttaacatctcttgtgtctcggtttcctcatttgtgacatagtggtgcctctcagaaatgctcagaagttcagtgagagtatgtatgtaaagtgcctagcctgtgccttactttttgtatatccttcatacatgtttttcccctcaatctcttatatcctaggtttgcacctttgtttttttttaaacgatcatttaattggtcaggaaaaaaaatccatttataggttggcttaccttttttttttttttttttttttttttcatctttgttgttgttttctcctgggattccctttacctcccttcttaatagtcctttctaggaatattgtgatggcaacctacttttcctcctattgatccttctgtaaagtgtaatataaatttaagaagctttctttaggtgtttctgcaagtatgaaaactagccatttaatactttggcaaaagagtctttaaaattattaggtctaatttcccaattactgctgtgatcttagtctcctgggccgtcttgttcccctgttgcacatcagtaactttcagcgtgtgtgtgtgtgtgtgtgtgtgtgtgtgtgtgtgtgtctgtgtctgtatgtgtgacatgagggaggcctttttaatggtagttttcttggacttttagagacgatatggatggagccccctctttatgttatctacagggaatgtaaaacacactaaattaataagggtgacacagtttttgataaacaccagtaaagtcatgagtcattagacagaattcttgctgatgatggtgtaagatttctcagatttatactgaaggcattaaataaatgacctctaaacttctaaaacgctttctgctgttcatcattttttctaatgataaaagcattgcttattataagaaatgaatcctcttctacctggtattctagttttgtgaatttttagatttttcatagtgagatgactttttcatttaaaatgtgaacatttcaaatcagatatatcattgcctccaccagacttcacacactcccaatctcttttctcaaagggtagtattgttaataatttggcatttgtccttcagaaacttttttataatttatttttgcaaacttataatagtcttgatttgaactttctaatttttttttgagacagcctcactctgtcactgaggctggaatgcagtgatgtgatctcagctcactgcaacctctgccttctgggttcaagtgattctcgtgcctcagccttccaggtagctgggattacaggcatgttggcgcatgcctggctaatttttgtgttttgtgtagagtcaagagttttgccatgttgcccaggctggtctctaactcctgggcctaagtgaaccacctacctcggcctcccaaaatgctgggattacaggcgtgagctactgcgcccgacctgtattttataatttactgtatgtgtaattcaacttactttcttttagtaatgtattttagggctttttctttgataacatagaactatatacttttaaaaaattgttgtattttgtaatataagtgtctataatttggatagttctatgcctgttgatagacattaaggccatttttacttcttgacattacaaaatatgctacagtgaacttttttgtgcatgtttggcaagaatgtgttaaatgttgtattgcaaaattgtcctgtatggaggatcctttttccagatagactacatcataggatatagactaaagcagagttcctgggttgaagcagggtaaaggggtggaactgtgcttcccttttgtctttggtattgatttttgagaaattttggagagatcttggagttgcaaggaacccagcttgaaagtatattgaaatggaaaaatgttaatatgcctaaataaatagaaaaccacaagcctttagtagctgtaaatattgcacacatagtatggctaaactgactataaaaccgtctttcagattgatgatgtaagtagtcttatagtgtaagtgtggttatatgaatcaatagattacaaatctacctgaagtaaatattaaagccgtagatcaaagtcttatgctgtcctctgcaagtaatctataaaaattaataatactcatgaagctattctgcagtttctagaaacctttggtataattgtgtggttttatttccataattttgtctctagtaaagctaccaaaaaatcttatttttaaaataaggagaatctatataaaataattgacaggatatttctattttttaatacttctgtattcagtttctatattgttaaatataaaccttttctgttatttctgcttccttgtcaaaaaccatgacagaataatctattgtctttttagaattttctaaccatttttgtatgtgcttatcttcatctaggaagctttctttggaaaagatcttctagatacaagtagacaaagcaagataagtttagatartctgtcrgaagatggagctcagcttttatataaaacaaacatgaacacaggtttcttggatccttccttagatccactacttagttcatcctcggctccaacaaaatctggaactcacggtatgtagaattaktcacagatattttctttatatcatataacatacatcttcctttcagttaaatctttttgaaatgtttttgtttggcctcatatgcattttaaaaatcaacagcattgaagtataacttacattcagtaagtggaactattttaagtggacaggtgtataagatgtagcaaattaatttacctgtgtaactagtaccaacatcaagagttgtgaaggaaaacatttggtttacactttgctgagggcaatgtgaggggttataatttggccaacagtgactttttgactaaaaatctaagatagatttttgttaatcatacagcttaaattcaaaacagagaaaccgaaatggatgtgggggtacttgggaacttgctggcatactgtgttactacagtgaagtctgttgccctaggtcatggtttcttactgctgacagtttgcaccagtaattctttgttgtgggagggagcctttctggtgtatagaaggatgtttaacagcatctttggcctcatgatgatcaaaaatatctccagatattgccaaataccttttggttttggtgggcaaaatcacccccggttgagaaccattatcctaaatgcaggaactattaacaatcagagaaaggtatgagaacttgatgtatttacagagttacagcaatgtcagcaaggctctaggagtttaactcattgggtaggtaagtgtcttgatcagtgtttctcccacttctcccctatggttctgtcaattgtaaatcattgttcttttggtaagcttcctttttttaccattaattgcatttgttactcagttaattttataaactcattttgaaaaacaattttaaagcaatcttccactgaaaaatgactttggatgttaagtagttaatgcttcattaacttggcattatcctgaattgaaatactgacaactatttttgattttgactttttgaaataattagaagcaatcttaccccgtgttggacacatgtgcatgtccagtctgcctcattgttggtagtgaggtcatgcttcttgtttgttcaatcttacatattttttacctcctactttaattctgttgttttaagtatgacctgctcttgtccttgtcagtatgttgttaaaaataatgtataatgaaagacctgtgggtccttcaaaggatattttacgataaagtttatcttataactctcataactagccactttgaagacttaaataggagctctttgcacttgagttttaaaagcaaaaggattgaaattggacagagaacatataggaaagatattgatacaagtttttttttttctttatttatttttttccacaaaaatactgaagagagaacagttttacaataaggccaaaacttggaggactagaaaaatatacccatttcaaaacctagattaattgttctttgcaattgaactactcttttcactttataatggaaaattaatgactaaaggcttttttttaacatgtcattcattgtagcctattatatcaattttaatgatttattcagatataaaatcctttaggtaggggcaaacttgtaaaacagtctttaaaaaattagttataattgtatagtagaattccattactttaaaacaaaaaactgctatatgactcctaaaaaaattatccagattttttttcattcaactacagtgttgtcattattgaaataattttctctaaaaagttcctggatatttgggcacgcaaaacttaatgtgatatgttacatatgaattacattttgaaaactatataatgggaccaagactgtttgacagaagtatttgacctggaatattacatttatgccctcctcccccttttaagtaaaaataagcttgagatggattaaaaatttcagtttctctttactgaatgactaatataattattaaagctagcctaaacaagagttccaatagtttcttggttaagcccaaacccgtagaatcctccttgacttttctttccctttcattcatccacgtttgtgtctgccttcaaaatacgtcccaaagccgaccacttgtctcagctttccttagaaccctggtgctgtcatcacctcacctctcagactgcaccagtgcccttttctaatcttaccagcccctctctaattcccacccctcatctgctctacatatagcagccagtatgttccctttaaaatattagtcatctcctatctttcagcctcccagcaacttctcattacacttcagaataaaacccagtcttccccataatctctaaaatcttaacataatcttgccctagctgcctcttttttatccttaccacagtttttcttactgttaacactctggcctctcgttggcaaacccggcttgccccaggggctttatgtctgctttgccttagtttggagggttatctccatctttgtgcatataacttactccctcatttagttttatgctcagtcatctcctaaaggtcttcatagaccactctgtctaatacaacatccccgcagcttatttttaatcctttttccttgttttttctttaaatagcacttacagcgatgtcgtttatttactaactccccctgagaaagtaagccctctgagggcargcactttgtttcagtcattactgagtgggcaatgcctgatacgtgatccatagacacagttctgtgggtagtgaaatactttttaaaataaatgagtgagtaatcagtatgaacagcaaagctgcaagtagttactagatggtacctggcttgtgctccatatggaatttctggcttgtgctccatatggaatttctaaagagtgacaggtttgtctttcatattttaacttttcctactgtgttttaatttctcaatgtcacttttagacatgccactttcttaatgaaaaacttttttttctttgctttgtttcttacagcatttattctgtttcacttttattgcctacaggtctttaaattttgtctcaatatacattagtcacaagacaaaatcgtctgaatttttagtaaatttttgtaattcaaaacattatctcctttgctatggaaaatttttactgtaaaattaagagtctcaggtttttattccagtacttgcctcactcagtatctgctgtactctaggtttttagcaaatggcttaatatctgagaaaatactgaaattttaaaaaacatatttactatatttaggtcctgctgatgacccattagctgatatttctgaagttttaaacacagatgatgacattcttggaataatttcagatgatctagcaaaatcagttgatcattcaggtatatatgaatactgtttaccctttttctggtttctgatgtgagcgagaggtgtatgatgtgtggaacaagtttagccttttgtctgtttcccagtaactgtgtttttgtttttggctttgttaaaggactcagcattttctttgatctgcctcagctttcctgctttaggaggggtatagcaagttagttaatttctgtcgtctttctaattgcatcacatttaaggcatgttgccttaaagtcttgctgtatcttttttcttcttttgtttgtattttccctcacttcctgctcctgtggtaatcatccattttatttggtttgggtcttataggtcttgatttatgcactttccaggttgagagctcaccttttccatttggtaagaaactgagcaatggatgacggctgactagaagtagtcttctttttttatagtgatttcagctgaaacaacctgtaggtgcatgctgtttatcagtagtgctaatttgtcactaatccatactttgcttttccctttttgtgtgtggctaaagcatagtatagctgtactgtacttcgggtgactttctcagtagtttttctttaatgaataattttatttttgttaatatgtggtttacaatattacctaaatgtcgtagagctagttcctaatataagatcaaataagaacagactaaatttttactttttaatagtaataatattgagaaagcatgaaaaaaatgtagatgataaaccacttttacatgtgactcttacaaatttgagctgcagcatgttacaattttataaaatgtaatgtacataatcagaatgtgcctatagaatactttaaaaatattacctataattgaagttatttacaaaggataatattaaacactgagcattttagggcttttcattaattcatatgaaacatattcctttttacatactgtgcataataattgaactgtacatttgataacactattttccaaattaaagcaattatttgcatatcgatttctcataaactcctatcttaagcttttttttttttttggcaggagttggcaagttaaaatcagatgtattcttttattcctcaggaaatgtttttacttgaaatagaactttacatggcaccgaatacaaatatattgtgcctaatttttactgagcgactctccaaattgatatgagaattctgattcagaattacagactttatttctctattttaatcatattgttatatactaagtacaggtaaatagtgctatacatttttgtgtgagtattctgaatgtacctttaaatttattttccttactcttgtagatattggtcctgtcactgatgatccttcctctttgcctcagccaaatgtcaatcagagttcacgaccattaagtgaagaacagctagatgggatcctcagtcctgaactagacaaaatggtcacagatggtaaaatatttgccctacatctaggctttctaaaagacctgagtaaatatgatttttaaagatttttgcatggttataatttaacttctaattatttctgtcagttaaatactattttatatcagtatattgaattagtagctgttaatgtttcttttttttttttaatttattctaggagcaattcttggaaaattatataaaattccaggtaaatgtgttttgattttctagttaatgaaaatggcgttccccataccaggaccctactagtcttttaatcttgttactattattgttttatctcctagagcttggcggaaaagatgttgaagacttatttacagctgtacttagtcctgcgaacactcagccaactccattgccacagcctcccccaccaacacagctgttgccaatacacaatcagggtatgttatgactttataattctacattatattcacacacatgtgtatatatgtgggtacatatacacacacaagcaagttttgccctattctttagtagccacgtatacaaactgatagggagaaaaacccttttgtaatgattgaaaaatactgacttcacatagcggtctccctgaaattctctgtaattctgtaattatccttatgtccagtggggaggatgtaacagtgcctgccctcttccctccctgcaagtcccattcccagctcactccactctagtcatttgccacataggcacttgctgtgtgtgtgtgtgtggaactgtccccgctcacctggctgcctgtactcattgatctgccctcggtttcactgtcatctctcagaggttagctggtcaccaccccacccccatgtttttcatttgtagcatatggcacaaatataatacctgtttgggtaattatgtcttccctttagattgtgagctctttaaaggctagagttgtccatgtcttgcttatatgccctgccacagagtatgtgttcagtacatactttcatagtaaatcagtgacctttctatccctgtagacactatgaaattttgtgaatgtttgcctattttgttcatttttcttctgcctacttacaactagctaccaatttctccccttttctgtagagctgaaatttgatagcctaggattaaggtctgtatgagtagatagggaaattggtacaggtatgggaatctataggaaggagtttatggagttgcatggtggcgtgtatataactctatctatatgtatttttgttttgttttgaaacggtctcgctctgtcacccaggctgacatgcagtggtgtgaacacaactcacgtcagctgcgatctcctgggctcaagcgatcctactgtcctcagcctcccatgcagctgcgaccacagrcacacgccatcatgcctggctaattttttgattttttgcagaggtgggggtctcactttgttgcccaggccagtctagaactcctgggttcaagtgatcctcccaccatggcctcccaaagtgctgggattacaggcgtggccctctgtgcgcagctagtatatatttctgatgatttgagcataggaacatctctctctatcctattgtcactgcctcatgactataccctgaattgaataacatgaggatatcttctccttttcttgtgtaagtgccaaagtgtgtgaataatttgtaacctttactaacaactttgtatatacatgaaaattccataatgcacataatggaaatatttgtgtttttaccagtttagcctctaaacataaatttaccttgatttttgctaggctaaacatgtgatttacatttgggtaatatacttatcatataactattcttgccttaattgttcctatgtgctttttttttttcttttttttctgagacagagtctcacaccttcgcccaggctggagtgcagtggcgtgatctcggctcactgcaacctctgccctctgagttcagcgattcttctggcttagcctcccgagtagctgggattacaggtgcctgccactgtgcccggctaattttttgtatttttagtagagacggggtttcaccatcttggtcaggctggccttaaactcctgaccttgtgagccatctgcctcagcctcccaaagtgctgggattacaggcgtgagccaccgcgcccagcccccatatgctgttttaacgattaagaactattcagtatttctcttttcaacatataaaaatgacctgtctttatgttttctgaactgaaagtgcatattttaaaaatcaaagatgtatttctttataaaaaacatcttacaatcattatgaaaatcacttcattgtgcagtctcatttttaaaaggtcttgggaggatgacttctttttctttttttttttttcttttgcaaggtgttaatgtgtaatacaaggtgaatcaggttgcctacccttaggagtttgtaattctaatactgtagactttcaggtatacaactaatgtgtattatagtacagtataattcaagtacagccttgtgaatcactaagatttcattgttcttgtttgaaggaatagtagttctaatgtaagggcaaagcatgatcaagttacatatagggcgacacatagttattcaagaatggcaactttaatgttttccagagcaaagggagtgggcattgtttaaggaagcaaaactagaagtggacattggtgctgattgtaaagggctctgagaaataggcagaggcagctagccttttccctagaggcttccaagagcctttgaagaccttacaccactggtgtgatctgatcacttatgtgttttgctaaggtagctctggtgtcaatattgggaataaatttgggacgagaagaattgtactaatgaggttattgtggttgagactaagttaaaaagtaggttccatgtaaagatacttccgtgctgattgaaaggaaggaatagatacgagagaaaatgacattagaacaagtaggactgtgctactgaatggatataaggtgtgaggaaagggggaaattaaagtgaattagactatgtataaaccaggggcccagaggataatcatgaaacagaggaagacttagtgtgtgtgctggtagaaggtagtggaggtacaatgaatttagttttagacctcttttaggttggtagaaatgggacatatacactattttgacttacaggcagttgcagttagtcaaggagatggatgaaaatgtaggaattatctgtgtaattgtgctaattgcacatgtgggaaggatgagatttattaagagaatatactgccagtagagtatagaatctygaggaatgctttttaattaaatgtaattaagtatatgcttaactcatctgatttatattaggtgtgcaattacatgtttcttatctttcttccttttaaaggttaggtgaaagtaaaaaaagtggtgagagatttgagacattgagtgagaggtataggatcttggaaatgaatgatcatyagagacaggttgtacagttaagtaacatgactacttgaaaaacattgtttcattggaccatgggaaggttgttgctaatcttcagtggagtaacttcaatagaattgatgagaaaggggaggcaaagtgtaatatgttattatgtaatatgtaatatgctttattgtctgatggtaataaagttcagaaagtagagaatagaattttcaagattgagatagagtaacttgaaatacctttatgtaaaagttgtgaagtaacttttgaacttttataaactaatatgactastttgggtagatatggtagacttggaaaaaaaaaagaccacttcttgaataaaataagaagaaatactttgcttttacttatttgtccttgaacaaattatttaatttctgtgggtcctctttgcttaaatggagctgaacataataacctatttcagtgggttttcatgaagctgtaaagcttttaagacagtgcttagcatagcataaagtacttaacaaataatagctaatattactattgggaaaagtttcaatatgttaatattgtagattattacaagattattattgtaatatcggtagatggcactgatacctagctacagtatggatcacattctccttgtcaataaactcttgtttctcctaattacatgaaagacatttgatattgtttattaaaattgcacattccttaacgcagcagtccccagcctttttcgcaccagggaccagtttcaaggaagaccattttttcacaaacccaggttggtgggttggggaatggttttgcgatgaaactgttccacctcagatcatgaggcattagattctcataggaacatgctcgcatgcacacttcacaatagggtttgcgcttctatgagaatctaataccgccactgatctgacaggtggagctcaggcggtaatggtcacttgcccgctgttcacctactgtgcggccgggttcctaacaggtcatggactggtaccagtctgtggccccagagttggggacccctgccttaatggaacctgcttttcactgaagttgaaaatagatgtggcattctagtttgaaaaaagcagaaatcttgccctttaatccttggagtaaatgtaagtgtcatgagatatttgtcattgtgaaaacctgatccagtggacccagctgtggcatttagtagggtaagcccgtttgtgaaagtcagagagttctaggaagtctttgagacaaaatcttttaaacttgtcagtgatcatccttagtatctgcacatacatactggagctatgtaggctttagtgttgtaacattcaaatgatgtggtttaagtgaaagatcattatacattgtaaaatgtacgtgtatgagactttttttttaatctaatggaatgacattagataaaaaaaaatcaagtgatcaggttaggaattctctagttataccaagtattggtcaactctgtattgccatttgtgtaattaattggtgatgtggatctcctgtaatagtatggctctaagtgttgcaacaattaacagaggccttgtgtatttccacaaatcatcaagtttaattgggagggctttttgaaggtaaacaaagtttttgttgttgttgttctttcttttttctggaaactgctccaatatggacagttggcttagttccaaatagtttagacaagtagactttcacaataaggactggagttacatgcttaaaggagtgttgtaaagaarcataagatggtccttttatttgcctaatgtctattcagaaagaaaacgataaggtatttgatgtttgtgaataagctcraatgagaattcaaatgtgtttgggggctgaactgtaagttataaaaattaggccaaaaccagagtgtatgtatttttaggaataatcatctgatttttagtgatagatatattgcttactcaaaactaatttagagaaagtatcaatttaagaatcataggtggggtggacacagtggctcacacctgtaatcccagcactttgggaggctgaggtgggtggatcacttgaggcaggagtttgagatcagcttggccaaaatggtgaaaccccacctccactaaaaatacaaaaattagctgggcatggtggcaagtgcctgtgattccaactactcaggaggctgaggcagaattgcttgaacctgggaggcagaggtggcagtgagctgagatcttgccactgcactccagcctgggcgacagagtgagactccatctcaaaaamaaaaaaaaaaaaaaaaaaaggaaagaatcatagatttttttttttttttggtattaagaggaacaggaataaaatataagaaacatctgtttgtaaatttttaatgaagagaaagaatatttgataaaacttactagcatttgctgtgattcattagtgttttttaggagttaattgtgtcgaatagttactgcataccaggaactatgtttagagctgtacatacattatctcaattaacccaaataacagaatacctacggtttacagaaatagaaattgattctgcttctaacaggtaaaattgaggttcacaccctgggcttttggactccagaacacttgctatttctagtacacaataatgaaataatcacagctgtagagatcatatttcaaaatcttatagccaaaagtcactctttaagtattataaaatactgaaaaaaatcctacttttaaattgcattaaaggttttgatttagaagtataagcatctcttctrtacttggggctttggttccaggacccccaggtataaccaaaatctgagaatacagaagtcaaatgttggccctatggagcttggcatacaagaaaagttggtcctctctatgcatgggtttccctgtgttttcyatccacattcagttgaaaaaaatgtgtgtttatgtggacccatgcagttaaaaaccatgttgttcaagggccagctttacttcaactccttgttacttgtgaatatcatgccaacggaattatttttttctctgaagatgctttttcacggatgcctctcatgaatggccttattggatccagtcctcatctcccacataattctttgccacctggaagcggactgggaactttctctgcaattgcacaatcctcttatcctgatgccaggtacaagccttattttctatggaaacttaaattgcactaatttctgtttgatttatatataaattagtctgcttaaatgattgtgtatgatattattgtatgttgcgtttattgtggcttttgctataaatatgttacttttaactgttttgtaataggttttaatgaaagctatacttgaacatatattaaraagttattttatgttcataaagtaaagatatttattttttcccagggataaaaattcagcctttaatccaatggcaagtgatcctaacaactcttggacatcatcagctcccactgtggaaggagaaaatgacacaatgtcgaatgcccagagaagcacrcttaagtgggagaaagaggaggctctgggtgaaatggcaactgttgccccagttctctacaccaatattaatttccccaacttaaaggaagaattccctggtaagccatgaatatattatttctgttttaccaacattttcacatgtgcaataccttttttttttttaactgcaatagaaaggtagcttaactaatttttgtctatgatgacccacaacatgaagattccctagatgtctagaaacatcttgcattttactttgtcctagaccctgcatccatcctcatatttcccaaaaattagtttcaattagtgaaatggtccgtttttcagctcctagcagtacttattaatatgcagaaatccgtgttatgtgattctttaaaaaatttctagaacccaaactatcatttaatcaaaaatactgctaggctaaatcagtgaatcctaaatagtgtttttatgaaacgaattcaatattgtcttcccttcttcccctctcactttccctgactgcccagctattaccactgcctcttgaaaaaaacagatgataatagtacagtttgtgaaaattctgattaaccagtgaatgagaaatttggattaatgaaatgtcaattattgaatatatgcaagcaatgcggttttattattttgagttcatggtatcagacaaactaggattgaaaaagttattcaaactcagttttgcaatagtttcccagctatctatcaatacacaaactcttaaattactagaggggtacctggaagtgacttttcatttggatgacccctgtwtttaggtacctttttggattggcgtcttcatgggactttattcattatgtattgtaataaatgaaatgctttttatctaacaatagaaatcagtggtttgatgcagggagacctgtgaaggcagtatcccattcttcagccactttctttccatgcttacatttgctgtttatgaacgtacatgggtatgttgtcattttgtgtcagcacaaattgtccttacagcagagctgtaacttttttaaaagtaattttctttaataattttactttgtgattcaagaacctcatgaaatactgtgttaaagctgttggtctgtgaactgatttttcattttcattggctttttggaagcttgctttctttttgtaatgtggaataaataatttctgtatttatcattaactgttgatcttacccaggcttcttcattttgtataccgtcatgacactgagtttcatataaatggtttgaactcattacttttccatgtgtttgttgtccacaaatgctagtgagatgcttatttatgactttgtttacttctggtaggtcaaattgatagatttctgtttagcacagatgttttacaaacttgtactttggttctggtggtgtcttaccaccagagggaatttattatgtctggcttgcatttttgctactttgtcccttgaatctaaaaacttcccaactttacaagctacgttgttaataaggcagcacttcatttagaaaacgtttgtttggcctacagtgtgccacgatctttgttctttgtaaaaaacttaatataggtctatgacctcatgagaatacggcctgaataagattaactgtcagcagttcatcaacattctttattacaacacatcattagcatggctctgagaaagtgttatactctgttcttttgttgcagattggactactagagtgaagcaaattgccaaattgtggagaaaagcaagctcacaagaaagagcaccatatgtggtattttaagaaactcctctatcttttaaatatttaaatacagtgcttgaaccttatttgtattaggttaataaaaaacaaatttccatttcagaaaatgcttgttagtacctgtacaacaagcaactttatttttaaagtgattttctaactccttatgtcttaatagagagtgtgacatttttataagcaagttaatagaaccaaaacgttgaagattgaaaatcagctrttttaggggggaaggagtaattcatttcactttaaaattgttttatctcttcagcagaggtacagttggccgtctgtatccatgagttctatatctgtggattcaaccaaccatggatcaaaaatattttggaaaaacatctatactgaacttgtacagactctttcccttgtcattgtttttaaaacaatgtaacaacgatttacatagcatttatattgtgttaagtattacaagtaatctaaagatgacttaaagtatacaggaggggccaggcacagtgacccacacctgtaatcccagcagtttgagaggccaaggtgggcagatggctttgagcccaggagttcaagaccagcctgggcaacatagccaaaacctcatctctataaaaaatgaaaaaattagctgggtatgatggcgcatgcctgtagtctcagctacttgagagacttgagaggttgaggcttcagtgagccagaattgtacgactgcattccagcctaggtgacagagcaagaccaccctgctaggtcaaaaaataaaaagggagaaagtatacaggaggatatgtgtaggttatatgcaaatactgtgacattttctataagggacttgagcatctgtggattttggtatctgcagggaatcctggaaccaataccccatggatacagagggacaactgtactaaatttggagactggattggcatgcctcagtgtcttccacagtcacctcttttcttgttaggtttcatagagaatctttgtgcatcttgaaagagaaatatttagacatgtttaaagagtttttgacacatgatctttgccatgaactattaggtaattttataagattcgcagttcatatggtaaattattttctcccaaagagccaaattaagattgtcagctggaaccaaatccttgctttcgttttaaagcatattaaatctgtattattgttggaaaatatatatagttattttccagcttgttccccagtgcacatattttcagttacagtgattattttggatagagcatatatgtgtgtatatgctctatcacatatatatatatagatgtgttaatatgctgtgttttattttgacttgaattaggtaatgacagaatttttaaatttttaagtgatttctttaatgatacgtttcaaatatccagatttttttttttttaagactgattggatatttttccttttttctaaatttttttttttttttttttgagatggagcttcacagttgttgcccaggctggagtgcaatggtgcgatctcggctcactgcaacctctgccttccagattcaagcgattctcctgccccagcctcccaagtagctgggattacaggcatgtgccaccatgcctggctgatttttctttttctttttcttttttttgagacagagttttgctcttgttgcccaggctggagtgcaatggcgcaatcttggctcaccacaacctccgcctcctgagttcaagtgattctcctgcctcagcctcccgagtagctgggattacaggcatgtgccaccacatctggctaattttgtatttttagtagagatggggtgtctccatgttggtcaggctggtgtcgaactcccgacctcaggtgatccacccgcctcagcctcccaaagtactgggattacaggtgtgagccactgcgcctggcctaattttgtatttttagtagaggtggggtttcaccatgttggtcaggctgatctcaaacacctgacgtcaggtgatccacccgccttggcctcccgaagtgctgggattacgagcatgagccaccatgcctggccccagccccttctttctaaattgaaggagacataatttctaaggatatgttaagaaaactaggagctaaaatattaaatcacacctaggatctttaagcttaattcaaatacatagaaatatatcctcaactgataggtactatgcactgtaaagagagaagatgagttagtgtccagatccttttttgggaggtgccgtaagtatttcagctattttacctgacttttttttcttttatttgagaaagttcatgatagttttattttattccttaaaacatttaacataatctgggaaatttttttctcttcttttgtcaaagcaaaaagccagagataacagagctgctttacgcattaataaagtacagatgtcaaatgattccatgaaaaggcagcaacagcaagatagcattgatcccagctctcgtattgattcggagctttttaaagatcctttaaagcaaagagaatcagaacatgaacaggaatggaaatttagacaggtatggaatttttggataatctactttttgaagttgcatttttgttttgagaagggaggtctttgcattattattttagaatatagttcttagaccatgaaaatttgatttaggatagacttgtttctcttttcagtaaaatatatttaaattgatttgagaaatttattgaaatattataaacaatatactgccctaggcacaaatggaacataccatgatgagtaatttctcttcttcaggaattcataatctaatatgggagcaatctggtagcgctgacatcaaacaaattaactttctgttgctttttccccccatgatggtagttttcttccttaacctaaatatgattgctttttcttttctattttaatagcaaatgcgtcagaaaagtaagcagcaagctaaaattgaagccacacagaaacttgaacaggtgaaaaatgagcagcagcagcagcaacaacagcartttggttctcagcatcttctggtgcagtctggttcagatacaccaagtagtgggatacagagtcccttgacacctcagcctggcaatggaaatatgtctcctgcacagtcattccataaagaactgtttacaaaacagccacccagtacccctacgtctacatcttcagatgatrtgtttgtaaagccacaagctccacctcctcctccagccccatcccggattcccatccaggatagtctttctcaggctcagacttctcagccaccctcaccgcaagtgttttcacctgggtcctctaactcacgaccaccatctccaatggatccatatgcaaaaatggttggtacccctcgaccacctcctgtgggccatagtttttccagaagaaattctgctgcaccagtggaaaactgtacacctttatcatcggtatctaggccccttcaaatgaatgagacaacagcaaataggccatcccctgtcagagatttatgttcttcttccacgacaaataatgacccctatgcaaaacctccagacacacctaggcctgtgatgacagatcaatttcccaaatccttgggcctmtcccggtctcctgtagtttcagaacaaactgcaaaaggccctatagcagctggaaccagtgatcactttactaaaccatctcctagggcagatgtgtttcaaagacaaaggatacctgactcatatgcacgacccttgttgacacctgcacctcttgatagtggtcctggaccttttaagactccaatgcaacctcctccatcctctcaggatccttatggatcagtgtcacaggcatcaaggcgattgtctgttgacccttatgaaaggcctgctttgacaccaagacctatagataatttttctcataatcagtcaaatgatccatatagtcagcctccccttaccccacatccagcagtgaatgaatcttttgcccatccttcaagggctttttcccagcctggaaccatatcaaggccaacatctcaggacccatactcccaacccccaggaactccacgacctgttgtagattcttattcccaatcttcaggaacagctaggtccaatacagacccttactctcaacctcctggaactccccggcctactactgttgacccatatagtcagcagccccaaaccccaagaccatctacacaaactgacttgtttgttacacctgtaacaaatcagaggcattctgatccatatgctcatcctcctggaacaccaagacctggaatttctgtcccttmctctcagccaccagcaacaccaaggccaaggatttcagagggttttactaggtcctcaatgacaagaccagtcctcaygccaaatcaggatcctttcctgcaagcagcacaaaaccgaggaccagctttacctggcccgttggtaaggccacctgatacatgttcccagacacctaggccccctggacctggtctttcagacacatttagccgtgtttccccatctgctgcccgtgatccctatgatcagtctccaatgactccaagatctcagtctgactcttttggaacaagtcaaactgcccatgatgttgctgatcagccaaggcctggatcagaggggagcttctgtgcatcttcaaactctccaatgcactcccaaggccagcagttctctggtgtstcccaacttcctggacctgtgccaacttcaggagtaactgatacacagaatactgtaaatatggcccaagcagatacagagaaattgagacaggtaaacacattgtatgttctcagttttaaatgtattatttgaggaagctgttcatttcatcaaactgagtaatttctacacaggagttaatgttttattttttttattctgtagagtttgtcatactgcaaaaaagaaaaatgaaattgatgaaattaacaccagtttaatttattctgtatctgatttcagttttcacgaattcgcaggggaatccttaaatattaaagctttgttttgtgatagttgtctggcaaggaaaaggacccaaatcatcaaattatttttcctaatatattgaatagttaaatgtaactggtatttcatcaaactttgaaacattaccatagccacataatgaaagtatcaggatttaaaaagccactaacctgtcaggcacrgtggcgcatgcttgtaatcccagctacttgagaggctgagacaggaggatcacttgagtccaggaatttgaggccagcctgggcaacatagcaagatcccatwtctaaaaataaaaagccagtaacctttaaaaagccattaattaccacaaatcccagtgatttttgtttcttcccatttagcggcagaagttacgtgaaatcattctccagcagcaacagcagaagaagattgcaggtcgacaggagaaggggtcacaggactcamccgcagtgcctcatccagggcctcttcaacactggcaaccagagaatgttaaccaggctttcaccagacccccacctccctatcctgggaacattaggtctcctgttgcccctcctttaggacctagatatgctgttttcccaaaagatcagcgtggaccctatcctcctgatgttgctagtatggggatgagacctcatggatttaggtaatgcttttaatttcctgccgaatttaaattgctattagaagagggaaacagagctgggtgtggtggcttgtgcctgtaatcctagctactagctgaggcaggaggattgcttgaggctaggagtttgagaccagcctgggcaatatagtgagaccacccccccccccccaacctcttcaacaaatttaaaaattttttaaaagaaatagacaaatgaagttagtattaatcaggaagctgttactgctttctacttctttctcccctttgaaatatatataatctgctatttagtgctaatgagaggtcatagacatttttttcctctaagaactctacagactctgaaaacattacctttgtttttaagtattaactgtgttagcattaccttgcacccttaatgatgcagtttatcatatgacatcctcaaaatgtagctattctgcgtaggcaaagcctcctacgatgtgatgagacttgtcctctctccaaatttctaccttttaactttacattctaaattaattttaggctgggcgcagtggctcaggcctgtaatcccaatactttgggaggccgaggtgggcggatcacttgaggtcaggagttcgagaccaacctggccaacatggtaaaaccctgcctctagtaaaaatacaaaaattggccggctatggcggcaggcactgcacctgtattcgcggctactcaggaggctgagacaaaaggatcacttgaacccaggaggtggaggttgcagtgagccgaggtcacgccactgcactccagcctgggagacagaacgagactctgtctcaatttaaaaaataataataataaattttagagatttccgaactgaaaggactttccctttaggaactttccatggtgagatagggttgtaagttagtggtgatgaatcataagaatgtttcctttttcaaagtggctaaagtcaaagccaaacctatgccctagttataataaggaaatagttctttaagatatgctttttagttttatgtcttttagtcttatatctctacctccatgttatattcttttagtttccttttcttctaccttagttgtaatttatgcctctttctgcattttatattttgtgtaagttgcctgtaatcttactcttaatttcccttttttcttccaccttgttataatttatgcctcttgctatgctttgtattctgtgtaagttgcctgtaatcctgtctagaaggaagtacaatataaaatagtccaacaatttatacatttacttaatctttatagatgaggcctacttgtccttttctctaagtttattctatcccatcatcaaacctgtgcctttgtagtctcatgtactgaggcctgtaagtccctcaataggtatgaagacctatcttcattcaaacatcatccccgaatcagcttcctccatcgaacctccctaaatatagataaaagaaactcttcctgaaaaagtccagtagtattgttcttatctctgaacaattgatttcatctgcttggttgttcttcctttgtcttcatttttgttatctgttaaatcttaagcctttagagctcagatatggtgttcattataggattcttagcaaaatcttacttgcatatgaatactgtaaatactttttaatggtgatagctttgcttttgtaagtcatagtatttggcaacattttgtatgtacagtttaattgaagacttttctttttttcaasttaactctaaatttaacataatacctatttgcttttttttttttttttttttttttttwaaaagatttggatttccaggaggtagtcatggtaccatgccgagtcaagagcgcttccttgtgcctcctcagcaaatacagggatctggagtttctccacagctaagaagatcagtatctgtagatatgcctaggcctttaaataactcacaaatgaataatccagttggacttcctcagcatttttcaccacagagcttgccagttcagcagcacaacatactgggccaagcatatattgaactgagacatagggctcctgacggaaggcaacggctgcctttcagtgctccacctggcagcgttgtagaggcatcttctaatctgagacatggaaacttcattccccggccagactttscgggccctagacacacagaccccatgcgacgacctccccagggtctacctaatcagctacctgtgcacccagatttggaacaagtgccaccatctcaacaagagcaaggtcattctgtccattcatcttctatggtcatgaggactctgaaccatccacyaggtggtgaattttcagaagctcctttgtcaacatctgtaccgtctgaaacaacgtctgataatttacagataaccacccarccttctgatggtctagaggaaaaacttgattctgatgacccttctgtgaaggaactggatgttaaagaccttgagggggttgaagtcaaagacttagatgatgaagatcttgaaaacttaaatttagatacagaggatggcaaggtagttgaattggatactttagataatttggaaactaatgatcccaacctggatgacctcttaaggtcaggagagtttgatatcattgcatatacagatccagaacttgacatgggagataagaaaagcatgtttaatgaggaactagaccttccaattgatgataagttagataatcagtgtgtatctgttgaaccaaaaaaaaaggaacaagaaaacaaaactctggttctctctgataaacattcaccacagaaaaaatccactgttaccaatgaggtaaaaacggaagtactgtctccaaattctaaggtggaatccaaatgtgaaactgaaaaaaatgatgagaataaagataatgttgacactccttgctcacaggcttctgctcactcagacctaaatgatggagaaaagacttctttgcatccttgtgatccagatctatttgagaaaagaaccaatcgagaaactgctggccccagtgcaaatgtcattcargcatccactcaactacctgctcaagatgtaataaactcttgtggcataactggatcaactccagttctctcaagtttacttgctaatgagaaatctgataattcagacattaggccatcggggtctccaccaccaccaactctgccggcctccccatccaatcatgtgtcaagtttgcctcctttcatagcaccgcctggccgtgttttggataatgccatgaattctaatgtgacagtagtctctagggtaaaccatgttttttctcagggtgtgcaggtaaacccagggctcattccaggtcaatcaacagttaaccacagtctggggacaggaaaacctgcaactcaaactgggcctcaaacaagtcagtctggtaccagtagcatgtctggaccccaacagctaatgattcctcaaacattagcacagcagaatagagagaggccccttcttctagaagaacagcctctacttctacaggatcttttggatcaagaaaggcaagaacagcagcagcaaagacagatgcaagccatgattcgtcagcgatcagaacygttcttccctaatattggtaggagttttcttgagtctcaacgtatattactatgggtattagagtggcatgcgatatgcttataagattttattattagaattacagttggaataaagcactgagtttttctattcctccttgaggagtttgtttgttttgttttgagacggagtctcactgtgtcacccaagatggagtgcagtggcgygatctcggctcacagcaacctccacctcctgggttcaagtgattctcctgcctcagcctcccgagtagctgggwctacagacacgtgccaccatgcctggccaatttttgtatttttagtagaggtgcggggtttcaccatgttggccaggctggtctcaaactcctgacctcaggtgatccgcctgctttggcctcccaaagtgctgggattacaggcgtgagccaccctgcttggccctccttgagctttagaatgaaagcagttggctgggcacagtggctcacggctgtaatcctagcactttgggagaccgaggcagacagattgcctcagctcaggagttccagaccaacctgggcaacacaggacatggatgaagctggaaaccatcattctcagcaaactaatgcaggaacagaaaaccatacactgcatgttctcactcataagtgggagttgaacagtgagaacacatggacacagggaggggaacatcacacactggaacctgtcggggggtggggggctaggggacggatagcattaggagaaatacctaatgtagatgacgggttgatgggtgcagcaaaccaccatgacatatgtatacctatgtaaccagcatattctgcacaagtatcccagaatttaaagtataataattaaaaaaaaataacaaaaaattagctgggcatagcagcgtgcgcctgtagtcccagttattcgggagacagaggcaggagaatggtgtgaacccaggaggcggaagttgcagtgaggcgagatcgcaccattgcactccagcctgggggacagagtgagactctgtctcaaaaaaaaaaaaaatgaaaacaacgaagagttttagattctttccaggtaaattaagagattcaaaactgagttacaaacttccctcaattctattatttatggaattgtttaatagaaactaattgtcttcttagttcctacattccaaccattgttgccatatgttttcagtcatggaaggatgaatttaagaaaattatgatggaaataaagcttcttactgtccttttgtgtatgacaaatgcttggcgattttttgctatataaacctctttaacttgtttctaatggtttactgattctaaaaacaacaaaagcaatgcagtcaaaatgcctcagtgcctctaagaataagaattagcaatcaaagggcacgtgtctaagcagtgtgccttattctaaataataaaattgacattccattttatatatccccaatttcatcattttgctccctttttttcatttagatgcaaataggttttttcgtagtagcttcttattgagaggttatacccttaagaaattggtgcatttttcttttaagagtgataactaatttagtagaattccttagtattgcaaattcttatttgtgatgttatatttactaaagaagccattctgattagcattgcaaaagtttggatgaaaggaaattaattgcattgctttagattattgcttataatctcccttaaacttgactttttgttttaattcctgcaggactaaggtattaaagcatgattcagttaaggactactgagatgcgattaaacccaggataaggttgccatctcagaaatctgtaatgattattaaataataaaatttaagagcttgtaatatttgaattacttcttagtgtaygttgaactaattactatgaaataagtaactttatatttcttttctagattttgatgcaattacagatcctataatgaaagccaaaatggtggcccttaaaggtataaataaagtgatggcacaaaacaatctgggcatgccaccaatggtgatgagcaggtaggtggagtggctgcttgtttctactgggcatctagacattcatgaaatcattactagtttttagaaaaaacatacagaaaatggaaagcccttgtctaggaatgaacaacactatttaagttgtcatggcatcagctcgatatgatcagatacaaaatgctataccaatttaagaaattagtgtaagaaccagtttaagagcattagtctcaaggatggtaaatgtaaaacatcttaaaaagatttggaagattggatttcctgattactcaagtcaaagtatttaggtctgtgctcttttaaatacctttagaattgttcatgttatctaagatttttttcagttaagacactgagtgattaaagcaattataaattcagttctaaaataaaatgttcccaaaccggttttgaatcagaaaaagaaagttacaaggaatagataagaggacagttggaagttggagttacagagtttgtcttttctctcttaggagaaaaacagaaattacgcattaaagaagacagtaggggttatttcaatatctgaatttttgaaattatgccctctaagggttgttaaccacatggcactgtttcttaaattttgatcatggaccaccatgagaattatggggtaatttttttaaaatgcagattattttgctctactgcagacctactaaataagaatatctggagatggttgcctgtgtgtctgtatttttagcaagcgtcatgaatgagtcttacgtgtattactatatgagaacctctgtcaataaagtaagcatagagcctcaatttagtctagttatcttgttgaaaaacttttatataaaaaatgtggatgattatagaattgaatataaaatttgcacgaatttaagatgtatatatttcaaagaaatttgaattcttaagggtataattcttttcaattgttgagatactttggacatggttaagaagcatttttgagatcaaagtagagatagtggtttccaatgattttcattattgagcaatatttattaacactatttctctatcatagagattcctaactgttttatgtcttgaatatttttggattccagtgaagcctttgaaattctcagaatgttttatatgcagaaaatttaagacatagcattacgaaggaaatgattatacttgaaatatagttattaaaatataattaaatttatgtatatatgttccttaaagtattaacaaatttagcaataaaccataatttgaaagtaatgatgaacataactaatctattaggtgcctgcaacactcgataggaaaataatctgtcttctattggtgatagtcgtggtacttgctaataatattgtagtttctatgtatattcaaaacaaggaaatgctgagttttatttactacttagttttgttttggtttttgtttctgagacggagtttcgctgttgttgcccaggatagagtgcaatggctcactgcagccttcacctccaaggttcaagcgattctcctgcatcagcctctggagtagctcggatcacaggcacgtgccaccatgcgcagctaatttttgtatttttggtagagacagggtttcaccatgttggtcaggctgttcttgaacttctgacctcaggtgatccacctgcctccccctcccaaagtgctgcaattacaggcatgagccactgcacccgaccagcacttagttttaaatatggacctcagaatttgaggcctttcagcatctgatgctcttttagcatcatgcatctgccggttagatacattagtcatgtatcaggtatatggcttagtattctactgactgctttttagaaatggaagtgatagtcccttcttagagtagtgtgatatgttgagttaggatgatagaccatgtgtgatattcagattagaagatcatttagaccagacctgtagcagtgggtagggtgacagatcaatgaaaaacctgagtaaaaaatttaaaaacatattctatatcctaatagtacttaaatagtaatatacagcttttggaatacatttttaaaattgtatgtatatcttgatacgttaaagcatttgataatgccagaggaaatactttcatgtaagcagtaatgcttctgtgaagtttttatagttttaattagaatgagtaacatttctctaaacacgtttaaccatgcagactgatcttggtcagtcgtccatttttgatttgctttaacattagatatagaaatgtatgaaaatgtatgaaaattcttaaattgggaaatgtcttttgttttagaatataaaataactaagctctcaattagtttttaacacagactggaatgagaaaacatttccttagagttcgttataaaactaaatcaacttatttttattctgaagtcttgaattcattttatcgtaaagtggagtgaggcacataatagagtaaaacctctagagtcagcctagctggcttcttattgcagccctactagtccttgtggggaaggttacggaatatctctgaatcttactttcatcataagtaacatgagggtgctaagagcacacttcatcgaattacagtgaggatcacatctgcccagtacatgaaaggtagggctttagtgttttgatgaagaagaaattgccactgttcttctctggaagagaaaactgttaagcacctaatacagtttttaattaatattaataatttctaaacgctcatcacttgatacttgtgtaccctgttttgacaggttcccttttatgggccaggtggtaactggaacacagaacagtgaaggacagaaccttggaccacaggccattcctcaggtaacactgcctgtaatgagtccctctagaatgcacgcttttctgtttcccagcaaactcatgctttagagtaagtcccctgctagagagtagtactaggtttgtgcagaagtaaatgcggatttcaccatatgccatttgccagtggcaaaaaccgcaattactttttcaccaacctaaatagtagccttatctatcagcacagccaaaagtaaccaaaaagacactttactgctttttaaacaaaagacaaattaaggttaaaaaaattggctgtgatttctgaaaaggatttatatacttacgggtaaaaagtcacttgatggcaaaaccacacgctcaggacttttggttttatttttatttacttatttttaactccagaaggacattttcatgtcctgcattttagaattaaacccattatatttaaaatgtaaaacttctataaatactagaaaatggctgggcacggtggctcactcctctaatcccagcactttgggaggccgagatgggcaaattatgaagtcagcagtttgagaccagcctgaccaacgtagtgaaaccccgtctctacaaaaaatacaaaaattagtcaggcgtggtggcgcacacctatagtcccagctacttgggagactgaggcaggagaatcgcttgaacccgggaggcagaggttgcagtgagccgagatcacgccactgcactccagcttgggtgacagagcgagacttcatctcaaacaaacaaacacagcaagtagaaaacaatatgctatatttgttttttccttttttcttcccatccttgttgaaagatatgctatatttttaatataatatcaagcagtatctggggaagtaaaactcatgcagtatttttgtcagtgattttttttttataaagggagctacctactataatgtatgtcctgttttcttccttgccctgccagttatgctttagatttattatgctgataattatattcttctcattattaaaagaggaaacagaagccatttgatataatgggaaaagcatagcctttatagctgagtttttttaaagaaattatagttccactatgaatttactgtgcaactttgggcaaattctttagcctcttgttttttaatatgtcaaatgttaaaccaactgctttgtagtattgtgaagattgcacataatacattctggctgctagtataagtttataattattaccttgtatacagctcatgttaaggagaacttgtgacaactggataaacatttttcaacattaatttgttaggtgattatcagggacttgtgagattaataactgcttgttcagtcacctggaagaaataagacttttaacttgaaaataaaacgaattaaatactttttatttattttttttatttttttgggaacaggatcctgctgtgttgcccaggctggcctcaaacacctgggctcaagcgatcctaccacctcagcctcccaagtagccgggactacaggcgtgtgtagaaaataagactaatatttttattaacgtatttttcttttatatttgtgcatgttagagacattagtttttgttataaataaccatgctgtggagtggcatttagtcaatctggaacttgtgtttgattgaagaagaaaccaggtaaacttcatcaaaaagtgagattttttatatagatctctcgcttagtattagcagtaattgatttgccctgtattatatttctgatgaataatcctttacctcaagcataattgttttcagccaaaatctagacagtatagtagttcagagatagtaataagaattcagaattaggttgccaccactaaattcactctactttttataaaaaaacctttaaaagatatcttaggaaattaaagggttttttcttccatttctttttttctttctttcttttaaagttttttcccccctttaactgaaatgtggaataaacatatttgtaaattttacttattttaggatggcagtataacacatcagatttctaggcctaatcctccaaattttggtccaggctttgtcagtaagtataaatctaataagttaatgttttctggggattgcttgtctgcactctatgtgtgctgttctaaacctgaagtgagtgtaggtacaccagttcaagcccaggtgccctcctgtcttattaaacatcactgccctattaggcaactcttcttcaaggcgtgtgttttcattgcttttttcactgtgcatgaagaattatagttacagaaaagtattttaatacagaaaaaccatcttccccattctcttcaatattgttgctgtttttgtatacagattgggcactttacagtctatagaactaaaccacgttttgctctaagaactgtcttcctaagtgacaaggacactaaatgggaaaaacaaagggattatacttagcagtaagttgggttagcagcatggtgtaaaggtcaggtatgcaaggtgcccctgaatcctttctagttatttgcaggggtcccaaggtggttcaggatagtgtttaaagttctccccaaactgaacctttctgaaatcttcagactgtttagctaacttttttttcaccattatttttcattttgctcacctctgctctcctggttccagaaaccagaaaggctttccttgcggtaggtctcattctaccagaagcagaacttctgaaatcttgtgaaaaagcctgttcttaaaaaatgcccttcaaatttagtagactagatttcaagttcatacatgtactggaacttctgggtttaggaacaaacccaaagtctgaccttttgaaattccccctacattaattgttactataatttgaatacatatttgcattaaaaacaagtaaagaactataccaactggctttttctggctttattgtgcccattggctttggttggattcttaatgtatgacaatattctgttatcattgatgttattttcagcgaatgtccttcttagaaatgtatttattcatttctttgtcttgtagtgagtcaaaaaggtatattcagaatttcactacatacgatgactttttttttttccccttggactgggtatcaatgaagtaaagtgcccttaaagaataaagaagagaatattggtacaaaatgaagagatatagccatttggggagaattactggcagttgtaaaagtagaaaatgttttgcttgsttaactattccctccccttattttaaaaaatataactacagaataataattaccaatgttttcaacttatggatttcctttataagtcatagactttaaattattccattctaaaacattctgggttccttttctctctgtttaggatattttttcattattaagaaataggaaagaacttataaactcaggaaaattaacatgggaagtgatttcctagtctatgcrctagaccttaatgggatatgtctttgtctcttcaaaatctgtaaaatcgtattcataaaatgcatgtataccttagtatgtagtttggcttgtgggttagagaatttgtttagtaaaaaaaaagaatttcattacataagtctgcttttccaagattggatttgtaatatttataagtgctaagttaaccagtatctcaagaatgtgcattctctggctttctcaattaaatatttttctaaaatctgatattttatcattacataatcgtctaatatttagtattgtgttttcaaatttcctattatgtggtcatggtgaaactacttccttacaaaatagatttgtgtaacttataatgttggactctttagaaaattaacacaactgaattttaatttttcctcagatgattcacagcgtaagcagtatgaagagtggctccaggagacccaacagctgcttcaaatgcagcagaagtatcttgaagaacaaattggtgctcacagaaaatctaagaaggccctttcagctaaacaacgtactgccaagaaagctgggcgtgaatttccagaggaagatgcagaacaactcaagcatgttactgaacagcaaagcatggttcagaaacagctagaacaggtaataaataggtttgcaaaatagaaactaccaacaattaatgagtagaatgttttggtgtgttgttcattagtgactttgactagtgattttttttgactagtattaaatggcattaaaagtacattgccaaaaagtgacagctctgagacctcttagtaactgcagccataacagctccagtcttttacttaaagtgacggtcacagcacatactaaataaatgacacaaaagagattgagtctcataatttcgacttcgaagaactattttcaactttggtatagttggagacgttatttttttctgcactaagaaatcactgcaaagaccatgtttctgttatacatcattgagagtattcgacttaactgaggaccgagctcatggggagatactgggtttagtttggaataagaattgggggcccagggagtatttttgtttacttggagttgatattattattatttcttaatgttttggtcttaaaatacattggtatgtcttatgtgaagtactgttccagaaaaatgaaatcattttgccattatcttctattataaaccagaagtttatcagaatatttaaactgaataatatactggaaaagaagaaacatgtaaaaattgtatttaaaataaaacaatagtagtgtacaaaatgggttcagagccaactcctaggtatatttacccaagtaaattaaaaacttaaggttcaggccaggcgtggtggttcatacctgtaattccagcactttgggaggccgaggtgggtggatcacttgaggtcaggagtttgagaccagcctggccaacatggtgaaaccccgtctctactaaaaatacaaaaattagctaagtatggtggtgtgtgcctgtaatcccagctatttgggaggctgaggcaggagaatccctgcaccaaggagtcagaggttgtggtgagccgagcttgcgccactgtactccagcctggcgacaaagtgagactccatctcaaaaaaaaaaaaaaaaaatgtgagtgctctataatgaacactgtaggaagcacttccatttacgttgtcttatctacatctttctgaaggagttagtattatccccattttacaaactgattcattgtaaaggttataaacactgtgtacacgtggccaggcacggtggctcacgcctgtaatcccagcactttgggaagccaagacaggcggatcacctgaggccaggagttcgagaccagctggccaacgtggcaaaactcgtctctactaaaaatacaagaagttagccaggcatggtggcaggtgcctgtaatcccagctgcttgggaggttgaggcaggagaattgcttgaatccgggaggtggaggctgcagtgagctgagattgcaccattgcactccagcctgggcaacaagagcaaaactcttgtctcaaaaacaaaacaaaacaaaaaaaatcccaaaaaatacccccactgtacatgtttgcttataactattagattagggatttggactcacgtgtcttatcttcaaaccacagctaccacaataatgtaccaacaataaggtgatcataattccagttgtttaaaactaggattattccagaatgaaaggtttcttttctctttaaatctactctctgggttcatgtttactgtaggttaatattcttgtaaagatatgtttaataaagtatattttttttagcactttcattgccatctggcatatttgtacaaggtcttttgatgagggcctaatttttgcatatccatagatcaaatcctatttagaagctaatacttgaaaaatgggatacatcatctattacatagttgccaaagatccagtataatcatattaagataagcagttgatggtaatgttttaaaaagtattataaaatatcatgggaaagacatggatgaccaccttatatatcccacatagtgttgtaggtgctttctgtactttcttactacttcaccaaccaatggtaatttctcagttctaaccagtaaactggccaggaaaaataagaaaataggagttacacaactgttgaagaagagatgaaacacgattatttgcagaaagtattagtctacctggggaacccaagaaaatactttgaaaaactattagaactcctgagtttagtatattaatatttatctaaaaattgaatgatgttgagagatatacacatccttttgcattccttctttccctagcttgctgaatgagatggtgaggttctccagaacatagtttgcgtcttgattgatatctggcctgtagtattgagcacattgggacacaaaggtttttggaatgaattaattaattgatattagccattatattaagagtctatttacagactattcaaaatacttcctcggagcttgtatagatttcagaaattataatttgagtgttagccattaaattgaaagtgttcaacaaatttagtctttttaatctgggtggggggtgtgatattcgtgctggtaattcatcttgtcttaaaatgttgtacaggccgggcgcrgtggctcacgcctgtaatcccagcactttgggaggccgaggcgggcggatcacgaggtcaggagatcgagaccatcctggctaacacggtgaaaccccgtctctactaaaaatacaaaaaattagccgggcgtggtagcgggcgcctgtagtcccagctactcgggaggctgaggcaggagaatggcgtgaacccgggaggcggagcttgcagtgagccgagatcgcgccactgcactccagcctgggcgacagagcgagactctgtctcaaaaaaaaaaaaaaaatgttgtacaatttatatatttaagaaatgaaatcttaacatttaaatggttcaagtttgagttaagtctgttattctaacattgtatattgtaatttctaggacatcaaaattagctgcttgtgtaaccttttttattgtatattttttatgtatagtataaatagtatatatgagtttcaccataagattttaatattttactaaaccgtttttgatatttcatatgtgaagcacttttacagataactttataaaaatcctgttgttaaagagattgacagttgttagttaaggcttatcaattcaatttttttgtgacttttgcagttacccaagcaaaatatgtttgcttctgcagggccaaactgccctctgtgtaacctcaaccacagtcatcagccagtgttttacttcagtacctatgctgtatagaaatgagtaatgatgcattttgttattccagattcgtaaacaacagaaagaacatgctgaattgattgaagattatcggatcaaacagcagcagcaatgtgcaatggccccacctaccatgatgcccagtgtccagccccagccacccctaattccaggtgccactccacccaccatgagccaacccacctttcccatggtgccacagcagcttcagcaccagcagcacacaacagttatttctggccatactagccctgttagaatgcccagtttacctggatggcaacccaacagtgctcctgcccacctgcccctcaatcctcctagaattcagcccccaattgcccagttaccaataaaaacttgtacaccagccccagggacagtctcaaatgcaaatccacagagtggaccaccacctcgggtagaatttgatgacaacaatccctttagtgaaagttttcaagaacgggaacgtaaggaacgtttacgagaacagcaagagagacaacggatccaactcatgcaggaggtagatagacaaagagctttgcagcagaggatggaaatggagcagcatggtatggtgggctctgagataagtagtagtaggacatctgtgtcccagattcccttctacagttccgacttaccttgtgattttatgcaacctctaggaccccttcagcagtctccacaacaccaacagcaaatggggcaggttttacagcagcagaatatacaacaaggatcaattaattcaccctccacccaaactttcatgcagactaatgagcgaaggcaggtaggccctccttcatttgttcctgattcaccatcaatccctgttggaagcccaaatttttcttctgtgaagcagggacatggaaatctttctgggaccagcttccagcagtccccagtgaggccttcttttacacctgctttaccagcagcacctccagtagctaatagcagtctcccatgtggccaagattctactataacccatggacacagttatccgggatcaacccaatcgctcattcagttgtattctgatataatcccagaggaaaaagggaaaaaraaaagaacaagaaagaagaaaagagatgatgatgcagaatccaccaaggctccatcaactccccattcagatataactgccccaccgactccaggcatctcagaaactacctctactcctgcagtgagcacacccagtgagcttcctcaacaagccgaccaagagtcggtggaaccagtcggcccatccactcccaatatggcagcaggccagctatgtacagaattagagaacaaactgcccaatagtgatttctcacaagcaactccaaatcaacagacgtatgcaaattcagaagtagacaagctctccatggaaacccctgccaaaacagaagagataaaactggaaaaggctgagacagagtcctgcccaggccaagaggagcctaaattggaggaacagaatggtagtaaggtagaaggaaacgctgtagcctgtcctgtctcctcagcacagagtcctccccattctgctggggcccctgctgccaaaggagactcagggaatgaacttctgaaacacttgttgaaaaataaaaagtcatcttctcttttgaatcaaaaacctgagggcagtatttgttcagaagatgactgtacaaaggataataaactagttgagaagcagaacccagctgaaggactggtaagtgtaaatcataaaaacgacaacttttttcttttgttttaaattatacttacagcagattagtaccagcaactgtatttccacattattctacaacctttttattctaaaggaccattttttattttgtcatttctacctctctggaacccatgtttttacttatatctaaactatattaaataataatttgtttactattttttaaaaagcaaaggcatgtattgcatttcatatataacgtgatgtgtagcaactggttattaccacattgagttgatatgactaaagcaaagtaagtaaatgtctatgtactttattgtaaataagtgattaatttccattaacctctttaaaatgcagaggatagcccatgcacccctattaatacccttggcactcttagggataccacactgggaagctattgtgtggttacagtgttgtattgatacttaatgtaatgttacatgtagatactgttttgtagttttccatgtatcaattttctatcagttttaagttattaacatttaatttgctttttttttcatttacatgaagagctaacttgtaaatatacctttacaagaatctgtcccctttatttcagttaacttcattaagatagttccaaaactggagtttgagtcatgggaattggtctgcttaatagctcttgcctgtttatctttcagaaggtgcagtgccattaccagtgcattcataaagctgtccctagagagcttctcaaattggatttcattttcatattttaattaagggttgagtggtatatttagttgtccagttttttcattttaagattgttaatgaagctcatctttttgcaagtgttgctttttttcttgtctttgaccattcagtagagattgagtgttgacttgatagatttgtgtaatttttgtaaattttactggttatgcttttacagttgtcaccagtaaatataggcaactctccagcacagtctccatccactttctccaagacatcttataccctgaggagtactgaataacttgcagccttctgtctttttacccttctatgtataccacatgctgctgcttctgcctgttctgttctcccttcttatatacgtctggacaatatatttttatcttttgaaatgcagttcttgagtcatctttttccagatacctttctcacctctcccaatctcaaatatgtgttgatgctcgtgttctcacatagcgatttctgttgtaccacttaacattatttaaatagctccttgaaggacgtagactacattttgagcatgtttatattaaaatttgtgggtgtaagaatgtttaatggcatggggaacaaccacgtcaagtttaaaaagtagcccctccccccaaattaaagtgtgatttaaataaatatatagtgatttaaatatatataaatatatacatctatatataaatatatatataaatataaatatataaatatatatatataattaatttttaggttcttgccactcagagtgcagtccttggggatccgcagcatccacatcaggtgggagctttgtaacacatgcagaatctcccgccacacacctgcttctcagaatgtagacttaggaagatccccaggtgattcctgagcatctgaaggggagaagtactgctctaggcaggtgattctcaaagctaaagtgtgaggagcaccaggagggcttgttaaaccaagattgctgggctccagccccggtatttctgattctgcaggtctgggtgggaccagataatctgcatttctagaccagctctagatgctgctgccgccctggagaccccttgagagccacagaactagcctggagatgagcagtctaagcctgctttcgcctccctccatgagctaaaaatggcttttacatttttaaatggttgaaaaaaaatctaaggaagagtagtattttgtgacacataaaaattatacaaaattcaaatttgtccgtgaattttaaaagttttatttgaacgcagccaagctcattgatttatgaattgtttatggctgcttttgaagtacaagggcagagttgagtaattatgccaggggctgtatggcctacagaggcttacaatatttatcatctggctctttacataaaaatgttgccatccatgcgctaaactatttagaatataactggaaactaattttcagaaccgtcaragattcaatgcagaattcattacagtaagttcagctactataatcgtctatagcagagtactgctgttaaatttagaaataatggagcctgaaaatattcctgtgttttaaggtactgataggactacccttaaaggccttttcagggcttggcttattctcactttgtaatgataaaaataaagaaaaggtttatttgttatcatctacgttctctcccattgactttaagtatgtggccattatttttcagtcaaatacggttgtgaactaatttgaagaaccagtgttttttctttttattgttgtctggtgctatctgttctctcacctaagatgcataggctgtaaagcttttctggagcctgtgaattgtttcagcacacctcatatttcactagttcctaaggggaaccaaaaataactcaccaagaccactatgcagaggctcctatagccatctacaagcatttccttcccttctgcagtaagtaagcaggaataaggggttccccagccccagggaggtcagcatgaggggtaatgctttgccagaaagggctgtggccttactaatgagttctgctctttcctcaagcttcgcagcttactgatttccatactcgagaataacgtttgaagaaaaggatggtgtttttggaaaaccagcattgacaccactctatcwtccctacttatttaataccttttagtgccatgttaggatgacgcgtcatagcttggcactgcatgaactaaaaaccaaatatgcaaattgttcacttattttttaccctttccaattacattagcaaactttgggggctcaaatgcaaggtggttttggatgtggcaaccagttgccaaaaacagatggaggaagtgaaaccaagaaacagcgaagcaaacggactcagaggacgggtgagaaagcagcacctcgctcaaagaaaaggaaaaaggacgaagaggagaaacaagctatgtactctagcactgacacgtttacccacttgaaacaggtgagggtgagtcatttagagcagcctcttttaaaagtcaaggatataggctgggggcagtggctcatgcctgtaatcccagcactttgggaggctgaggcaggtggatcacttgaggcatgagttctagatgagcttagccaacatggcaaaacctcatctctacgaaaaatacaaacatttactgggcgtggtggtacacgcctgtaattccagctacttgggaggctgaggcacgagaattgcttgagcctggatggcagaggttgcagtgagccgagattgtgccactgcactccagcctgggtgacagaatgagactgtgtctcaaaaaaaaaaacaaaaaaaaaacaaacaattcaaggacacgagagatcaaatgctaaaagacatctggacaaggaacctagtagactttttccaagcagaattgcaccgtatcctattggcatctgaaatttacggtaatacaaatggattgataggtgatagtcaagattttcttatgttcataaggagtagcctcagtaccaagaaaaaaatctgtcctcagtactttgttgtgactctgaatccaaagaaacacattgtgaattctgttctacacctttgtggttgttacagaaggtgggagacagttgctaacagtgctgttggtggtacccagcctcagttgatgccccagtttttgctgagcatagataagaaatatgtttttcttgttagatgcctggcagcattcatttagtacagagcttatttttaagtctcaaaggtctgtagtctctctcacttactccagcattttgatacttgaaaattttaagtctcatttttctgaagccttattcaacaaagttgcttcgggtcttagaaagttgagctacactgagttccttttatcatgtacattactcttaaatgtgttttttaatagcagctctctctgctccctctaatggaaccaatcattggagtgaactttgcgcactttcttccttatggcagtggccaatttaatagtgggaatcgacttctaggaacttttggcagtgctaccctggaaggggtttcggactactattctcagttgatctacaaggtatgtttctctgccaaggtgttgtcttgcttcatctttgggtaacatgtcagaattgatagagcttgtcttatttttgtatttagtttacatctactcttccaagttttattaaaacttaagttcagctacagggttaaaattttacctggtgaagtatttctagcataaacatttgaagttgtttttataggtaagaatacaaattgcaagaaatatctattatgtacttccatggtagtggaaatccttatttccttataacctttattaacacttaaaatgaattcaaaaatcattgtaaatggtggggatttaaaaaaagtagtagtttaccttgaaaaatgaaattaaacaattttaagtatatctaataatttaggtattaattacaagtaattcctagactattgtaggtttttttttttttttttgagacagggtctcgctctgtcacccaggccagattgcagtggtgcaakctcagctccctgcaatctctgcctcccaaattcaagcaattctagtgcctcaacctaccaagtagctgggactacaggcatgcaccaccacaccctgaggtcaaggctgcagtgagcatgattgtgccattgccctctacctctagcttgggtgacagagcaagtctctgtctccaaaaagaaaaraaaaaaactatcttaactcataagctgttctccaaccttattttatcatcctcatgaaattctttatctttgcaaaatttgtaatttgactttgcacttgatttgcatggtgttattggtagattccaagtctctccttgagagactaatcagtaaatgacaaattggtgataactgttaagctgggwgaggtgtctgaagaggaactacattaatgatttagttactttagtagtagcattagtactgttgcttcttttaaaggtcttagtcaatccagattctcatatctcggatgtgagttgtattacaagtttaagaccagaaattcttaagtttttcatagaactagggcatatcttaatgagaacttaaaggatattttgataatattttgcaatttcttgattgcattttaaagttatccttcactagctataaccacgaaacttgaagaattgcataaataaaatcaggtagaaaggaaattagcttcttaatttcagagcttaagtagtcaagctgggtaaagtaagcaagttggtatgtccataaaatcacgagtatctgttccactaagaagcctcctggccttgtaggtattgttttcttggtgtgcaagatacatcttgattacatttctgtagccttgcttctatgtgcaaaaaattcacagaactacgttttagcaaggtcattgcatattcgctcagtagcatataatttaaattttttggtctcctgcagcagaataatttaagtaatcctccaacaccccctgcctctcttcctcctacaccacctcctatggcttgtcagaagatggccaatggttttgcaacaactgaagaacttgctggaaaagccggagtgttagtgagccatgaaggtatgattatagcctccaaatttcacacctcggagaaatgtgcctctgccagttgtgtattgtgaaatggcaatagaattgtaaagttctacccatttatcaatattgactgaatgtatttatggttttgtgtttttgcttttccagttaccaaaactctaggacctaaaccatttcagctgcccttcagaccccaggacgacttgttggcccgagctcttgctcagggccccaagacagttgatgtgccagcctccctcccaacaccacctcataacaatcaggaagaattaaggtacaggttatttttttctcaaataattcttagttatttcttcttttaaaaaaaataaatgtatgtatgtggcataatgtctttaggaatagcatgtaaaaacatttgaagagtacaatttggtgaataatcttcaggatttaaagtttataagacattgttaccattaaacataattagtttgcatttttttaagcctacatcatatagagagttaaataatctawtagacagttaagtattagattatttaatctaattaaataatctaatagacatgaaggtagtggaaaatctccatgcaacatatttcagaaatcattgtcctttaaagggtattaatgtgatttattgggtttattgttgtttgtagatgtctaaaatgaaagagcagaagttgctrtatcagagaacgccgtcgtggaagagagtttaagaactgtctggggtttgaygtctttgtgtcagttctttaactgtaagattctaattggggagaatcaagttcccttagtagatgatcgctagccaactctttagatccagagggttcttacaacttcatcaaataattatctcttctttggaaaatctgcccactaccctctatttgatgagacatttatttaacctaagtcccttactttattaatggggaaactttggaccgaagtggagaataatctgtcccaattgaggatccaggtcctctttctactgtacctcagtaggccagcctttcttgggtctcctgcatgacagctacttctctgcgtgaggagtgggagacagcagttccacagggttgtggaacttagtctgagacctcacaattggcctggtagactcaaacttgaactcaacagaagggaccagtcttttgtttttctcacctcactttatcagttaagaaaaataagggccgatcaagtcaatggctaagttttctcccatcttgccagtgtaaagagcagcagtaggacagctgttttcccagtcaggtgaatgcaggtgtgaccattgcatatgtgttggacttctctttccttttttttttgtctttttaaagttttccttttttattgttaaatccaaccagcagctctttccttttcaagctgcaggagtgctgccctaggctcaacgatctgggattttgaaaaggtgctttcatgctctctatgttacatgctaatcagaacatcttcctctttggcaggtcttcaaactttggtgctgaagctttcgttaaaaggaaacataccatttaaattattttgtaactaaatattgttcttgtatttttttcccagtgtggctctgagctgattcatttgctgctcatcgtataggtgctgcccagagtatccttacagctgtattcacagatgtcagcagggttggtacaggaagcccccagtggtggatttgcagactttgatgtgtgtgtttatgttttttcaggatacaggatcactgtggtgatcgagatactcctgacagttttgttccctcatcctctcctgagagtgtggttggggtagaagtgagcaggtatccagatctgtcattggtcaaggaggagcctccagaaccggtgccgtcccccatcattccaattcttcctagcactgctgggaaaagtaagaacaacacttaaccttattatttccctttacactacgccaatttactaatgtaaatattttgattttgaaaatccattaacactattttcctcttttttttctctctttttaaaggttcagaatcaagaaggaatgacatcaaaactgagccaggcactttatattttgcgtcaccttttggtccttccccaaatggtcccagatcaggtcttatatctgtagcaattactctgcatcctacagctgctgaggtaaaagattaaatgacttcttaatgttaaacagtatgtccccaattttcaaagatgggtcaggtgtctaccataaaacacacacaaacaggatcactgaggataaagggtcagagagcagagctgatgctcactgcagacctctcagctgcctttgagtgccatcgtttgtcattgaattggtctcagcctacgtcaagtaaaaagggaaattagagctcacattttcttattaaaggatgtatactttagagaactctttttttttttttttttttaatagagacacagtctccttctgttgcccaggctggagtgcagtggcacagtcatagctcactgcagcctcaaacttactgggctcaagtaatccttctgctttagcctcctcagtagctgggactacatgtgtgagccatcatgtccatctcagaaaaaacttctttgtaactgttaacagagaagaaaattaagcaatgaaaaagaactttatcaacagtaatagttttgcagaagcaatagaaatgttcttcaagtagcatctgcttatatcaaacataagtaatttcctgaggattttttatttttttaactctgaattctgtgaagacatttcagtagagaccaaactagaagtccaatgatgtgatattttggttatcagcaaaatacagcagtagcaagacctttgtctgttcttacgggttgtgtcagagctggagggaagcccctggaagtaagctttctgaccacctgtaggaactgacggggtctgtcagatgttacaatatctaaaatagtttaatgtgttactagatatttaatgttaattggaatccctttaygaggatttctgtttataaatttctttttttggatattagttcgttagagctaatttttttcctgaggttctttaagtctaaataaaatttgttggattttcttagaatctatgtatcatgcaaagaggatttatcctaagtgtgtatttttcttcagtggttcactgttgccttctgggtgaataatacagcatttgcatttggttttagaacattagcagtgttgtggctgcattttccgaccttcttcacgtccgaatccctaacagctatgaggttagcagtgctccagatgtcccatccatgggtttggtcagtagccacagaatcaacccgggtttggagtatcgacagcatttacttctccgtgggcctccgccaggatctgcaaaccctcccagattagtgagctcttaccggctgaagcagcctaatgtaccatttcctccaacaagcaatggtgagctagtgagctttttgttaaccccaaatccattcctgattcaaaagttaagcttactctttgagatactgattatcttttaacaacggacaggtaacatgctggcgtatagtccttggtgaacttaccatgtgtgggtgttctgttttctgtgctgtgattttgacctctagtgctttggcctgtgtattctgtcatgctgtcaccaggggctatgtgagtgccagccatctgtgcaggctgccagaagaagcctgtgacgggcttgcccttgagcagcttttgttcttcctgtctcccaacccccatcccgctgcacctgggccacctggtacagatggggctggtgacctgacgtgggttctgtttcctgttctcctctgctttccatcctcacctacctcttgttttacctctgcaccagctctatagggcccttctcttcccacagaggtgttcatgccccccatctctgagaatggaacaacttccttagaccgaccatgatgtcgctttccttcctgcctcactggcaatcttacaggcgtgctcagtccaggccctggcttcctcctcttggcttctagctgttctgtcactttttccctgctcctttttgccttcacactgcacctgaatgatgctttctaattcctgagtccttatttaccttcttatccttggccttggctctttcctcatttctgactctgcaagtcacacttatttaagactcttatacatatgtcattgtatctttcataaaatgtttttttaccatcttaacctgcaagcaaaagtaatatctgtttccctctctgtcttactttgtacttagactgaatagtaatctctcttggtgacttagttttattagattcttcttttatactgccattgctttcccagctatttgagaataggcatgtttctttatttttgccctagtgtcagataatcgactctgtaaccattgcttagaagataaattttttttattaattaaagaataatgttaatgaaccatgttgtaatgagttgatactgcataatttttcaccatgtgccaccttgtgtcatcagtcagttttaattactaacaaaagttgattgcctttaggtctttctggatataaggattctagtcatggtattgcagaaagcgcagcactcagaccacagtggtgttgtcattgtaaagtggttattcttggaagtggtgtgcggaaatctttcaaagatctgacccttttgaacaaggtactttgctactccttttatgaccccacctcctacctccagcgaaaatgtccttggcagtgtctcttccaacatcagagagagacaccacttatggtggtgtgatggacacatgttcctggtgatggcaccagcgtatatcagatgtgcttgggctgaacaccaaagagctacaacaggctgttaaagggaatattatgaggactacrtatttttaaatagagtgaaccgtggaccacatagtttggttttatacatgtattttttccctagctaaattatcacatgctaaatattggaacatagtttcctttctactattaagataaagaaccactgtcacttttgaatataacataaaaataatgtatagatcctgtttttattaaattttgacttgttgagattcccacacatttctctttgcttttcaggattcccgagaaagcaccaagagggtagagaaggacattgtcttctgtagtaataactgctttattctttattcatcaactgcacaagcgaaaaactcagaaaacaaggtgagattaggataatctcagctgataacaatgtgtaaygagtgacttctgtgttctgggcatatgggagtgaataaagatgtgtccctgccttcatggagctctgtgtggggaatccaaagcaggtgctgacccggcagaggaggagagggtgtagggagccttgagtcgtgctactctttcaacttagttatttgacagaagtgggcagagttatgttttaaaagttcagtaaacagaacactaatattaaaatctttaattttaccagtttaatttttttttgagatggagtctcattctggtcccacaggctgaagggcattggcacctcttggctcactgcagactctgcctcccaattcaagcaattctcctgccttagcctcctgagtagctgggattacaggtgcgtgccaccacgcccagctaatttttgtagtttagtagagatggggtttcaccatgttggccaggctggtctcaaactcctgacctcgtgatccgcccacctcagcctctcaaagtgctgggattacaggtgtgagccactgcgcccggccgtaaatatcttaatattttaaaatcatttttattgatgttaccccaataggaaaacctgtttaaagataaaatttaagactatttgtgcattttaagagaaaacactttgctcacagtatggtgaaagaggtctgctttacttgattttatgtaatttgagtgtgtccaactaatggttgatacaaatgatatgtttataatcatgttttgaaggaagcttttcctgtacagtaatactgccagtcattcctccatccaggttattgctctggtatgtctttcacagaagaacattctgaagacttatttttaacaggtagttgtttgtagtatgcctgtaataaaatctargctagatgacaaataaatttagatcttaaaatacatcagcctaaatgcaagaaggattttttttttcaccagatagtttaagttggtgtgcagtccctgcctgatttggtataaggcatgtcttttttcagataccttgtcaggattggggcatgtgaaaagagggcagcctgtgggttggtgtttattagtttatgatactctgtaccataaagtaaataagctattggagatttcccctcagctcaactgtttcagcagccggatcagagctgagaagcctcagagaaaagttagtatgattcatttgttgacaggggctccttccctttctgtaacatttacaccaattgattaaggctgagattaacagatgtgaattttagagtggagataagctctcaagaaacgatgctgcagcgttcttatttggttaaacaaaaaacactgttccattgtacaaattatattagctcttctgacagcattgtgagtgtgtgtgtgttttttctttttctggttttaatatagttagaaaggggattgtcccagaaagtgtaagagcagaatattctccagaattatggctttgtggaaaaggcctcgaaaggacgcggcacagctgccatcacccgctctctatccctgtgcaccttagagcatggtcagcttctgcggtgcatgagcccccagcacttactgctgactctccctctgcccctcaggtcacccatcctcttcagtcatactgctcagcttcttgtcttaacaagaattgctttccgggcttgtgaattatttttctttgtcatggtttctttatgttgcccaggaatccattccttcattgccacaatcacctatgagagaaacgccttccaaagcatttcatcagtacagcaacaacatctccactttggatgtgcactgtctcccccagctcccagagaaagcttctccccctgcctcaccacccatcgccttccctcctgcttttgaagcagcccaagtcgaggccaagccagatgagctgaaggtgacagtcaagctgaagcctcggctaagagctgtccatggtgggtttgaagattgcaggccgctcaataaaaaatggagaggaatgaaatggaagaagtggagcattcatattgtaatccctaaggggacatttaaaccaccttgtgaggatgaaatagatgaatttctaaagaaattgggcacttcccttaaacctgatcctgtgcccaaagactatcggaaatgttgcttttgtcatgaagaaggtgatggattgacagatggaccagcaaggctactcaaccttgacttggatctgtgggtccacttgaactgcgctctgtggtccacggaggtctatgagactcaggctggtgccttaataaatgtggagctagctctgaggagaggcctacaaatgaaatgtgtcttctgtcacaagacgggtgccactagtggatgccacagatttcgatgcaccaacatttatcacttcacttgcgccattaaagcacaatgcatgttttttaaggacaaaactatgctttgccccatgcacaaaccaaagggaattcatgagcaagaattaagttactttgcagtcttcaggagggtctatgttcagcgtgatgaggtgcgacagattgctagcatcgtgcaacgaggagaacgggaccatacctttcgcgtgggtagcctcatcttccacacaattggtcagctgcttccacagcagatgcaagcattccattctcctaaagcactcttccctgtgggctatgaagccagccggctgtactggagcactcgctatgccaataggcgctgccgctacctgtgctccattgaggagaaggatgggcgcccagtgtttgtcatcaggattgtggaacaaggccatgaagacctggttctaagtgacatctcacctaaaggtaacgtctgccgttcacatgctgtgcagtgctacttactctgatgtcaggctaatgaatgtattttgtcaattttccatgtttgtctcatgttagttttatattttataatgtgtatttttcatttacaaatgccaatgtttgtgttctcacaccttgctctctttgctatacagttgtctaaacactttcataatcaatatatctttgaacatacgagttggtgaggtaaatccgagaatgatttgtagataaaggttgcctgtcatttgcattggggacctcctttttctttttctttttctttttttttttttttttttttgagacggagtttctcttttgttgcacaggctggactgcaatggcgcgatctcagttccctgcaacctccgcctcctgggttcaagtgattctcctgcctcagcctcccgagtagctgggattacaggcttgcgctaccatgcccggctaatttttatatttttagtagtttttaattttgtatttttagtattttagggtttcagcatgttggccaggctgggctcaaactcctgacctcaggtgatccacctgcctcagccacccaaagtgctgggattacaggtgtgagccaccgtacctggcrgggaccccctttttcttaaagtcagtttctagaaggcaggaatgacatctaaatcatactgtatacattgtcataagacaatgtataggaacatcagatattacgtaagtttagagatggaaattaaacacttagtttggacctccatggttaagtctagattgtcacttttgcttatgtagaaagtacacaaacaaaagtatgtggagctgctttcttaagtttagcacttaaaaaaaaaaagtctgaaaatactctaaagataattccaaagaaaatatcaatttaacattttaatttaaatctgaggggaaaggaacatagctatagacattaccaattagactaatcattttaaaatctggtatgttatatggccactatgaaagtaaatgaactgtttgcatgaatttcagttacattaagttttttcactttaatgtccttaatctattattttccccaaaatttaggtctttaaaaaaaattgctgccatttaataaacaggttcattagattattaccaaacagatttattagattattgcccaacaggatttatttggaaattagtaaatccttgtgagtggttattcttcattttgctcttgttttttatactgtatcctatttcctataaaaattatgtttttgtccctgtgtaggtgtctgggataagattttggagcctgtggcatgtgtgagaaaaaagtctgaaatgctccagcttttcccagcgtatttaaaaggagaggatctgtttggcctgaccgtctctgcagtggcacgcatagcggaatcagtgagtgtcttggtcaggctttgagattggaattgctttcctgattcagtgtgaccacttgaacacatgctgtaacatttgtggcactcttcagaaagtgactgagcctgtgcattaacccgtttctcttagaggaataaggcattggtgattaatcgggagagctcagccgtgttggtattcacccagttgaggtagttaaccaacttcaggttctcttccaggctggaggcaagcaggggtgaaggacaccaggcttgtcacatcttctgggtgtgctggatgggtgaggacactctcctcttcccttgcctttctgaagtttctcccacctcagaatgtcagtgtgcccatttcctgacacttgggtatttatggccactctcctgccctcttcctaggatgaagtcactagagggcagtagatcgcagcagcactgatttctgtcctctcttgacatttctttgcttaaaagattacaagcctgtttgtcagtgagtctaactgaaccatatctacacaatagttttagaaaattgtatgattctaaggcattgttttcaagaataaaaatatcattggtrtgttttctttggacaggcagaggaaaccccaaaagccactgagtaatgtgcctaattgttttctttggaatcgccctgcctaaatgatacttatcttttatgactacagagaaataaatttcacaagcaatgtgttccagaaaagacctttaacatgtaaatgactttgagtaaagcttgagttaacacctatgctttatgctcccaggacatggagagcgataacctcatcacatcagagtcaaattgaaaggagtgagaaacgatcaagaaagaaaccatatagatgattttttaactgtttttaattgtaaaattccagacagagatataaaagttggcattaatacaggggaaagaactcaatgcgaatcattacatgccctgtgtttgtgggtattgtgtgtttcagtcaggccctgaaatcacacaagcgtgtatattggtcagccagtgtttgttgcatgggctaatctttttcttcaaggagcatttggcagggtttacctaagtttggctttgaaactgaatttgcrtactcatatttaagtagatctacctgcaggccaatagtgttaacataagctagaagaccattttattatcggggaaaacgctgatgagttatttctgtcgtgggccatcctttgaccagcttgagattgtctgtagtctccatcagatggggtgactttgtgtctrctttgcttcttttcagcttcctggggttgaggcatgtgaaaattataccttccgatacggccgaaatcctctcatggaacttcctcttgccgttaaccccacaggttgtgcccgttctgaacctaaaatgagtgcccatgtcaagaggtttgtgttaaggtattttgttttaacttcacatagtacagcccagggtttctaggcgtattagtggtttcctgtgcttgatttgtctgctgcttacaaaccctgctgtctggctgtgtatgtgcccaactacataagagaactcgccgtgtgtctctgctaggcagctttccatgtatgtttctgtcagtaagaatctgaattaacctggttttgggcattactcagaggtatcttcagttttccttgtatttttttcctgttgatatgccattgtctgcaggcctcacaccttaaacagcaccagcacctcaaagtcatttcagagcacagtcactggagaactgaacgcaccttatagtaaacagtttgttcactccaagtcatcgcagtaccggaagatgaaaactgaatggaaatccaatgtgtatctggcacggtctcggattcaggtgaagaaatactttgtgtacaggaagtggagagacagggtggagtctagcaatctgaagctattgatgtccagtatgtgaaaatgatttcacatagctgcagggacagaaacgtgttttcaaaatcgtatcaaatcctgtcccttggtaacactagggatttaatatgtagtcttgggacttggtgattggcttccccaaagggaaagcagaccagtggaatccacatctttgcatcttgttgagagctcctgggaggcaggtagcattgtaatttgcacacactggatttgtggagtgctcagtagagctgtttcaagcacttgagagaaatacaaatgaaaatattttccaaaggtacaccaattttggaagttaccttatcttttggaagctaccgtttcatgaaatcagtgcaygttttttggtagactgtggactatcttacaagtaaggccgtgtataggctaagcatttaagtttacacctatagtccatacttcctgagctgcagamccaaatatccaaatgcctgttcagcatttttctccttggatgtctcagaatggaattacaaagctcttactttgtcaaacttgtccagctcctaaaccccgccatcctacaagctccttgctgagtgatgttaccgtttgtgtacattggcctcagtactgccagattaaacctaaagcatcatcgagttctgttttctcctaaaaattctctcagatccactcttaggtttaccagccctatcttgagccacatatcacttgcctgtaccactgcaggcctggctgtctcctcccatccagttccctctcagcagccagcaaagtatctttaccctataaactggatcagcgttcctttgtctatactcattcagattcttgttcctttgttggaacccttttactcctcactagaagtttgtaggatcttctctttattgatatttggacatttcacagaactacacctcagtggaggtctttttgttgattgctttcctcccttgatgagccctttcaacctggagcatcgtgaccttccgtctgagaaatgtgttttgtattcattcttttgcaagttctgcccctctgtttcctctgtgtttgcactaaaacccctgagattcaggatctcacagtgtggacctgagactagaagcagcagtgtcacctgggagcttgttaggatgtgcaggttcgggggccccagcccagcctcactgaatccagctctggaggtggggcctcctggatgattctcatgcatgtcagagagtaatttctgtcttatatcctttctccccttctgttctttgtttccttgtctctctgttctttctgagacttcctctactttatctgctaatctttcttgtctatttttagagattagctacgagccctttctgctcttgatcttgtttgatattttgtttttacattatgagtggagtatctgtgttttctctgctgttgcccctctctgttgagcctctctcggattctgtgggtgaattagtgctttgcctctactccttccagttctagctttcccctgctaagtcaattacttttcattttaaatagtccattcactcttatacccattcgtgttctcgaggagtgtgcttttactgtgattttagtgggtatcttaactgtgttcaacctgtcacctttaacctgaagcatttttgagagctctggtttctgtctctttacttatttcatcctgccaccctcccatctgtccacctccctggggatcccgtggatgatctaatatgtatcctgtttttctgtgctaatatcttagaactatatacacttttatgtacatatataaaaatggaatcatgttatatttatttttctccgtcttccttttctctgtaataatcagaggtccctctcgatcaactgacgtagcttcatttcattmttttgaatggttacctgatgttccatagtgttgatgaactgcagttaaaccattgcattactgatgagtgtgtatttgatttataatttttctcataacaaacagtgttgctatatcttgtacaaatatcacaatgaattaatagtttcactcctatggggtatattcccaaacgtgaggtttctgtgtaaaagcgtgtgtacttttcatttaaatagatattgccagttttctaaaaagtctcttactgcacacttcttcctgcagcatgtgagactgttttcttgtttcccatttgtagctggtgttactatttttttgtttagttggtctgataaatatagactgatgttaccttaattgaataggcagcttttcatgtcsgccatttggatttgctttcataggaattgcgtattcatatcctttgtccatttttcaatttttagcagtttacactattcagaattttcccctacaaaatatcctttgcctaccagcaagtgtgacatcttttttcttgtaaaagttactgtttatataaacaaacatacataattttctgttgcatctagtcttggtcaagaccctagattatatacggattctagaggttttcttgcataacatttttaaaatacaatttcgctttcttccattggataaccagttgttgaagggccatttagaagtaacccactcatttttaactgattttctttcttcttctttgagacagggtctcactgtgtcgcccaggctggagtgcggtggcacaatctcagctcactgcagcttcgatctcctgggctcaagcgatcctcttacctcagcctcctgagtagccagggctacaggcgcatgccacaatacttggctaatttttaaaaatatttatttagagatgaggttttgccatgttgtccaggctggtcttgaacttctgaactcaagcaattcacctgcctcggcctcccaaagtgctgggattacaggcatgagcccccgtggctggcatgaattttttttttttttttttttgagacagagtcttcctctgtcacccaggctggagtgcagtggcacgatctcggctcactgcaacctctgcctcccaggttcaagcgattcttctgcctcagcctcccaagtaactgggactacaggtgtgtactaccatgcccggctaattttttttttttttttaagtagagatgggatttcaccatattggccaggctggtcctcaaactcctgaccttgtgacccgcccacctctgcctcccaaagtgctggtattacaggtgtgagccaccgcacctggcctttttcttctaaccccacgaaatcttgactataaactgaattttaataccagttactactgtacgttagattttcatacatgcagggatctatttctcttttctgagatggagtctcactctgtcacccagactggagtgcagtggtgccatcttggctcccagattaaagcgattctcatgcctcagcctctggagtctcactctgttgcccaggctggagtgcagtggcatgatctcagctcactgcaacctctgcctctggggctcaagcaattctcttggctcagcctccctagtagctggaattacaggcacacgccaccatgcccagctaatttttgtatttttagtagagacggggtttcaccatgttggccaggctggtcttgaactcctgacctcaagggatctgcctgccttggcttcccaaagtggtgggattataggcatgagtcaccacgcctggcccatttggaatctcttcatttccactgatcttgtttattcttaaaccacactctattgatctccatacatactttttgtgtgttctggttcattcacttgtgagttgtatctggagtagaacagataatcaaagatgcttgttcagaggataaatcagttcacatactaaagtctctcacatggcccttcccaccatgtgctcccggatgtgcttcatgaggatgcagctggggcagcacatggtcctcctagtaattccgactagaatgcagttgatttctgcattctagaattcagttcaattctagaattgcattctagtctagtacttctgattcagttgcatctagtctagtacttttgcattcagttgccttctagtcagaattaagtgcaaaaacccaaaattgggacaagaaaatacaactatttatggcaaagacccatattttgttrgtatgtttctctacaagttgtgctaccaacctgaatagtgcacctggcaggccaccagcacgggagtacaagctgcgcagtgagagctgcttccatttcagcccgttcaaacttctttcccagcctcagaattttgtattagtgaaaaatttaccttccccaagagcttcatttgtttccaacattcctgatatttacagcagagtgacgtttcctgtgtctgctctttgccctggctgctgggaaactcagagccaagtctgaaccctgtttacagtatcagtgattggttatagttagcctgatttctatgttattgaatttattatgtcttttttgaaatagtattggggtaaaataaacaccacaagtcaataagcttatttagttggtgggaactcagctatctcatctggaaggttagatagcctaatacataagacagccaagccacagtactactttatacatagactctaagaatttagtgctaaaaaagatgtaggaataagctagtgatggcatagttttaagtagtaaaaatgtccaatttttaaaatttcagaaaatagcatattcaaaaatgatttgagttcaagtgaaacttaagtatggcttctaataagacccgagggtgaaacctttgtatgaaaaacagaaaaaagacttgttgtcacataaattggaagtatgtacacacttttttttaggggctgggcctgtatgctgctcgagacattgagaaacacaccatggtcattgagtacatcgggactatcattcgaaacgaagtagccaacaggaaagagaagctttatgagtctcaggtaggtgtctggtccccgagattgtatacacagcaccatcatcctctccctttctccgtgccagccagacaccctggaaggcagaatgaaatctgtcatgctgcattcagctttaaacaaaagccatatctgtatattagtgtatttttatcagttgtatctctttcaattggtgttacagtttactttgatagacaactgtaaattaatgagcctggcttcacacacaacctactgattccatgctttccattcgtgccatgtaaatgtcatctgtgcctaatagaatatccacagtaaggatgatcaggctgccgttccgttcagtttcgactgagtcctcctggtgtggataggaacacagaggggagtttcaggtcgacattgatgacttactgactgacttttccctcagaaccgtggtgtgtacatgttccgcatggataacgaccatgtgattgacgcgacgctcacaggagggcccgcaaggtgagacagcgaggaacctgacggggagtgcttttgcttgtggggccagtgctggtggagagaacactgaagccaagggaaaggctctcacggcagcctggcggtgactaaacattcagagcaaatgagttgagaatttttatttaaatgttatatttgtgcttctaacaatgggcaaatagaaatttaattagcaaaaactgctttatcaataaatgggaagtttttaaagctgcttctagctgttttacaatacagttttctgacatggtggcttgcaggtatatcaaccattcgtgtgcacctaattgtgtggctgaagtggtgacttttgagagaggacacaaaattatcatcagctccagtcggagaatccagaaaggagaagaggtaagagtgtgagagattgcatctgccatgttgttcagatcctgggcgaatagttccctcctcacacaggtcacttactcacttgtttcccaattctttgttgtgataaaaactctgtccataataggccagatgttcccaccctgcagtatctcacccttcaggcactccagttcaccttcctccacatggcagctctgtgagcatttgctgtcacctctcccttcccttctgtgccacgggttcagcatccccatggcacccaggtggtatcatttctgtgtgccataggatccttctttatccccttaacctggacacagtttggcagtgtcccctctgaagagcatccccgtccttctccaagggggccgtggctcctgagatggcactgttgggctgtgggcggcaaatctgggccgccgtgctgctgaggattgtgtgctcacgctggcgatcagtgtgtgcttaaccaagtgcccacatcgccacattcttcagcagttcaggtgtgggttgttgtcttcaaaatgccragtgccaagcttgctgtttgtctccgtgctctcagaggtgactctggtccggcggctcacccattgggattatttttggccttaattgctgcatttgcttcccaccttggtctttcccactgtgattcaggtaccttggttctggaattggcatttcctggaaagctgtcactgagcagcaggcttggtttctgtaggaaacgtcccgcatttggggagtgaggcacctgagtgacttgactttgttggtgctcctctcccttcgtgaacatagccatgggattcgtgggattctatctgtattttgggtctttgtggaatctcctttcttagtcaagaataaggatccgactagacccaaggcccgttatacatctcaaagtaacgtgtaaataagacagtgtgtgggagccctggcacggtgccagtaaccaatggctaccatggtggtcagaagagactcagcccagggccacctgcctccttcctacttgagtattcttgagtaaatagtttaatatgagcccctattttatcttctgcaagatagagaaaatgacttccttaccaggctcttggaaggactcagcagatacctgaaagaaagcagtggaatcattgccaagaacagctgctcaataaacactggtttccttcctttctgtgtagaaggtctttccagctagcgtctagaatcatttcactcagaagagacctagaaattcctgggcctccccttcattttgcagcatcggctctctctggggtggtgggggttgcagggccgcgcactgaggcttgtaccgtgggactcacgcagactcccacctaccttgattggtctgagatgttaatttggtgacctctaaatagaaagacatcctttcagtcttgagtgaggaaaaatgaaggagggaaaacagagttagctggcagttcatctcacccagaattgcatgccccattcagtaaatcaggggaggtgaaaggcttctgggttttagggagagggctaggaaagcagttgcccttccagtcccctccatccacttgcagggacagcattatgagaagtcacagaaatacagctttctctggtcaggctccccgttctcagatctcgctgtttaaaaatactgcctccctcatttcctctgtgcaagcacaatgcctcttttcagggttcccccagggtcccatggaacctcaataaatcaggtcttccttaatttacgtctgtttcgtttgctggttttaaaatgcaagggagatggaggcagaaacgctattgccttccttgctgtcctttcttaccctgtgtctttgccgtgggcagctctgctatgactataagtttgactttgaagatgaccagcacaagattccgtgtcactgtggagctgtgaactgccggaagtggatgaactgaaatgcattccttgctagctcagcgggcggcttgtccctaggaagaggcgattcaacacaccattggaattttgcagacagaaagagatttttgttttctgttttatgactttttgaaaaagcttctgggagttctgatttcctcagtcctttaggttaaagcagcgccaggaggaagctgacagaagcagcgttcctgaagtggccgaggttaaacggaatcacggaatggtccagcacttttgcttttttttcttttccttttcttttttttttgtttgttttttgttttgtttttcccttgtgggtgggtttcattgttttggttttctagtctcactaaggagaaacttttactggggcaaagagccgatggctgccctgccccgggcaggggccttcctatgaatgtaagactgaaatcaccagcgagggggacagagagtgctggccacggccttattaaaaaggggcaggccctctaacttcaaaatgtttttaaataaagtagacaccactgaacaaggaatgtactgaaatgacttccttagggatagagctaagggataataacttgcactaaatacatttaaatacttgattccatgagtcagtttattgtagtttttgatttctgtaaaataagagaaacttttgtatttattattgaataagtgaatgaagctatttttaaataaagttagaagaaagccaagctgctgctgttacctgcagaactaacaaaccctgttactttgtacagatatgtaaatattttgagaaaaaatacagtataaaaatagttattgaccaaatgctaccaggctctgcagcagctcgggggcttataaaatgttcatagggatgttacaatataattttgtgttataaaatatgccattataattatgtaataaccaaaatttcaacctagagtgttgggggttttttggaaaccgcagtctattagtactcaatggttttatacaccttacttctgacagagcggggcgtatgctacgactacaacttttatagctgttttggtaatttaaactaattttttcatattatattgttgcatccctacttcttcagtcaggtttttttgtgcttacaatttgtgataactgtgaataactgcttaaaaatacacccaaatggaggctgaattttttcttcagcaaaagtagttttgattagaactttgtttcagccacagagaatcatgtaaacgtaataggatcatgtagcagaaacttaaatctaaccctttagccttctatttaacacaaaaatttgaaaaagttaaaaaaaaaaaggagatgtgattatgcttacagctgcaggactctggcaatagggtttttggaagatgtaattttaaaatgtgtttgtatgaactgtttgtttacatttctttaataaaaaaaacactgttttgtgtttgcttgtagaaacttaatcagcattttgaaccaggttagctttttattttgtacttaaaattctggtactgacacttcacaggctaagtataaaatgaagttttgtgtgcacaattcaagtggactgtaaactgttggtatattcagtgatgcagttctgaacttgtatatggcatgatgtatttttatcttacagaataaatcaattgtatatatttttctcttgataaatagcygtatgaaatttgtttcctgaatatttttcttctcttgtacaatatcctgacatcctaccagtatttgtcctaccgggtttttgttgttttctgttctgtataatagtatctaatgttggcaaaaattgaattttttgaagtatacagagtgttatgggttttggaatttgtggacacagatttagaagatcmccatttacaaataaaatattttacatctataagagctgcctagagcttctctgttaactcctcatattcaaatttgagctcttaaattgaggattgtctgaagttcactgaccatctgatagatctttcacaattagagtgttgatgcgatcaacttggttttcttagattttcaaataagtttagatgtaaattcataattcattctaattatgatactttttccttcccttcgactgaataaagaagggaacttctgtatctttttagggtgtttaccaaatttagaatatccttggtgccttgttcaaagcctgtttttgtttaattggtaaatttagtcttggttatgttgctgttttttttttgtttttttttttttttgaggcagcttttcagactttattctatgtggtagactttctttctatcttattgaattatttaacgtattaaatataaaggggttaagaaaaaaactgctcagaatcccctttagtttctaggacagatttttaactgggacttcgctaacactaaaatagccagcattcctagtccaccatggagcttgccttctagtgaggggcacggacaaaaacaggtgacttttttagatgggaggtgggctgggagtcccgtgggggcattctaaggaggcagcatttaagcaagacctgaaggatgaagaggagctgggagcgtggcagaggcttgcctggcagaggggacaactcatacaggagccttgagatctgaaagaggctgatgctgccagtaactgaaaggcaggtgtggctgggacagagtggcaggaggtgagatgagagaaaagcaagggtgagtggcgcaggtttagctcgcgtgggtcagcaggaagctgctgccggacggtgctgagttcccactgtgcatagaggtgacacgctgcccagaagaggtggcccgcctgtgggcaccagcgtgtgtacactgaggctgagtgggctccgtacgagtcccaggaggagcaaggggtgccctgggctaggcggatggtcgtgacatggagggagctggcagcagctgaggtgttttgcatgtagatggctcaaacatttcccatttcaaaaccgccttgtctcaagtctctcctcagcttctcctatcctcctttggccccatgtcacgtggaggctgcactgccctctgtcctagtcaccaaacagaaacaaacacacttagtctgatgtggtgtccgatgcggtagatgatcatctggccattagggtttcctgtctctggtggcggtggcagccgctgtctctgaaattctctccagcccctgcttgtggagcagaaccctttcctggctttcttcccacattgctgctttaatcttttccctctaaggtctctaccccattcttttttcatcattaaggtatgtatttaatagtaatctgaaaaacagccttcgggaggccaaggcgggagcctcacttgaacaggagttcaagaccagcctaggcaacatagtaagacccatctctacaaaaaatcaaaacattagccaggtgaggttgtgcgcacctgtagtcccagctacttgggaggctgaggcaggaggatcacttgagcctgggaagtccaggctgcaaggagctgagattgtaccactgcactccaacctgggtgacagagcaagttcttgcctcaattaaaagaataataacggaagccaactcttccaggaaaccatagctatgcagtaattcatggcttctatgatactagtgcattttttattaggctcggacagaaacaccacaactgtcccacttcaaatgcccaggaacaatgtagacaaattccaaagaatgggttgtttgctgtgaacaccatggaaagaaaaaaggcacagagtctgactttatcttttggccctgagcctagggccatcctgccctattgtaataggaaaggacagtctcaacagcagagtcaccagcactccctcagcttcacagcaatgcagtaaagcccccggtggcctgttccctggggcgcattgtcacatacactggcagaagctttgaaatgagaagtgctacatttaaaacattaaaaatttaaatatttcagttacgaccatgtaacgagagagacttaaggttccaagaggcagaatcatgatgtttttaactgtgcttactagacttaaatgtgttcctagataaggcggcctcagcacttccatcaggtttccagctatgcctgggaggactcccgctcccatcaccttctggcagagttgaagaatcctttcccaaatatctaaagaaattgggtaaatatcagcaaagcaaggttcttctcgtggggaggtgagtagaccgacggtgcccgtttgcacaatgtgctccgtgctccagctcagtgcccagcgccactctgaagtctcgttttcttcctgccgtgccgttgacagcacagctttatgtgtagttcctggaggctccttcaagcgttcaggaccttctaaaatggaagccatgttctacttgctaggagggtcagctgtctgctcatcccccgtcagccacagccttactccaggtctctgggaatcttgcatcccggccctgcttgctcctgtgtcctcagaccccatggtgggtccatcgagcccttcaggggccgagatctcagtgggaccctgtctctggtgccagggttttgcctgtgacgtgtcccagctggtactacagactctccatccactttgtcctgaggatgctccagcatccgtcccggggccagcgccctcgttgcctagagcaggcctgcttgcggctccctgtgcagtttctgatgctctgttcctgcaagggttctcgtttttgaagacactactcctgggtcccagaaattcttttaacctagtttttatcctaaccacagaaatgttaaaagtattccttcttccttgatggcaaccttacgaaactttgcttcctgaagaacaagtcgatgcaggcggagcacacgaggtgtatgacttctcagcggaggccccactcataggtgacccctcctcctcccactacccctccctcactccagccctgctattcccactgctgccaactccacagcctcaactttgtgtgtacgttttaaatactagcaccccccacacttttctcaactcttctcatcctctgctctcgccacgctgacttcggccaaacctacaacgtaacccaacatggtgggaacagcgttccagacgcctctcttctgagctctagacccctggcacgaccctgcagcctgcccactcggcccgcagaagctccactgcagagacttcatcctttttctcttccccagaaccattccaccaatatctcctcactcggaatggcagctacccgctcccaggcgcccacaccagagccccgcgccatcctcacgctctgcagcctgcccggctcagggcttcaatccagcagccccagccaggaagacgcttcgctttcagaacagaacgacctgctattccctgaccttgaaatgcatgcgcctgcctcgatgcttcctaactgctgtgcgttccgccgggacctcgtccatcccaaggccgcctggcctgctccaggaagttctcccgccctcttgcccgctgtgggagtgcgcagccccgttctgtgttttcttggtacgtgagtctatcagagcatttctcactttcatttctaagctttcctttcacctgaaggtgggaactttagcttgcaactatttctccagcacaaaagggagggaggacgggcagaatgcagagtgccaggtggtcacctccctccccgcaatcccccctgctctgctgggtccagagggctgacccttctggtctcctggctcttgcttcatttcagccagtgggagctgtggggggaggccgggaggcaggacaagggacctgggtgtttctgctcctgctgtctggtggtggagcggctgcctgtgtctaggcctacggctccggacgctgcttctcacccttcgggctcagaggtggccgtgcccctgaggctgccaacaccgtcatagtcccttccctcacagctcttcaagaagccagagatgcgcgccttctcatttccctgcggacccccactcagacaggaaggaaggatttttggaaacacatactcttgatagcgtaagttaatatactatgtaaaaaataatgttatttgattaaaacatccatatttataaagaaaaaacggggaaggaggacaaaaaggaaactgaaagatgtttagggagtttacaattttttcttgtcaattttatggagaacattttcagatctctaaagtgaattactttatattcatattaatgatatagtatttgggagcactttgggattacttttaggaaagtggcagaaataatacagagagttcccatacactcctcatcccgtttgcctgatgttaactgtggtgcatttgtcaaaactaaggaatgaacattggtccgttgctgttaactaacctgcaggctacttaggttttaccgggttttccaatgatgtcctttttctgttccaggacgcggctcaggcaccacgtggtgcttggtcctcacgtcctcttagcctcttctgggacactagtaatctggtagtttctcagatttgccttatttttagtaaccttgaccagttctgatttgacagtttcaatcctcattatcttcaagttttcctgtaatttttctttttctttttcttttttttttttttttttagcacattgagcctatgtgtcaaagccgttttcaacaccggcgtgtgctgattccatcctttcattgctaggcctgttcgtttttatttaagacttttattaacaggtgcttgcagtttgttacttttttgaaaaaatcaagttgtaaacttttatgacaaattaaaaatgaagttcttaaaaatctcaacttgagcagatatgaaataattttaaaacctttaaaggcgtattgagaaaaaccaggctttttaaaaaaacactttgttattaccaaaaagagacgtctttaggtaaaaataattggaaaccccatgccccacagataatgcagctagttctagttatctggtcagtggacgaaaagcaagcacttagggtcttcagctccaattttcgttcatttcttatcgctggaatttcctagttcttgtttgatgactaaacggggtgatggtagaggtagcagccgcatttgcccagcctggagcgaggaattctcagctggtggatcagctgcttctgtgtctttgccatcttgtggtttagggttttctgtgcgaccgcgtcggtaatcgaagttgcggcggccccggtgctgaggtggctggtgaccttgggtctcatctcccggattgtctttatcctcttcctcgctgtcctctccaggccgtcttgggtgaggtgggtcctgcggaatcgtggtctgcgtccccggtacactcgctgccccgctggtgtccccgctccccgcgctgtcacccccgcatcgctgctcccggccgccccggaggctggagaactgcggcctccatggaggaaagtgggactctgcggtggggcccgcgtggtggggcctggcccgcggcagcgctgtctcatccctccttccgttccccacggaggattctggtgattctgccggtgacggcggggaggtcccgcgtctgcagtggttacggtggccgcaggtttactgccttgacctgggccccaccaggccctggaacacttgccgccgcctcgcccttttctccctcaacatcggactccgcggcctccgcagctcccccgccgccagggtcctccccggggttctccttcacggcagtctgatgaacacacatcttccttggtgacgttcctgttgatgaaaccgtatctgttgcttaccctgaaccatttgttccccaaacggcgggggtgacggtgcctgggctc

SEQ ID NO: 96982 - DNA, 13594 bp, Homo sapiens
ctgccatcatgctgatgtgcagcttttgtgttggtggttctagctgtcgggagtggttgggtgtcatgtggcgtgtgtgaaaagataggaatgctcagccaagtcccagctccttctaagcctgggctcaagtgtcctggctcttcctgccttgaacttgattctcctaagctgatatttggaactttttagtccagaaactatagaccagggttttgcaacactgctaccataaatccttcctggattttatctgccagtagccacagataccactgctagctgttacatagaggatgtgtgtttaaacctccttctcaaggtaaaattctaaaaatcttttcagatgctgaagaaggaagaagcaattccatggcctggaactttagcaattgttcattcctatattgcctacaaagcaggtaaggagttatccatacccacttttttgtaagcttccccttgtttgaaaaaaatactggcagtatttgttttattctcaaaagggaatttaaatttaaaaatgaaaaccttttgcccttaactattggaggaaacaaagcaaatgaaaactttttattggataaagtggaaaacttctgtagcatttattattattattattcatttattttttgagacaaggtctcactgtatcaacccaggctcgggtgttgtggcatgatcacagcccactgcagcttcctcctcctgggcccagtcgatcctcctacctcagcctcccaaatagctgagactataggtgtgtactaccatgaccagttaactttagtattttttggtggagacaggtttcgccatgtcacccaggctggtctcaaactcctgggctcaggtgattcacctgccttggcctcccaaagtcctaggagtacaggcatgagccatcatgcctggactgtagcacttcttgggggaagaaaatgagatgtggtatctcatttatgtaaagccagacccaagccaccgacagttttagcatactgtacacagaaaaaggaaaagtccaggtgggcagattctctgcactgggttgtaggactcatgggagctctggggaaaataccttctttggcaggcattctgagcacagaggacatttcaaagaattaattgtcaaaaaccgttccttttttttttttttttttttttagcaaaagaagaagagaaacagaagttacttaaatggagttcagatttaaaacaagaacgagaacaactagagcaaaaggtgaaacagctcagcaattccataagtgtaagtaaacctcatgccttcagcagtcgatacataggtgcagagacctaggcctttccaatatacgtaacagtacgtgtgggccccaggctgtttcgggtccttctgtttattaacgtgattaacttgggcaaatgcagtttgccatccagttagagttcagacctcaggtacaggcggccagttggtaggtggtgccttacccaagctctgtaacatcctcttggctttaatcagagagaggattttcagtcttcaggctgaataagtaacagctacaacagtgtagccatggccctgcgtattcctgacagtgtgtggggggagtgtagcgcctcacctgacactgagcagacacagaccaggtcccctcgtgtgattcttcctagtcacctgagcgagtgggcccatccgtacggccctccctcgctctttcttccacaccatgctgattgcatttcccggttttcctgaccagtgtgaggaagcgggctttctagagacaagtattggaagtaagtactgcccagcccggcctgtccaagtgggaaagagggttgtatttgcagcagggggacagaggcttctcccaggcaaggagccagtcttcttttccattgagtaggtcacccttgttggagtgaagtgacctcagccctcatggataccaggtggtgccttgtacttggtggcagttgaactgtcctgcttacctgctttctcctcctcaccatacctacccatggcatgcagatttaacacctctttcctctctttccctgcctaaaatagaagccagcaggtgtgggaagctgagggcaaaagggcaaaagactctaagtccccggctgagcagaaggtgtactggctgcaggcctttgtccttggggcttcgatcctcctaaatgctgctggcctgtcgtctcacttcctgctgccctcagatggaatccagatagcactgtgtgttttccaccctggagagctcagtccagtcctgaaggctccccagttagcatgacagaagcatatcaaaacctgcctaaacaggctgcaggacagctgtgggaactttttttttttttttaaacaacctttgtttggaagtctgatggcggctctgccggtttgtttttaagcgttagtactcctgtgtgttggtgcccgcatgctctttctccctctgttgcctctgggacctgggaccccccagcctacccactccacccgccctgttccttaggtggtagccgcccactccactgaggaacacagcaaggcccaggggctgcacagcagccagcagagcttcttctccctgggcagagagaaggcgctctgctcttaggggctgccaggcctgttagaaaccaggcggctcagtgccactgcccttgtcatttgctgcagaaatgcatggaaatgaagaacaccatcctggcccggcagaaggagatgcacagctccctggagaaggtaaaacagctgattcgcctcatccacggcatcgacctctccaaacctgtagactctgaggccactgtgggggccatctccaatggcccggactgcaccccccctgccaatgccgccacctccacgccggccccttccccctcctcccagagctgcacagcgaactgtaaccagggggaagagactaaataacagagcccctctaggagaagccacgggatcccggcggcaaggagaacagaacactgaagactctagaaaagcaaagccggatttctggaaagtgcagaattcttttggttctttggttccagagagagagaagatgcttgtgccaggtggcaccagagtttgccaattgatccttcttattctgtgtgtacatgcaaagattggaccatgttacatgaaatagtgccagctggaggttctttgccagcaccatgccaagtgaaataatatatttactctctctattatacaccagtgtgtgcctgcagcagcctccacagccacgatgggtttgtttctgttttcttgggtggggagcagggacgggcggagggaggagagcaggtttcagatccttacttgccgagccgtttgtttaggtagagaagacaagtccaaagagtgtgtgggctttcctgtttctaaactttcgctactataaaaccaaaaaaaggaattgagatttcaccaaccccagtgcccagaagagggaaggggagtggctggagggagcagggggtgggacagtgtatcaaataagcagtatttaatcacctctggcgggggcctcgtgcaaggggagactgacaccaagaacagccagtaggttcttctcccctgcactctgctccctgcgcggtaaccccaccactcctgaagcctgcccagtctccttccttccctgcttggtgagtcgcgcatctccgtggttatcccgctgtctcctctccaagaacaagcagagcccgggccactggcccttgcccaaggcagggaagaaggatgtgtgtgtccaggaaggaaaaaaaggtggatcagtgattttacttgaaaacaagctccatcccttttctatatttataagaagagaagatcttgagtgaagcagcacgcgacccaggtgtgtgtgaattgaatggagacgtttcttttctctttctttaatttttgtttttgttctttttttctttaaggaaagttttattttactgttcattttactttcttggtaacaaaaactaaaataaggaatagaaaagctgtttttcaggctgacagtccaattaagggtagccaagaccttgcatggtagagtaggaatcatagtgtcagtgaggtcccgtgagtctttgtgagtccttgtgtcatcgttcgggcactgtttttttatgcaagggcaaaaatctttgtatctggggaaaaaaaacttttttttaaattaaaaaggaaaataaaagatattgaggtcttcctagtgttacttaaattaagatcaaggtaagaaacattgtaaaaaaaaattacaaaagtgctatttgtttcctaaaaacagtgatttctattaaaaaggtgtcagaactggagaaaatgccgtgtagttataattttttagcacagaccctgctgatcacgatgacattttgccgtgtgtgtgtctctagactggtgggccagtctccttgaaggacagaggcggagctccccacccttctctctcctcagaaaagaccgtgctctcttcttggtgcagggatcttgtctcctgttgtgaagcccaaatggaagcgtggatggtatcagggccctacccgtggtcttctcagattctgctagagcaaaaggctggtgcctaaataagatcccttcctttggtgctgcttttggtctttcagccaccagcattatgagtgcctgggggacacctccgagggaactggccagcggagctctgtggtgcgcacgcaccctggccgtgacaggagggtgcgggagtacggctgcatcagcccttggtgcttagaacagaggaggagtgacatgttttgagggtacgtctctgagacagagccccagcgtggccttcgctctgtcttgcctttggggagaggtctgaagctcccactcctttctctgcctgttggctccaggcaccagaaatttactccactccacccacccacaagcctcctgggtgaccctgggctagaattgctgcgcttgcctcggcttggccggttgtggcctctccttgagaaaaccagggttgtgaaagactcagaccattctctcatcttgccttgtcagaagtaaattgtgtcagatttgtgctctcgctggagacctttgccccttgcgtgcccctggccgatgggagggcggtggaggctctgtaccctggccctgctggagcatctcccccaagcccactccaggccctgggaatggccagagtctaggagaggtagaaacgatcctatcagcttctctcccacccaattaggcccagagagacaaagacagatctgaaagcaaatgcaacagagaagagacacttcttagagtaaaatgtgtctcatctctatcagccatcgcctttcatcttcccaggggcctcagaagaaggaattaagttaggctgaacaggcctcagagttaggccctggctgcttgattggctgagggggaaagagttcccttttctcattcagaaaccaaggtgctgtgtctagtcagggagccttggagatgcctggactagttggaggaatcgttggcagaggatcagagaccagcagcaggctgtctgccctgtctagagctcttcccctcaacttgtctgggcccatctgggggttgccacacaacacctctaacttaccttttcctgaaagaagttgggaaaccatcatcactagaggcctttgctcagagaggagctgccttaggagtcttgggtcggaggacggggctaggaattgaccagggctttgcctgccgccctcagcagtgtcgggtacattctgacctcgcctgcagctgggctgtggattcttcctgacattcagatgtgagctgttttgggagtcagctagtatggagtacgagatgcaacccagcccccaaacctacattctgcactcaaattccaaaacactgctttactgtaaagaagaggcccctggcacccaatctccctgtccttcactgtcccctcagacctgggcggggagggggggggggcctgtgaccacctgagacatacgctcgtgacactgccccaccccagccacctccacttgcttcctcctccttccctccgctgctctttccccacggcccagaatttagctgctctgacagccacttttgagaccagctggctttgyagtcacttcagagagctggagcggctgcccactgggccctgactgggagtcccctgccagctcctgatcaggcgctgcgccctggtggcagtgatgactgggagtcccctgccagctcctgtccaggcgctgcatcctggtaacagtgaggccatgttgctgtcatctccacctctgcattcttgctgcctgtgggtcctttttctttcatggagcctgctgggtcttgtctcacctgtgctgagctcctctggggttttgatttcttccttccttatcaggccctttggggtaagcctgctggttgtacctgacatagggaggcagttaggggcagtccctggtggggccgccctggcagcctccagctggcaccatcgtgtgcctggtttccctgcaacacctgcctctctgtccctgctgctgcttggctcaggcccaacaggcagcgtgcatggaggtggttacacacagctgtttccgtgagggtgaccgtgtctgcagcacgcttccgtctccgcatgcacggctgcctctccagccacctctgatacttctctcttggggccatcagagcctcccttgggctgtcacctcccagctcacacacactcttcagtggtttcctctcttcattctcttatagggcgtggtccttcttatttatctaaagggctgaatttaggagactttttacccaggggcaaaaggctcttagggtaatgagatggatggtggcccaggtgcattttccagggcctgggttctccagatcccgtggcttctgttgagtggaggcaactttgctctgtgtgaacctcgcccctgtccctctgccgggcacccctggcaggaagcaggactcccatcctcaccctgacttagactgtcctctgagtcagctcctctccaagacaggagtgggcagccctgggcagtcttctggccccttgctaaagtgaggggcaggaagctggggctgccctccagaaagccggggtagggactctgaaaaatacctcctctaaacggaagcagggctctccagttccacttggcgccccctcccacaaggcccttcctccctgaggaccccacccccctaccccttccccagcagcctttggaccctcacctctctccggtgtccgtgggtcctcagcccagggtgagctgcagtcaggcgggatgggacgggcaggccagaggtcagccagctcctagcagagaagagccagccagaccccaaccctgtctcttgtccatgccctttgtgatttcagtcttggtagacttgtatttggagttttgtgcttcaaagtttttgtttttgtttgtttggtttttgttttgagggggtggggggggatacagagcagctgatcaatttgtatttatttattttaacattttactaaataaagccaaataaagcctctcagcctcatggtgttgggtttggggcaggggagggtgggcaggacacattccagtcccagcctctgccctccctgactggctgtctgggggtggggggcgggggggtgcttgcccttaagggcccaggccctcctgtgaccccagctggatgtagcacctcccttgtgcactgacgccctagccccagagtgcccttgctcccccaaaccaggaacacaaaaaagatgttttaaaactttaattatgaaaaagggataaacaattcaagatgggggaaccagccccaaactggctggggcagagagagaccagtccccagccatacaatagcagcaaggggaagaccccaccccacagatgctctgccccagcccttcccagagaccttaaataatttaaatagcagggatggcggagggcaggttgccctggtgtctgcccaatgctaagatgaggggcagcgccggcccagcctcagcctcgggcagggctctggggctgctgcagggctgggaggtatttgagggcagcagccccatggtggcgggacaagtcctggtggaattcgtccttgagggcctggaggcagtcacgataggtggggctggagcggaagcgggagatgtccaggcttggagcgtggggcagatggatggtgaaggcctcgggcagcaccaggagctcatattcctgcagggtggggcagaggagcagtggctgcctggcttgcctggcctgcggggaaggtgcagctccagagaacaggcttaccctgtagcccctgagagctaaagcaagggccaaagggcagattattttaattccacagaagggggacatttctaacagtgttgcctagtggtgtggtcccccatgcaggtgtcgtgagttccctggacctggaggtgctcgagtcaaaggtggaggcagcaaggtgccctcctcacctgggcatccagctccacaatgtgggccactttgttccagccgaagcccacaaagcgaggatcatagcggggacagtctcgtggcaccaccacgtagggttcatagttggccgcccattgcacacggtacggggcctgagcctcccgccagcgggcatagtctgtgggtgcgtggcctcggggccactcgtggtacctgtgcagcagggtcgggtgggagccaggctgaggctaggagctcgtgggtagtgggggccagtgtgggcaagtgagtggagtgggcagagaagtagcctctcctacctgaaggtgtagagagtgcccgcatccagcaaggccaacagctccaccttggaatgggggaagctgaagcggtagcgcagggtctcgaatgccggcaccaccagtgctgccttgcgccggctgcccagccccagctgctcaatggaggccctgaggaggagcacccatgagcaggggagaagagcggggcatctaggactgggccagtgacactcatcagggcattagccacaggactagaccaccatgggccatcttgcctgatgcgacgggtgggcacaaccacaggtggagctgctgttgaagccggccctggcctccctgttgacagcccagagaaacagcctaatacaaaccccaattgacagaggccactgaggcccagaaaggagcagggacatggaagcctggggtcccacacatgccccgtccacgtccaccccatatattgttcccctctctgcctgcaggcccacctgaggtagtcgtagagagaataggcaggcaggaagtcaatgtcactgaggaagacgtaaggcgtgagggcctgggccaaggccacgttgcgaagctggttgacggggtataggggcccctcacggtacaccacatggtaggccacgtcctgccgggcagcaagcactggtgaggcctcgacgaaatgcaggaactgctgagcttctgcgtctgtcaggtacaaggccaggctcatggggccaggccagtgcctgcacagggcttccaacatctgcagcctatggggagagggaggtcagcacagctctgcccctcttgcacaggagctcagggaggcctggcaaacctccccagttagctgctgctgccacctcctcaagtgacttactgagcacccttcaaatacttttagagccagtctgattgaatcttcacaactacccccaccaggtgggtactttctcatttgagagagaaaactaggggccagagatatgaagacttgctcatggtcccacagcgaccgaggggcagctccgggcatctgaatgactccagagcccaagctctttccaccatatccaatgtctccaacttctggaactccctgagggacaggtagctcactaccacagcatcaggctgccagatggaacctcctctcagaagtgtccaaccccagcccatgccataccccctgggctgccctctgcaccctcaccggtccatggacagctgggccacaagggtgacatcgtgaggccgggggggtggcggttcatggggcaggaaagtgacatgcacacggtgcacagtgagctgctgctgccggaactcaaagcaggggtcttcctcgtccagttgtgccagggcctgctgcaactgagggggcaaggggtgacaaggaccggggatagggcagaacaacacatcccccagacaaggctgggtcccaccaaagcagagaggggcaggggaaggtgactccttctcacctgctcagcaccaggtgggggctggctggggcacacaaagagctctctccgcagcaggttcccatcgtactccaggaaggtcaggtagaaattgcggaagaattccacatgcttgttcttcacccgaagcttctttggtgagttccagtggatcacctgggacccaggagggtgttggggccatgggagcagggagcagaagtctccatccatggccccccaccaccacacagcctcttgtcccactcaccttgaggtcagacgcctcagagtagcagcgctcggccagtgtgtgatctgacagctgcacattccagacacaaggcagacgctgcactagccccgggtgctccttgatcacagcgttgaagatgtcctgagcagagacacccatcacatcccagcccccagcctgccacaccccacccggcaaggcttcctcagacctggtcagccagtgaggtggcaggcaggctaaggagctcccgcctggctgtcagcctccacatctgctcccagccagcctgccggagccggtccagccgcagcaggatcacacctgccaatgaagagatgctgtcatgcccacctgggacgaccagctcctgggggacatgggggtcatgaaggtgtcctttgttttttgacattggtattttctgactgttcagacatgatcatggactacttgttttttgttgttgttgtttgttttgttttgttttgttttttagagacagggtcttgctttgtcacccaggctggagtggtgcagtggcacaatcatgactcactgcagcctcgacttcccaggctcaagcaaacctcccacctcagcaccccaccacaacccccaccgagtagctgggactgcaggcatgccaccacacctatcctttttatttatttacttattttttatttatttacttatttatgtatgagatagagtctcactctattgccaaggctggagtacagtggtgtgaactcggctcactgcaacctctgcttcctgggttcaagtgattctccctcctcagcctcccaagtagctgggattacaggtacgtgataccacccctggctaatttttgtatttttagtgtagaaggggttttaccatgttggccaggttggtctcgaactcctgacctcaagtaatctgcctgcctcagcctcccaaagtgctgggattacaggtgtgagccactgcgactggtcaattttttaatgtttgtagagacaagggtctcactatgttgccaaggctgttctcgaactcctgggctcaagcgattctcccaccttagcctcccaaagtgctggaattacaagcctgagccattgcacccagcttgctcgtagactacttttgtcaatagtcaatcctcgggggtgaagaggaggcgctgtccagcttacagagcacatccatggccttctcacacttggtgatcccagggctgttaaaattatcccccatttaatggatgagaaaactgaggctcagagggagcacgagagctggccaaagtcatccagcacacacaggactgttggaactgctgtctgtctcttcatccagggttcttttcacagcaatgttcttcctgggggacttcctagcattctttgccccacccagccccaggggcccaaggaccagcagaccaccccgcctgcctcccctcaccactgtccccacctgtgttaaatccccggcccaaggcaggccagggcctgtggttcttccagaggttgcccaggtaccagtcactctggttctccacaagaccgatcgcctgcgtgtctgggaggggagggcataagggagctgtctgaagctgccacaggacctgggctcagggctggatgcagggatcctgggcaggccaggcaggctcccaggcctctcaccagaaaagtgagcaaagagggcccagagctccgagatgtcagaggcgaaggtgacatccgtgtccaggacaatgacgcgggccagctcagcaggcaaggcactgggcagcaccagcttcattagcccatagaggccggagtagtgcttgttggggatccaggagacctggggctgtgtgggggaaaggcaggagatgagatggcagagaggggcctatgagcaccagaacacatgcttgcagtgacacagaggagagggggtaaacccccaaaagagaggggtttgcgcttcagtaggtggaggggggactgatgattctcttctccaaccccaccaggtcttggagagaggagagcggtggacacagctgaggggaggggggaagggctgggcccctgccttgagctggtcggcatgataaaagctgacacggacagcaggcaccatccatgtgtggaagagcgtctccaggatgtttctggccacggcgtcagtcaccaagtggaggtgcagtggatttttccttttgggtgggcaaagaggaagcctgagaggccccagcaggagcaacatgggacagcccccaccccgaggggcgcagagatggaagcgccatctgcaaagagcttttccacgcccggctcaggatgttcttttttttttttttttttttttttttttttttttttttgagacggagtctcgctctgtcgcccaggctggagtgcagtggcgggatctcggctcactgcaagctctgcctcccgggttcacgccattctcctgcctcagcctcccaagtagctgggactacaggcgcccgccactacgcccggctaattttttgtatttttagtagagacggggtttcaccgttttagccgggatggtctcgatctcctgacctcgtgatccgcccgcctcggcctcccaaagtgctgggattacaggcgtgagccaccgcgcccggcaggatgttcttacaactgcccttctaagggaggaaggggacactgtccccgcgtcacagatgaggaagctgaagctctgagaccagcagcctgtcccgggctttgtcccttccccactcctgaccctcctccacggacacctggctgtacctgtagaagagcatggacttcaccagggtgatgacgtctcggctggagttatgccccgcacacacgatggccacatgcaagagctggggagggacgcccaggtcggcagcaggccccccttctccgctaggcggtgaggacccatgttgagctgccccaccccgcagcagagcccggaacagtgtgcggagggggcagcaggagccaacccttcatttcaaatggggaaatgaggtc

SEQ ID NO: 96983 - DNA, 38023 bp, Homo sapiens
gagacaaggtctctgttgcccaggctggaatgcagtggcacagtcttggctcactgcagcctccagctctcaggctcaagcgatcctaccaagtagctgggaccacaggcatgcaccatcatgcccagctaatttttgtgctttttgtaaagacgggcttcaccatgttgcccaggctggtctcgaactcctgggctccagcgatcctcctgcctcggcctcctaaaaatgctgggattacaggcatgagccaccatgcttggccaacacaaagatttttaaatgaatataggaaggatcacttgctattgcacttacgttcaaggaaatttattgtgattactaatacatatggcaccaaacctaggtggcttatagcaaagtttccctttaacttccagtttgcagtgcctgtcacaggccaggttctcagctagcatttgtggagggatgactggccttgcccctcctcgttttgtgctcactaccttgttgacataaaaaatgttctcaagatcaggcgtggtagctcatgcctgtaatccccgcactttgggaggccaaaggcgggagaattgcttgaggttaggagtttgagaccagcctgggcaatacagcaagatcccatctctacaaaaaataaatattagctgggcatggtggcatgcacctgtagccccagctaattgggaggcgtaggcaagaggattgtttgagcatgagaggttgaggctgcagtgagctgtgatcaggccactgcactccagctccagcctgggaaacacagcgagactctgtcttaaaaaaaaaaaaaaaaaagaaacagaatgttctcaccccgtttttctccagagtttccaaacagcctgcctctgaagcagccctcttctcaagcatagtattatgggctgaattaggcccccaaaagtttgtatgttgaaaccctaacccctagtacctcagaatgtgactgtattcaaggtctgggtgtggtggctcatgcctgtaatcccagcattttgggagggcaaggcgggcacactgcttgagcccaggaatttgagtccaacctggacaacatggcaagacccagtatctgtaaaaataaaataaaaaacaacagccaggcatggttgtatgcgtctgtgatcccaggtagtccagaggctgaggtgggaggattgcttgagcccgggaggtgaaggttgccgtgagccaagatcctgccactgcactccagcctgggtgacagagcgagaccctgtctcaaactttttttttaattaaataaatgaaaaataaaaataaataaaactacaagggcaactgaaaccccaagtgagataatacatttgctcttcatggaagaggacaagtgagtaaaccctgctcttctgtggtggggaggccatagttagaattgaaggggccccaccagaaacagaaatggtgggaagtggtggcctctggaggcaaagctttgggggctgtggacatctgctgagaccctggctgcagacatggcttcccttccgagggagttcatgtgaaagtcgaggcccccaccggtattagaggagcagccatctcttttgctcgcagttaaacaagtgctctcgcagtaggataagccacaaaggagacactgtaggagaataaagaggaatccttctggaagccaatagaaaaaaaaaaaaaacaatgtggtcagccctcataaggctagaaccagaaacttagttctctgaagccaaggcactgtaatttccctccctctgatgacagtcacaccacagaaagggagctgtcgggaggaagaagaaggagcccagaggcacggctcatacctccctgctggaaggaggggtaaagggcacgaaagtcctttgagaagagaggaaggagaaatagaaatgaataagacagcaccctacaccaaccaacttagagtttagataggaatggagacatatttctgaaaatactggaaacaatcacagccaaataagaaatccagttcatttcaacactgaatagttgggcactgtagcgtattcaaggataatttttaaaaattaaaaagttaaatcaggctgggcgaggtggctcacacctgtaatcctagcactttgagaggcggagacagcaggatcatttgagctcaagagcttgagatcagcctgggcaacatgggaaaacaccgtctctacaaaaaatacaaaattaggctgggccctgtggctcacgcctgtaatcccagcactttggggggccgaggcaggtggatcacgaggtcaggagttcgagaccagcctggccaacatggtgaaaccctgtctctactaaaaatacaaaaattaggggagtgtggtggcgggtgcctgtaaccccagctactcaggaggctgaggcagaattgcttgaactcgggaggcggaggttgcagtgaggcgatatcgcaccactgcactccagcctgggcgacagagcgagactctgtctcggcaaaaaaaaaaaattcatattagcccccagagaaaccccacaccctttagctgtcacctacctaacctcccatgtggatttcacggaatcatacaatactgagtcctttggacctggctgattttatttagtaaacgttttcaaggtttatcgatgttgtagcatgtgtcactacttcattcctttttacgactgaataaaactccatttggtggatttatgacagtttgtttattcgtgcaatggtttttaatggatggacatttgagttgttttcaccttttggttactgtaaataatgctgctataaacatctggtgtaagtttatacatacgttattaacttttgttttagagttggggtctcactatgttccccaggctggtcttgaactcctaggcttaagtaatccacccacctctgcctcccaaagtgctgggattacaggcgtgagcccactgtgcccggcggatttttgtgaggacgtatgttttcacctctttcaggtgttaacttaggcctcttttacggatgttcaacaagcaaacagcttttacacacgtgagtcaaggcctctctgtaagttctgagagctgttccccaggccctgaaccctgacccccaaatctagcaggttaagccaaaattctcctcaacttcaaggcctacttcattcattatgcatccactcaactcacatttctctatcctctgctatgggccagacaccctgcaatgagctgggatgaagcaggggaacaccgcaggtaaaaatgcttgcctgggtggggcttaagatccagtgagggcaggaaggaacatatacaagtaaatatgctgtatgttcctttctccatgaagctttcctggatgttccaggaagggacgaattctactctggtagtaatatatttcttttcttgtcttttgaggagtcttgcccatgttggagtgcaatggcgtgatctcggctcactacaacctctgactccctggttcaagggatcctcctgcctcagcgctcgagtagctgggattacaggcccgcaatgccacacccagctaatttttgtatttttagtagagacggggtttcaccatgttggccaggctggtcttgaacttccaacgtcgtgatccgcctgccttggcctcccaaagtgctgggattacaggcgtgagccactgcgcctggcctatttctttttttcttttcttttcttttgagatggaatcttgcccgggttggagtgcaatggcgtgattttggctcaccgcaacctccacctcccgggctcaagcgattctcctgcctcagcctctcaagtagctgggattacaggcgcgtgaaccaccacgcccagctaatttttgtatttttagtagagactgggtttcaccatttgggccaggctggtctggaactcccgacctcaggtgatctgcctgcctcagcctcccaaagtgctaggattacagtggtgaaccaccgcgcctagcctgtttcttttgtttcaaaagtgatttttacctctcaaaagtgatttctataatgacactgatggaaaattccatcaaatagccataacgcatgtcaagcactctgctctgcataccttctgtcacactctaaggatgagagaggggagagttatcctggttctggctgtgtcctccccattttggccatcttatgagctccttatagaggtctgaaatgatttggagtccagagtccatggctgtcaggatatgactagggtgagcaggcagttgggaccaccttgacctccagcctcctggtcctcagttcctcgggtatcccactctgctgggggcttagtgaccatgtttgggctccagagattattttttccttccactcctatccttagtttgttactaaccaggcgggagtacaggcatgtctctgaagacaggctcagggctgtgtgacagctgacgaccaggctgcagggaaccaggtcccatgcagtcctactgccttctttttttttttttttttttttttttttgaggcggagtctcgcttttcgcccaggctggagtgcagtggcacgatctcagctcacgggttcacgccattctcctgcctccgcctcccgagtagctgggactacaggcgcccgccaccacgcccggctaattttttgtatttttactagagacggggtttcaccgtgttagccaggataatcttgatctcctgacctcgtgatccgcccgcctcggcctcccaaagtgctgggattacaggcgtgagccactgcacccggctactgccctcttactgtcgccacagcctggataaaatacgattcttctgagccttttttttttttttaatacagagtttcactcttgttgcctaggctggagtgcaatagtgcgatctctggtcaccgcaacctccgcctcccgggttcaagcgattctcctgcttcagtctcccgagtagctgggattactgacacgcgccaccacgcccggctagttttgtatttttagtagagacggggtttctccatgttggtcaggatggtctcgaactcccgacctcaggtgactcaccggcctcggcctcccaaaatgctgggattacaggcgtgagccaccgaacccagcccctctgagcctcttgaatacaactggggtcatgcctgctttgcaggtttgtcttaaggattaaagctgtttggggagtgtctggaggagggtgagtcttgagccaacccctgcatctcccttccagggcctcccggtaataaaccccaagtaaatgtgcactttgtccgtcctctcggagcaggtctccgggtactcctgtgccaaaccgatttccgcccccaaggtccttctcctcttagaaatcctgacgcagctcctaggttccttcgcagtgacagccactcttttctatttgtacgtagctgtagtgttttgtgggtacgttctctgaacaacaaagtggcccttctaaaggctgttctgtggggtccacagcctcgccacccccagcctctgcagcggcttctgaatgaatgaaataagcgacggcgccctctccaccaccccacccccgccaactcggcaggcagggatcccaggcgcgggttctggcggaggcggtcccgcgaggcggggggacttttctaggcggggtgggggccttgggaccacctttaggggctttttccccatcccctggccccaattcgcagcgtttcgccacccagggcccgcagggctccaagcccttcttccccagcccgcgcgctcaggcccccgcccgcccccggcggtggccccggaccccgagcggaagggggcggggggtgtgcggggccgggaagcggggagcgcgggcggcggaaggtggcgggagggggtgggggctgggaagcaccgtgcgcgggcggcgggagggcccgggcggggctgcgcggtggtcacgtggggcggggccgggagggtacttagggccggggctggcccaggctacggcggctgcagggctccggcaaccgctccggcaacgccaaccgctccgctgcgcgcaggctgggctgcaggctctcggctgcagcgctgggtgagtgctggggacccggggccaccgcagcgtaagtgaccttggcggggacggtgctacccggccgccgagacgggttcctctgcgccctcagtcgggcccaggcgcggccccgcggcgtmcctgggggccggcggggagccgggaccctcgggactgtccctgacgggcgggctggggtgggagtccgcgcgctccgaagcgtcggcgagaaaagcagaaaacarctccgcccgccagccctctgccctccgctcccctccccgggctgtgcgccggaccccggccctcggagcggggacgcggccaggaccgccgagggaggcgcctgcgaggaagagctcggccgggtccggagactgctgcctgggaccgcgctcccagcgcctgggcctcggtgtctccgggccaaactgccgacataatcgcatctgccggcatctattttcggtttatttccccctcattgcgaaggatttgcctggccaactttctgcgcaagatcccacgcaattcctgggaccccagaagacaggtcctgttgaagaacaggaatctggcactgggtgggctggggaggaagccgcacggtgttaaatccataaacaggaagagaaaccagacagcgaaaccaagaggcgaatgggcgattggatgccggtggggagaaggccgggggcgcaccctgctcctggactccagtaaagggaggccgggcagagtccctggggcgccacctccccctcggttagtagccctggaggccggggggagttggcctctggggagcagtgggtgctgggtgtggggcgttgcaggcaggctggggtgggcgacccaggtggaagtgaattgcacttggcttcctggtgggcctctgtcacccccttcccaggcgctgagaaagccagcaggctggcaaagaaaaggaccctagcgcaggccccacactcctcctcctaacggacgagagaccccccaaacccactggagaagtgacgctgtggggttcaaatgcagacctggcacctttttgtagcctggaaaaacattcccactgcctgctgccggaggagaggatagctgagatgcactctctttgaatccaaacgttcaggaacgtaaggcgaagaggcctaagagggcgttggctggctctgtctctcaggctggagcacagtggcgcgatctcggctcactacaacttccgcctcccaaattcaagctattctcctgcctcagcctcccgagtagctgggattacaggtgcccgccaccacgcccagctaatttttgtatttttagtagagatggggtttcaccatgttgaccaggcagatcttgacctcctgacctcaggtgatccgcctgtctcggcctcccggtgagtcacggtgcctggccaagaactgtttcttgttggctctggtgctggtgacttagaacccgccagctcctggagaaaggggctgggccgcccaccctgtgtagctttcccaaagacagagtcaaacgtctcctggagaacagaggcttcccttcgtctttggtcatttgtcctctagctgggggtaccccctggtggaaaggcacaggtcccttgctccccaggtggcaacgcaggccagacacggccctggcacagctctcctgggtgttggctcaggacagccctgtttccaactggttaggcggtgaggggtggtggccctttggttccaggttgaaactgccyatgtggtgctgatttagcagactggggaggctctttttgtaggcaggttcttttctttccccagctgctggacctgggagttggaagagaagttgcacccattttaggggtaacagatattttctgttgctcttggttggattgggaagtgaattgaagggaggtcacgtttcaggggtgccttgggatgtctgtcagtgattttcttttctttcttaawttctttttctttcttttttttttttttttgagacacactccctctatcgctcaggctggagtgcagtggtgcgatctcggttcactgccacctccgcctctcatgttgaagcaattctcctgtctcagcctscctcccaagtagctgggattgccagtgcccatcaccacacctggcttttttttttttttttgtatttttagtagagacgggctttcaccatgttagccaggctggttttcgaactcctgatctcaagtgatccgcctcagcctcccaaagtggtaggattacaggcatgagccaccgcgcggtggaggggtaattttcttaaatctggtaatgagttgtggttgtgtagagtaacataccgtcctttcgagatatggactgaaacattgagagggaggagttacaggtatgycgattcttcttttctctctctcctttttttttttgaggtggagtctgactctctcacccaggctggagtgcagtggcaagatctcagctcactgcaacctccgcttcctgtgttcaagccattctcctgcctcagtctctcaactagctgcgattacaggcatgtgcctccacactcagctaatttttttatttttagtagagattttttgtctctcctaaaaaaatccaatgtaaaaaaatcccaatgtgggggttttgccacgttggccaggctggtctcgaactcctgacctcgtgatccgcccacctcggcctcccaaagcgctgggattacaggtatgagccactgcgcccagtctgctgcctcttttcaatggtctggcctaaggaaattattggaaacatgtgcggttgagtgatatttactgggcacttccacatggtccatgtaaagggagatggttggggtgacaggcagttgagtctaggggaggcatgtacagatgtgctgtgcctctgggatatcagggtggcaggcagcagtctctacgtctggtcccaggctgcctgagaaagagcatgtgggaggcaaaccttgcgccctggcatggttgttaatgtttatatttaccctagcttgtgtggggtaggaggtttagggatcaaattccactctgtgtttagacatttttttctttctttttttttttgagacagagtttcactctgtcacccaggctggaatgccgtggcacaatytcagctcactgcaacctyacctcccaggttcaagcaatgttcctgcctcagcctccggagtagctgggattagaggcatgcaccaccatgcctggctaatttttgtatttttagtagagacctcaaatgatctgcccgcctcgcctcccaaagtgttgggattacaggtgtgagtcactgtgcccagccatgtgtttagacttttaactaatctcttttttagtttcaagccttatcgtccgcctctrtagaccactcctgtgcctgtttcctgatccttccaagggccattgtattccctgtctgctgcccctcttttggattctyctgcacatttttttgttcatgcattcattcatttattgtttgattaatgacagggtcttgctttgtctcccaggctggtgtgcagtggtgcgaccacggctcacggcagcctcagccacccagatgtaagcgatytggttcccacctcagcctcccgagtagtaagtagctgggaccacaggcggtgcccaggttttttttttttttttttttttttttcgtttgtagagacagggtctcactgttgccaggactgctctgaaactcctggtttcaagtgatccccttgcctcctcccacttaggccttccaaatgctgggattacaaggcatgagtcacctccaggcctttttgtacttttaaaactctgcatcagtgtataaacaatgttattaaagtttatatgacttcagttacactacatggatcctttttcactcacggttgtgagatttatttctgttgctacatccagttctagtccatttgtgttaagtgcccagtgtgtttatctactgagggacagttatgttatttcgtgttcactattatcccatgctacaataaatatcctgtgtctcccagatasttagaagagtttctgcagggcacatgtgggagagtttgtttctgggtcatgaggtgtgttcatcttccatcttgctagatgctggcaaagggttctccagtgtggttgcatcaatttactcgcccagcagtgtgcagagttcctgttcctcacatttaccaacactagatagtaccagactttgatttttgccaatctgatgggtttgaagtggtacccctgttttaatttcatgaccagaaattcaaatttaatctttgctgtaggacaacagtaacccacttatgcctagtgttccattattagaacgctaagcatgtgggagtttttacatcatactgctcaaggtcatcgccaaggtctgatgtttttactcrtgcaaaaatttaaaaaattgcaacctctggcataaatgggttgagtgacacttttcctgtttttattgttggtcagtgatggcatatttgctggktttttttgttttttttttgaaacggagtctcactgtgtcgccaggctggagtgcagtggtgtaatctcggctcactgtaacctccgcctcccgggttcaagtgattctcctgcctcagccccctgagtagctgggattacaggcgtgtgccaccacgcccagctaatttttgtatttttagtagagacgggatgtcactatgtttgtcgggctggtgttgaactcctgagctcatgatctgcctgtcttggcttccctaagtgctgagattacaggcctgagccaccgctagcctatttattttttattttaaattttaattttctatatagagacgaggtcactatcctgcccaggctggtcttaatctcctgggttcagtcaatcttcccaccttggcctcccgaagtgtcagaattatagatgtgagccactgtgcycagcccagaactgatgttttctaaatgctgggtgctgagaaggatgtgtggctggcagtcttgactgtgttatctgtctttaccaggccagtaacttctttggtctggtcatcaagataatctagcatcaccagcaagcatgcatggagaaggatgggcccaatgtggccaagatggtaacgggaccagtagagagccctgtagaagacatctagatattctgccctaagagcccggagggccgggctgtctcatgaccctctgacgtgctgacctggactctggcagaatgtgcacacacacagtcacacagcttcstggcttgcgcaagtcccaggagggcggtgccagccacaggcttttcccattcgagggttggaagcgtatcatcaaaccacatcagagtgctgggggccacctgccacccattcccaacccactcagccttcctggtgtttgggacatgctttgctttggcagtcaagacagcagaacaaatcaacttttaaggccttgtcactgatagtacaatttccattatttttcatccaaattaggatacttctgaaaatagaaatgatgactctgggatgcaaacgttggctgtcctatgtataaggagatggcttttcacgctcccagtgactgaggaagtttctcccagatggcgctgctctgagcctggtgcagggtaggcactttcaaaagagtgtctccttgtatcttccatcagccttgcgagatgggtatctgttcccagggccccaagggaggaaaacaggacctagctggatccaagagctaggcctttctttttttttttttttttgagatggagtctgactctgtcgcccaggctggagtgcagtggcgtgatctcggctcactgcaaactccgcctcccgggttcacgccattctcctgcctcagcctcccgagtagctgggactacaggcgcctgccaccatgcctggctatttttttgtatttttagtagaaacggggtttcaccgtgttatccaggatggtctcgatctcctgacctcgtgattcgcccrcctcagcctcccaaagtactgggattacaggcgtgagccagcatgcccggcccagagctaggcctttctgtggctggccttcgcgtcagcctcaactaccctggtgtaatctcgcctgcggttgaattagggaaccgccgtgttctgcaagctggagaggcagaacactaatgagcagaacactaatctcattgcaatctcaaaggatctctaaaagcttttataaagcaggcccaaggtcctttggtatccgatgcagacgtggtgaatgcattggctctgtcagcatctgagcaagtcagtaacagaaatggggagtaaaagctttcagaactttccagaatattgactaaattgtcttgtttacaaccaacaacgacaacaaaaaataactgctgagggccttcgtagtgtctgctrtttcaagtgtacagtagtcattttgtctgcaggatgtggggttgctgtggctgaccttgtacaatattccactcataggtgtcttcaggcctatggagagcagcttgcgtgggctgggcctgcagtacctggtttgcatagatgattggcaggtgggcagcacggggaaggacctgtgagtggccaacctggttcaggtgagggaggtggagtggggcttctctgcttcccctggttccctggaagcctccaaggctggtgagcatcactgctgcctctgcacacctgtgtgctgggtgggttttctgacaggttttcagttgcttcggggctacagctgcagggagcctgctccatgggacagatgggcctctggtgcccgttcatcaggggactgatgagaccgaggcctgagagccctttggattttgtttttgtccttaatttaatcataagccaagaatctactaaacacagttccattaggggcaaagacgtaacacatcagaggccacagcaaggctgtgattcatactcaraaaggaaaggtctctgggtcacaacagagcatagttgaggtcagcacactcccacccagtgcagggctgctccagcattgaggtgtgtctggcaggttgaagtaggggaagatgaaactcgccgaagtcttgttttgtggttgcacttaagtggtcaaaacttcaggagcaactgccgttattagcggtgagtgccaagactagtttttatagaagagaaagaaacaaagtactctgggaaggtcttactgagccttcacagtctccccacctttccactgttcccgtgctcttagccgctctgctggcctataaggcacagtcttcatttgtggcttctggcaaaatgtaagcacttgacttttgtttttgttttgttttgttttgtttttttgagacggagtttccctcttgttgcccaaggtggagtgcaatggtgcgatctcagcccactgcagcctccacctcctgggttcaagcaattgtcctgcttcagcctcccgagtagttgggattataggtgcacaaccaccacgcctggctaattttttgtatttttagtagaaatgggatttcaccatgttagccaggctggtctcgaactcctgacctcaggtgatccacctccttggcctcccaaagtgctgggattacaggtgtgtgccactgtgcccggccaactttcaattctttagagctgactatgagaggagccagcagtatagccacagcaccaacgaatgaggaagagcaaaatactgcatgacagctttgctaagaattctttcactttttttgtctatcagccaggagctagcaacttggcttatttggaaattttaagtgtacatatcctgtctccttaaatcctttacagatttaaagtgcagtctacctgagggctctgtgaccatgtaagaaagctttttctttctttttttttctctgagacagagtgttgctctgtcgcccaggctggagtgcagtggtgtgatcttggctcactgcaacctctgcctcctgggttcaagcaattttcctgcctcagcttcctgagtagctgggactacaggcagcaccaccatgcccggctgagttttgtatttttagtagagacagggtttcaccatgttggccaggctggtcttgaactcctgacctcgtgatccgcctgcctcagcctcccaaagtgctgggattacatgcgtgagccattgtgtccggcctttttttttttttttttttttttttgagacagagtctcgctctgttgcccaggctggagtgcagtggtgtgacctcagcttactgcaacctccgcttcctggattcaagtgattctcctgcctcagcctcccaagtaggtgggattacaggcacccaccaccgtgcctggctaatttttgtatttttagtagagacaggagtttcaccttgtttagtagagacaggctggtctcgaactcctgacctcaggtgatccgcctgccttgacctcccaaagcgctgggattacaggcatgagccactgtgcctggccagaaagccttctttattgagcttggtggcagcccaaaactgattctttaagggtgtcaggacttaacacctcctgtgacttagccgcacctcctctcctttgactttcattccacctccttccaggatcgcaaggtccctatttgtcctggaaacggcttcaaggtagtytagggtgccgtttgccgggggaggaaggtgctctggttgatagagtcgcctggccgcacactctttttggcacataacaacgttctacagagccggggtggagcgtgctttctcataagtgctctgcaggtttggagagagaggatatgaggagcacccttttctgttttttttaacccaaagattagcttggaaaaggggcagaggggtgcactggaactcaggtctgcctaagcagcacagcagaccaaggtctagagatgacatctgctcgcagctgttcttccaccagcccgcatcctggaaaggggtcttgtggcacacaagagttcacatccttccctsgtgaaataaggactttgtgttcatcatctcttgtaagaagcagagcagaaagcacagaattaagaaataaaagggaagtgggtgcctatataaagggaagtgaaaatgggttgctgtcccatgcaaagaccctggaaagctgttaacagctcagcttgtcactttcaccatctgcatttgtccagagtgattgagatttgcgttgttgtggagagaaaggcgcctgttgcacaatggagtgagattgccactgctgtcaggacctctgtgtttggcttgacactttttgagttctcagcagtctcgggaccctcaagagtggaagcatttttggatgttaaatgctggggttaattgaagttaagagcttgttttactgggcatggtggctcacacctataatcccgacactttgggaggccaaggcgggcagatcacttgagtccaggagtttgagaccagcctgggcaacatagcaaaaccccatctctacaaaaaatacaaagctgggcgtagtggtgtatgcctgtagtcccagctccttaggaggctgaggggagcagatctcttgagcccaggaggcagagtttgcagtgagccatgatcgtgccactgcactccagcctgggcaacagagtgagatcctgtcttaaaacaaacaaaaaaaacaaacttgttttcatttaractcttcctggcgttggggacctattggaataggtttagtgtgaactgagagctagaagtgttagaggagagagggagggaacagagcccgctggagcgagtgcccttcctaccttatcactgcatgccaggcatgtgccggcgctttggtcctcctcatttcattcttgactgccacctgagacacgatggttactagctccattttataggtggtgaaactgaggcttggggaaggtcagaccccaagggtgccatttagtcagtggcagagccagatccaaatgcaggtctcctgactccaagtgcagggctcattttatcgtccggttgcagcacgctggcggccccttgagccccaacctggataccataggggaggagcagagaagccaggaacaccacagccctgggccaaggtgcggggctgaaagaacttcccagcgctcagcctgggactagtggaatgggctgggccctggggctggcagcggtggccccggggagcctgggaatgagtagggagcacagggaggtgtgggagggcctgggaaccatgaaaaggagggcgggtgcagggaagtcgcctgctagtgaagtggcgagggggccctgtgggactccagggaatggccacggcaggttgtcctccaggagttgagagccactggacatggcagctgcctgtgttctcagccaccacagtaaccaaagaaatcttggttttaaaattcaagttgccatggaaacgctcccatcctcgacttggcttattatttaaaataacatctctacagcacaaagcccccgggtacatccaaggacactgctgtctgcccacgagacatgctaacctcacagtgtggaggctgtgtgggtcactgacatgcatggccacgtgagacgctgcctacccacgagtcacggaaaaggggaagattattaagaaagtcactaggggccaggtccagtggctcatgcctgtaatcctagcactttgggaagctgaggcagttagatcccttgaagccaggagttcaagaccagcctggccaacataacgaaacacggactatactacaaaaattagccaaacgtggtagcacaggcctgtaatcccagctactcaggaggctgaggcacaagaatcacttgaacctgggaggtagaggtttcagtgagccaagattgcgccactgtactccagcatgtgccacagagcgagactcccatctcaaagtcactagggaggaagcctcattggtgggaaggaagaccaaattggaaatgctctgaggaatcattaaaacaaatgtccttttatcagtttggtggctcagggcctttagtaatactgccaactatttttcctagaagaaacaaaactgaaataataggaacatactcacttttttttttttcttaaaagtaagggtatgttgtgaaaaaaagtctccccaccgtagtgaccgactgccgtrcatcttccttggcattttgcatgtagtggcaggagtgttcctacatgtgtagattgctgagagggtcagatgcttatggtcctcagtcacccacagcttgctttttccccacttaacattgggacttggggcatttttactctgttaatacaatagaattcacttcaactagttggttttttacttttattttattattattatttttagatgaagtctcaatctgtcgtccaggctggagtgcagcctctgcctcctgggttcaagtgattctactgcctcagcctcccaagtagctgggattacaggcatgcgccaccacgcctggctaattttttgtatttagtagatacagggtttcaccaccttagtcaggctggtctctaactcctgacctcaggtgatccaaccgcctcggctacaggcatgcgccaccgtgccccaccaactaaytgcttttttaatggttgcttcatattctatttaaccacttaccgtaatttaacagttactctgttattggatacttgattcatttccaggacatgcagatttagaaactggtgggcgttgctggttgatgtctcggtggttgtgcccacccaccccaggcactcattatcatgccttccgtttccccacttcctaagccctgcaagaagtgccaaactgtccagcccttgccaatctgatacatgctgaatacctccttgattttatctgcacctccctgaggttgaacttattttactttattttattttatttttgaggcagagtctcactgtcacccaggcaggaatgcagtggtgaaatcttggctcactgcaatctccacctcctgggttcaagtgagttgaagcaattctcctgtctcagcctcccaagtagctgcgattacaggcacctgccaccacacctgggtaatttttgtatttttagtggagacggggtttcaccatgttggccaggctggtctcaaactcctgacctcaggcgatccacctgcctcagcctcccaaagtgctgagattacaagcttgagccaccatgccggttgaacttatttttatctgtgttggccatttgtagtttttctattatgctggttccatttttctgactttgaagagccttttgtggaaacgaagcctaaagtatatgtgagtactgctttgtttcgtcagtttttgttttaaagagacttttcagtgtaatgcaagcattttcccttgaaggctgtgtttcctgtcaatcctaagctttcctccagcattacctttttaaaaaactttattttctatattgatggggtctcacaatgttgtccaggctggtgttgaacacctggcctcaagtgatccacttgccttggcctcccaaagtactgggattataggcatcagccaccgcacccagcctgtttttcaaagggcattgatttttttcataaaactttttaaattaagatctgtgggcctggtgcggtgcctcacgcctgtcatcgcagcactttgggaggctgagtcaggtggatcacgaggtcaggcgttcgagaccagcctggccaaaatggtgaaaccctgtctttactaaaaatatgaaaattagctgggcatgatggcacatgcctgtaatcccgctgctcgggaagctgaggtaggaraatagcttgaacccaggaggcagaggttgcagtgagccgagatcatgccattgcactccagcctgggggacagagtaagactccgtctcaaaaaaacaaaacaattctgtgttgcatgtggtactttttgtgtgtgaggagtccagtgtgaagattcagacttcaggcagccacttgtacaagcactgtcctgttkcctctctggcctcacctaggtaacgctgattcctccacggaggatgtgcttctgagtggtccgttgggtgctgtgctgatgagcatcacccagcattttacgacacatgtgctgccccagagggctgggctcccgtcagagctcttttccactggctgggtgcggtggctcacacctgtaatcccagcactttgggaggctgaggccagtggatcacctgaggtcaggagttcgagaccagcctggctaacatggtaaaaccccatctctactaaaaatacagaaattaggtgcgtgtggtggcgcacacctgtaatcccagctacttgggaggctaagacacaagaattgtttgaacctgggaggtggaggctgcagtgagccaagattgtgccactgtaccccagactgggtgacatggcccacagaccaagaccctgtctcaaaaaaaaaaaaaaagcttttttccagagccatcttgctgtcctcatatatttattctcctagatgaattgttgcttaagcaacaatgaagtttaaattgttcttcagatagaacccctaggtgccaggcagtttgttaagcactgacaccgcagtcctgtgactttcatgacgacctgtgacctgtgggaggtagaacacctcacccacccgtgggagcccctggagtgactgacaggaacccctgcctcacccagctccccgcgccgcggctctccccagccctggatgcaggcgcccaggagacatgtattgcttttgttgagctgctcacttaggagggtgactcagagttcaagctggaaagcactggcttgtgactcatgagccagtgcaagatcaaacggctggggcatcgaggtgagagttttccttctcagaagcctcatctccgcagccggaagcagagcccttggctgactggaaaaaccagagaggccccgggagtgggtggatggccagcccagccccacctctcagcstcaacctccaccagcccacaccgagcttgtttgtctgtgtcctgtcgaaactaggactcctggattgtaacttttcttacatttccctgtcccctgggtcctccacttagggtgtaatcacacagacaggctcttaactgtttcatatcactcacttgggaaagtgtctcaagctgttctacaaatccatgcaaaggccgtttaaaaatagcagcgaaggccctggactcggtctygtccagcacagccccttggctctctctctgggctctggccgcctggcccccggggacccacacgaggtcatggcgtgctkcgggcagkggggcggggatcccatagacacctcagctccttagagttctccgcctgggccaggacgagcatgggggtccccactgatgcccgagacrgtgcccctgtgtgtgtgagccctcgacccacataacagagaggtgtcctgatgccctctgtcctctccaggtgratctaggatcyggcttccaacatgtggcagctctgggcctccctctgctgcctgctggtgttggccaatgcccggagcaggccctctttccatcccstgtcggatgagctggtcaactatgtcaacaaacggaataccacgtggcaggtargctgtggggctgcgtcctatgtatgtcccctcccaggtcggtctgtgcacactgactccaggaatgggaagccagccctcactgtggcccacagaacattgtcctggactgttgaaaaatggccctgaccytgagtcatgtcggctctggaccacgcctccctcctttgtcccataccccacgtgtgtgcatgagtgtgtgtgcwtgtgtatgaatatatggttgtgtgcacgtggaggtgtgtgggggagtaagtgagcttcggaagtgttcaaaaccagctagcccctgtgacgcccgccgtggcacagtggcagtttatcagtcccgcccctgattccctttgtctctgcccagccctgaccctcggactgagaaccaagaatgaggagtgagccatgttgagggctggagagggtctctgattgtcagcaaatgggagcagatcaggggagacacccactytgcccgtgtgtcactctgggctgttccccagtgccccccaacccttgggcccttgaattgggtagggyctctggttttccctgggttgggcttcgtgtgtgggcagcgtgcccatccaccgccatcccgggagacccttcagtcagtgggtgactctcttccaggccgggcacaacttctacaacgtggacatgrgctacttgaagaggctatgtggtaccttcctgggtgggcccaagccaccccagaggtgagtgcctgctcctctgcaccgctgtaatgtgagtggcaggcgttggtttggggcagtgggaagtgggagagtgaaggcctctctggcgtccgcagggctcatgctgcccagggctgccgacaccgcttgaggtacagtacttgtttcttttcatttttrtattactttctytttttattttattttttccttctcaagttattagtagagaagatgctggtgcttttttttggtttttgagagagtctcactctgtcacccaggctggagtgcagtggcacgatcttggctcactgcaaactctgtctcccrggttcaagcgattctcatgccacagcctcctgagtagctggggccacaggcttgcaccaccgtgcacggctaatatttgtatttttagtagagactgggtttcgccatactggccaggctcgtctcgaactcttggcctcagcaagtcatctgcccaactcggcatcccagagtgctgggattaccggcatgagccacccccagtgttttctattgtgcttctccaaggtgtctcagccgcagatgtgacagacaaggtctgggtccccactatgtgggcagactcaatcttgagtaatttaagggaaatctaagaaaagccagatgaggccaagtatggtggctcacgcctgtaatcccagcactttgggatgccaaggcaagcggatcacctgaggtcaggagttcgagaccagtctgaccaacatgatgaaaccccgtctctactaaaaataaaaaactttgccaggcgtggtggcgggcgcctgtaatcccagctactcgggaggctgaggctagagaatcgcatgaacccgggaggcagaggttgcggtgagctgagatgatgccacttcccacgtgaggatggggtagttaagttgcacracactgccttctgcacaatggggatgatatgagaaatgatgagaggatcctgggcagaggttgaggcaggagagcagggcaagaaacactatctggactgaataaacttatttaaaaatgagtttataatttgtggataaattcatcttaaaaaatccattacataagcctagaaagaagcgtacaatatcgcaagtcaggccaggtgtggtggatcatgcctgtaatcccagcactttgggaggccaaggcaggcagatcatttgaagccaggagtttaagaccagcctggccaacatggtgaaaccctgtctttactaaaaatacaaaaattagccgggtgtggtggtgcatgcctgtaatcccacctactcaggaggctgaggcacgagaatcgmttgaactcaggaggcagaggttgcagtgggcagagatctcgccactgcactccagcctggatgacacagtgaaattctgtccactcccaccctcccgtcccacccaaaaaaaaaatcaaaaggtgcattgagcaacagaatttccttttgttttatgaaattaccaaggacacctgtctgcagccttcttcggcatgtcttgtgctcatttccttgttaggggagtgtggcccagccaaagtggcctttgcagggattggggagggagttgtgggatcagagcttgtaatgaagaccttcctttatccagagttatgtttaccgaggacctgaagctgcctgcaagcttygatgcacgggaacaatggccacagtgtcccaccatcaaagagatcagagaccagggctcctgtggctcctgctgggtaaggccctgctggctggyggggaagcgctggagagaaagtgggagcaacactggagagtcttgggggattcggggtggggacaactctgacaaggcaagttatagaaactttytgagtcccagtttccatcagtacaaaaatcacaatccctctggccatgaatgatggcgaggattaggtggagtggcgggcagagcatccagcagattgcaagtccacgtgtacaggtggcgaagcagctccctttccctgacatgctggcccgtccgcaaataccaggagctctcactgctactctgcttcaagaaagcatccctttagtgtcagtgagctgtcttaattttgtcatttaattgtggtaaaatacacgtaacagaaatgtaataatcttagcaatcttcttttgttttctttttctttytttttttttttttttttttttggagatggagtcttgctctgtcacccaggctggagtgcagtggtgggatattggctcactgcaacctctgcctcctgggttcaagcaattctcctgcctcagtctccccagtagctaagactacaggcrtgtgccaccacgcccagctaatttttgtatttttagtagagatggggttttgccatgttggacagcctggtctcaaacgcctcacctgttgatctgccttcctcggcctcgcaaaatgctgggattacaggcgtgagccaccgtgcccagcaactattttcaagtgtacagttctgtagcattaagtacattcacagtgttgctcagccaycaccaccatctgtcccccgaactctttttcagctcgcaagacagaaactctgtccccattaacaccaatattgtagcccctggtaagccccactctactttctgtctctatgaatttgactcctagggacctcatacaagtggatcacaacagtatttattttctgggtgagctgtgttttttgttaagaaaaaaacacagccaggtacggtagctcacgcctgtaatctcaacactttgggaggctgaggcaggcggatcacctgaggtcaggagtttgagaccaacctggccaacatggtgaaaccctgtctctactaaaaagacaaaacttagctgggcctggtggcaggcacctataatcccagctactatagaggctgaggcaggagaattgcttgaacccaggaggcgcaggttgcagtgagctgagattgcgccactgcattccagcctgggcaacaaaagtgaaactccgcctccaggaaaaaaaaaaaaaaaaaccacacacacacatacaaactaatactacacattttgcagatttcaraaatgaaccsagttyccaggcagaggttcacggkggtgcttctcttgctttaaaagctgagttgggcagatgttgaggcaggagagtggggcaagtggctcatgacgcctctaatcccagcactttgggaggccgaggtgggcaaatcacttgaacccgggagttcaagaccagtctggccaacrtagcaagaccccatttctaccraagaaaataaaagctgagtttgagccccaggagcgtcccctggtgttgagagatcagttgcctacaaggtctgaggtgcccctgtggccctttgaggggactgctgcagagggcccagcccggacatggcagcctcacccggtggggctcgttcctgcaggccttcggggctgtggaagccatctctgaccggatctgcatccacaccaatgcgcacrtcagcgtggaggtgtcggcggaggacctgctcacvtgctgtggcagcatgtgtggggacgggtgagtcaggctgtgcttccacagcgggtttagtgctgagasaccctgggccscagcttctcagtggaggggactttgaggacttcctgggactgctgcgagtcagaagtgtttcggggagactccragagtctggcaggcagggcctggcaaggctgctgcttcctgggaggtgcctgaaccaaggctggcccggcagagctgtctgaggggtggcatcccagcaaaacagtcagtttcagaaaawgtggtggaatgtctggcccctggtctggtttgtgtcatcgcatgttcctttttcctgcttggggaaccagtttggggcrtttccttatgtgtagttagcggggatggctccaccttaacaacaaggtggtggcacagaactttctgctccagctgcctgcagcctcgccttggttccgcagtagcggtgttcactggcggctgcagatccgaaatgcctgagggcttaaaaaaatgcatgggcttctcccctaactagttaaatgggaatcactggcgattctcatttcagagaactggtggtgtttttaagtaccttagggaagtttagcgtctgctcagttgagaatcagtgttctacccggaagggcactcgtagcctggtctggtatggacatgaacaggagagcctcctgtcttctcccggatctttgtgggyaggggtggggctggcggttattccctgcaagctgtgcttatctagggagcgtcccttggagggtttggggtctgggaggtctgctcgcaccacttgctgcagctgggggtgggtccacgagtggcctcgggcacttgggtagcacacagtggtctggagagctggtggtgcttctctcagaggttttcattasaggctgtcttttcagctgtaatggtggctatcctgctgaagcttggaacttctggacaagaaaaggcctggtttctggtggcctctatgaatcccatgtaggtaagtgtgtccccttggccactttctggccagatggattgtttgagcaattaaccatcatggctttatttrcctttataaactgggggttgagacagaggggctgctgagaggtgctagycaggtgyacaggmctctggcaggacctgcctggcgtccatgctgcaggcacgaggcttgccttgccccaggtctgcctcgcscagctggggcttctccgtgggggctgtaggttgactccgctttctcccgsgtcccatcagggtgcagaccgtactccatccctccctgtgagcaccacgtcaacggctcycggcccccatgcacgggggagggagatacccccaagtgtagcaagatctgtgagcctggctacagcccgacctacaaacaggacaagcactacggtaaggggcctggggcctggccacggygcacgtggaggctggggagctrctgcatccctcctcacgctgcagcgaagaggtcagggctgaggagccttggggtcccrgaactctaggatagaggagggggagtgatgccctcttgccaggagaagcagcacactctccactttctgcctgttccaccctgaactcagcctcagcccttccaaactggaagggaccaaagccctccttttacaagggagtggcgtgtcctggagtcttgaggtatcctggcctcttccgggrcctcgtgctcattgctccsttctcccatttctgagcttccagccccagccctgtccttagttcttcaggggagccttccttgagctcccctggcagggcaagtccccttagatgcagtcttcccctggaggccaccagaaatcagtgactggctgaccgtggcgtgccacgaggcackgtcactgccctccccaaccccgagctcggttcattttccaggatacaattcctacagcgtctccaatarcgagaaggacatcatggccgagatctacaaaaacggccccgtggagggagctttctctgtgtattcggacttcctgctctacaagtcaggtgcgtgctgatggctgatggcaatagagggtgggggtcgggaggggagcctgggtgccaggatggttcatgttgaccaatagggctggattgggcaggcaggkgaggggctggggaagagggctgtgtggggccttccatataggctcactcctctgtggaccagcctggcacctgactgtctttgtccaggtgttgtgccaacacacasaattccagaggcctctcccagagcctctgggctagttccttcccatccattrgmgtccagctcatacatgttctctgtgggaacgcccccctccctggtggctggccacgcctgccctcgccttcctggctttgcattgctttaccagcatgtttctgttataatggcaggccgttcgtgtttgcactggctgacacattttcttcatctttctctttgcaaaggcctagatcgtgcctcacaccagtggatgaacacacagggaggaccttgccctgggtagtgccatagggactccaaccaaggaatctggacagtccccatccccaagtcctgtcttagaaatcccttgctccagatgaacagtctttgctgactgcatctatcccattaatattttgctagattggaaacttgtaaaacaacagtttgacaaaggaagatgattctggcaagaaaaagtttctgtgaagatggcacttcttagcatagtcctcgcccttattattaaaagatgcatttccactttgacagtgatttccccacccgagagcctggttgggcagccctgagccccttagccagtatctttcccatcagctagcattagctgccaccagtcctcccttctcctccctcacctcttcagggtgtacctggagcagctattaaaactctttaagccgtgtarcrctttygacaaacccttacttacatggaatcccagtataaagaacagatgaatcagtcatctagcattaaatgttttatcaattagaatgtattagaaattctatttttaaagccaacaagcacattttgtaggmatctatttcaatatttactcaacaamtttgagtgtgttgggccttcaaaaatatatttaattccccagtattgtgggaccccccctggagcctcctggtggarcagcaggttccctctggaagctgtttctccttcccggagcatgaccagctgagtgtggggggtgctgtggggcgtgggacagtsgcccggtctcggtctcagccagttcttcccttttcaggagtgtaccaacacgtcaccggagagatgatgggtggccatgccatccgcatcctgggctggggagtggagaatggcacaccctactggctggttgccaactcctggaacactgactggggtgacaatggtgagtggctgcccccttcctgccaagaacagtgaattgtgagccacaccccgtggccatctcggctttctctgttctacccaccgcacagccttaaaccctggacctacggccaggctgtsagctcctcctaagtgccaggcagtcaggagttcccttttrctgtgrgggcagactctgagcagcttcagagccaacgcctgcaacagttcccacagcatcgcgccagatcctgtgatgggaagggtgaccgggcagggggcttgcccgtggaggtgtgccccacggctcyagaagccttgtggtgttgaggactgtgctagtgggccmacagyaggagtggccagggatgagtgacttaaggtcttttaaggatgagtctgactatattggttgacccttgtcacactttaaaagcaccttactttttattcccaggcttctttaaaatactcagaggacaggatcactgtggaatcgaatcagaagtggtggctggaattccacgcaccgatcagtactgggaaaagatctaatctgccgtgggcctgtcgtgccagtcctgggggcgagatsggggtagaaatgcattttattytttaagttcacgtaagatacaagtttcagrcagggtctgaaggactggattggccaaacatcagacctgtcttccaaggagaccaagtcctggctacatcccagcctgtggttacagtgcagrcaggccaygtgagccaccgctgccagcacagagcgtccttccccctgtagactagtgccgtagggagtacctgytgccccagctgactgtggccccctccgtgatccatccatctccagggagcaagacagagacscaggaatggaaagcggagttcctaacrggatraaasttcccccatcagttcccccagtacctccaagcaagtagctttccacatttgtcacagaaatcagaggagagayggtgttgggagccctttggagaaygccagtctcccaggccccctgcatctatcgagtttgcaatgtcacaacctctctgatsttgtgctcagcatgattctttaatagaagttttattttttcgtgcactctgctaatcatgtgggtgagccagtggaacagcgggagacctgtgctagttttacagattgcctcctwatgacgcggctcaaaaggaaaccaagtggtcaggagttgtttctgacccmctgatctctactaccacwaggaraatagtttaggagaaacsagcttttactgtttttgaaaaattacagcttcmccctgtcaagttaacaaggaatgcctgtgccaataaaagktttctccaacttgaagtctactctgatgggatctcagatcctttgtcactgcctatagacttgtagctgctgtctctctttgtccctgcagagaatcaygtcctggaactgcatgttcttgcgactcttgggacttcatcttaacttctcgctgccccagccatgttttcaaccatggcatccctcccccaattagttccctgtcatcctcgtcaaccttctctgtaagtgcctggtaarcttgcccttgcttaagaactcaaaacatagctgtgctctatttttttgttgttgttgtgactgacagagtgagattccgtctcccrggctggagtgcagtggcgccttctcagctcactgcaacctgcagcctcctagattcaagcgattctcctgcttcagccttccgagtagctgggatgacaggcactcaccaatatgcctgggtaatttttgtatttttaagtacatacaggatttcaccatgttggccaggctagtttcaaactccyggcctcaggtggtctgcctgcctcagcctcccaaagtgttgggattacaggygtgagccactgggccctgcctgtaytttttatcagccacaaatccagcaacaagctgaggattcagctcataaaacaggyttggtgtcttggtgatctcacataaccaagatgctaccccgtggggaaccacatccccctggatgccctccagccttggtttgggctggagtcagggcctgkatacagtattttgaatttgtatgccactggtttgcattgctggtcaggaactctagtgctttgcatagccctggtttagaaacatgttatagcagttcttggtatagagcaaactagaagaaccagcaatcattccactgtcctgccaaggtacacctcagtactccccttcccaactgaagtggtatgaggctrgctctttccaaaagcattcaagtttggcttctgatgtgactcagaatttaggaaccagatgctagatcaaataagctctgaaaatctgaggaacattgtaggaaaggtttgttaagcatctcttaagtgccatgatgagcataacagccggccgtsgtggctcrcgcctgtaakcccagcactttgggaggccaaggtgggaggatgacaaggtcaggagttcaagaccagcctggccaacatgctgaaacctcacctctactaaaaatacaaaaattagctgggcatggtggcacatgcctgtaatcccagctacttgggaggctgaggcaggagaatcgcttgaacccgggaggcggaggttgcagtgagccragacagtgccagtgcactccagcctcggtgacagcgcaaggctccgtctcaataattaaaaaaaaaaaaaaaaaaaaaaggccgggcrcagtggctcaagcctgtaatcccagcactttgggaggctgaggcgggcagatcacctgaggtcaggagttttgagatcagccttggcaacacggtgaaaccccatctctactaaaaatacaaaattagccaagcatgctggcacatgcctgtaatcccagctactcgggaggctgaggtacgagaatcgcttgaacctgggaggcagaggatgcagtgagccgagatcacgccattgcactccagcctgggggacaagagtgaatctgtgtctcaccaaaaaaaaaaagaaaaagaaagatgcttaacaaaggttaccataagccacaaattcatraccacttatccttccagtttcaagtagaatatattcataacctcaataaagttctccctgctcccaaactgagttgattcattccatgcgcactgtctccctcacctccatcrtatacgcacctgcagctccttgcctgcttctagcatggagscagcggggatgtgctggtgagtgacaaggaattgtggggcatgtcgacatcagcttaaggctttgttagaaacacctgccttgcagtgtttgtgactgggaaagagctcagtgttttaatacacctcagatcaccacattgatcataactttgtcacctcagttcaatagtttctcctggattcttgtccaagtgagatgacaggtggacgtaacaatgccttttcagtctttacctagmctctccagagaatcactccagaatagaaattagagtataggtaggcagtccaacctctgcatttaaaaaaaaaaattttgagatgggagtctctctctgtcacccaggctggagtgcagtggcatgatcttggctcactgcagcctccgcctcctgggttcaagggattctcctgcctcagcctcccgagtagctgggattacaggcacctgccaccacacctggcctaatgtttatatttttagtagagatagagtttcaccatgttggccaggctggtcttgaactcctgacttcaagtgatccacctgccttggcctcccaaagtgctaggattataggcgtgagccactgtgcccggctgccactctttttaaagaaagcagtaatttgccctcttttattgtgcttcagccatactgaagtggtccacagaccaggagcacggccgtcacctgagagcctgttagaaatgctcatcagagtgtcagagggccagacctctgaaccagcatttgcatctcccaagaccccaggtagtttcccaggtacattcaagctcacaatacctttccagctgctccctgattagaaaactgcatgagaatttaggaatgcaacctcttgggcaccccatcagacctactgtatcagtctctgttcccagcaatcaggcaattctgatataaagtctgagaaccacagccttagaactgtttccaaaactgccaagaataacctagaatgtttgttaacatgcctgactcgccctcttcctcctatacacacccgagcccctgggaaatggctcagtagatggaagaaggggccctccctgcacttgcccacagggatccggaagttcccatatgcagatataaagctcttgctcccaagcattctaattgtttatggtcctagattcacatgggtcagaggctcctctgaggaaaacaaaatattgcaccattaggtcggatccaaatagactgtatgccagagatgctataaaattatattagaagtggggagtagagggtagtgttgccagagttaccaaacagaaatacaagatggccaactacttctgaattttcagttatgcaagtttgtttgttttttgagacagagtctcactctgtcgcccaggctggagtgcaatggcgtgatcttggctcaccacaacctctgcctcaacctcttgagctcaagggatcctcctgcctcagccccaacaccctccgagtagctgagaccacaggtgtgagccgccatgcccagcatcccctattatatctggcaaccttagtagagaagatacttagaaggaaaacaagctttcaaagagcttcagaatggaatgagagcgaatacctttctacaactcagtgagtagaaaaaagcacatagctttatagatagaaaaaatctgagatcacccaaaccacacagctcaggaagtggtcccacaggtaatgaccaagtcaggaaagaagatttccgcaggccccactcagaccaaatctctttccagcaggttgttctgtcttaacgtgaactttggcagaattaaatcttagatttcaacacacagatttttaacaacctaccctgaaatctcaaaccaagttttgaggctttaattccttggaaaatactgtcgagtctagctcagtggtccccaagctttttggcaccagggaccggtttcataaagacaattttcccaaggacagagggaggaaaatggttttgggatgaaactgccacctcagatcatcagggactagattctcacaaggagcatgcaacccagatccctcacacgcgcaatcgcacctatgagaatctaacgccgagtggagctcacgtgataatgttcactcacccgccgctcacctcctgctgtgatgcccggttcctaacaggccacgtaacagaaggtttagtgccggtcctaggcctgggggtcggggacccctggtctggctgtattccatgtggcaagttatcttggctggtgacaaatgagtccagggctaagcctcaaatgaaccaattaactgaagtctccctgggcccaaactaattttggtgtcagtggtcacagcaagaaagtgtgcttacaacaatgcaaatccaacgttgcagctcgaaacaactcaaattcaatgattaagccaccatccacgatgggctgcagaagagtagactttatgagtacctgtagcattaatggcttctagaaagtaccgaatgccctagtacaccaattctcaactcgagggtccacaggcctccttgctgcactgagcacctcagtgagagcacatcacaagctctgctgcactggagtagagaggaaggtgaaaccccgagcagaagtactgttctgcccccaagccaatcacctgaagacagcttttgcctttcttaagacctgaatatataaactgataactttagaaaacaaaaactgctgggggaaatttttttttttttttttttacaattttttcctttttttgagatggagtctcgctctgttgcccagactggagtgcagtggcgcgatctgagctcactgcaagctccgcctcccgggtttaagccattctcctgcctcagcctcccgagtagctggaactacaggcacccgccaccacgcctggctaattttttttttttttagtagagacggggtttcaccgtgttagccaggatggtctcgatcccctaatgtcgtgatccgaccgcctcagcctcccaaagtgctgggattacaggcatgagccaccacgctgggccatcaactccattcttgagctccatcttttccacagtcaggcaggctttcaagcgaactgtacttgacaaatgcagagcaattaaattctttattataaaaatctcaaaaatgtccacctttactggagaccaatcttctaaaaggtcaaaagcaatcctgctgtttctctctgaaagctaaactcctttaaatgagaatacgagaatacccagaattttattcccagcctttgtgtggaaaaggcagtttgcattcttaggaaacatctaactgttacctaaaccataaatatttctatctactccattcaacccaattaaagaaaacaaaatgatgagaaaaataggagccgaacagaaagaaaattcacatcattttctactattacgaacattcaaatggtgcttcaaattaaatacttttaattatcattctagccaggatcatactaagtaggatctcatgacagtcacatatgcagcgacttcacctaaaccgtggcactgaatgctctgccatgagccacaagcagcacagtgatcatcacccacaaggacaggttgctgggatgaggcaccctttcctttcatgtttaggttcttctcacctgcatttcactttcctaaaggtcccagccacacagcgttcttttagggattaaagtagtaggaaaaaaataaagagaacacaacatccatccttaaagaaaaaaagtaaatccactttatggtggacttcagctatggacaaatttgggatcagtgttctccagtctgaacatagtcttctgttacctgggagagagtggtcaggtactgccagctcagggcagccaaaagcatgacaaacgacaggtagatgggggagtagtggcttcgggaaatcagctgacagttgggaagattctgcgtccggatggtggagatgatctgccttgttttgctagaagatgggtctgagtcggggattctatgataaatctgttaaagacacaggaaaaaatgataagtgctatgtgctttacattttccatggctacttacaacaaccctccactggcaggtattttatacccattttaccaatgaggaaagggaggctcagagaacatgaacataacttacccaaagccatcccaatgataaggtggggatgtcagccccagctcatctcaaagcctgtcttcctgagcaaacaggaggcacaggtgtgcatactgcacccagaggccctcgagagcagcggctgagccacaatgatcttcacatccccagcacctcacagtgccaggcccaataaacgtcaccatagttcacgtagacaggcacagactaacatgacgaaagggaaatgctggaaagactgggcaaaagcagcttagaaacaagatggaacacgcagtacagaccacagcttgacaaagggggacaggaacagaagcagggagccgtatgaaccaccctggagtcctccctgtgcctccctccccactcctccacaagcctcccaagtatgtgcagaatccatctcttcccctacatccctaaaattactgcctgagattaggccctgagtgcctctcagatgagctatctcagtctccaacgtgagtctaagcttaaattcccaaatctacctgtctgctctacactgtcaccaaggagatctcaaacctctgcttgatgcctcagtggcaccagccctctcacctggagaaaaaaagcctgagctctgtaatgtgtagcgcaaggccacccatggtccagacctactgcacctgtctagtgtcaccagcccttgcccacctccctctctatagtctagtaacagttgccgggccaggcacagtggctcatgtttggaatcccagcacttcaggaggctgaggcatgtagactgcttaagctcaggcgtttaagaccagcctggacaacacagtaaaaccctgtttctacaaaatgtacaaaaattagccgggcatcgtggcatgcacctgtggtcccccagctacttggggactggggtgggaagatcacttgagcctgggaggtggaggttgcagtgatccgagatcatgccactgcactccagcctggatgacagaacaagaccctgtctcaaaaaacaaacaaaaacaaaagaacaactgtctactgttgtttcgcccatgcgatgctgctgcacacctctgttccagtctcataccactccttctctctggaatgcgcctcccacgtcccttcaactggctcctacctaggcccccaagtctcaacttcaggattatgccttctagaaaacctgtctgcagctccaggttcagccaggagccaccctattgtacatacctttacctttccacttacgtggaaatggaccatctgtagttttcaccctgactacaccgcacctacttactcacctttttatctccagcctagccctgtgctggcacacagcaagcgtgcatccctggctaatttttgcatttttaatagagacaaggttttaccagtgttggtcaggctggtctcaaactccagacctcaagtgatccacccacctcggcctcccaaagggctgggattacaggcgtgagccactccacccagccaagacttttcaatacaagcatccataaagtaaaatatatagtgatgagataattctattagaagtcatccttctgcctgcccatgttgctttactgcttgtcttagccttcctcctaaaagcagaacctgaggcaaaagcttgcatgcagccatttatttggaaacgagtggagaagtgaaacagaaggcaggaaggcctatcaaggatgtgttgagttggcttgatcttgagggaccttcaaggagccttatgaaaggtggccctgaggagcagagaggtggccctcacctcctctgggttgtggggacccacgtgccaggcagttcctgcagctcgtcagaagcccaagggcaggaagcgagaggtctctggagcagaaggcaaggtccagccctacttggaaactggttgctacagcagtggccgaaggccaagatgagtggcagtgacacacagggtctcacacactactcttgtaaatgacctgagtgccctgatgccatcaaaagccataaaataggcattcactacaatgaccctgagaatagtttctcaggtaagtaatggttttggtatattgtagatttttttttttttttaagatggtgtctcgctctgtcacccaggctagagtgcag

SEQ ID NO: 96984 - DNA, 32811 bp, Homo sapiens
tccttctcctctctggtttctgttttctcatctacaaaaatggagggcaagcttcaaggttactgggatctcaagttgtgttagtctgctcaggctgccatgacaaagtaccacagactgggtggcttaatcaagagaaatgtgtcctctcactgttctggaggctggaagtctaagatcaaaatgttgccagggttggcttcttttcttctgaggctcctctctgtggcttataaacagccatcttctccctatgtcttcacatggtcttccctctgtactgtctgggtctaaatttcctcttcctttaaggacaccagtcatattggattagggcccacactaatgacctcatttaacttaattacctctttaaagaccctgtctccaaatacagtcaccttctggggtactgggggttaggacttcaacataagaattttgtgggggacagaattcagccacagcacaagtgtatagtacctgacccacggcaggcttagtaagcctacttattgtctacctcacccacatttaaactgcacaaacttttaatgggacgctgtgtgtctctgtagactcccagacacactaaacctatttaaacagacaactcagcattgtgacaggcgcactctgtccttcctttattatcagggatgaagctgtttcttctctttgccccagattccggatgtcataaatctttaaaatgagtcatccttgtgtctcctctctccctcctgcccccacaatcttccagcactgtgccagggtgctttcatctatatgtggaaatgtgctcacctgctgattgtaaactcagtcattgccttactcttcaaaattactggtcccagcgggcttctcttccagccattttttcctgattctccatctctggcagcagctgctgtgccttgattcagaagctgcccttgtcatatctgagcaagtatcccccagggcttcacgtgactctcacatagccttgtcctcctcctcctctgctgtccgcagccctgggtggagggcctgcagtggggagcttgtcctgcatcagcacctcagaggggcagtattccctcatcccagtggcatcccagcaacaacctgtccccaggtaccgtggccctttcagctcactctttcagctcttctcaggtcccgctctgaatgtccccagagaagcagccagaggagcttgtgtccctgggcaactgagcagcctcctgaatgctccttttgcacttgtttttctcttccagctgcagagcccttgctccgtgagcaaagcctgggtgcccaagcagccaccgcagcagcagagtacaacctgcagagaagctgatcaccgggcagagatagagcgagcatgtgtgtgtgtgtgcgcgtgtgcagaggagggagtggtgtgcctgtttgtgtgtgcatgcatctgttgacactcatgattctgaatgttgcctgggctgggggagtacctgtagcacgccagtgctgtttcccggcctccagacacaaggctcgaggttatggcagtgactttcagctgagacctgttcctgcaagccagctgccttgtctgaacagaacgtagtggtaggaccctagctgggattctggcatctgcctccctagacctccttccctccctcctcacgtcaggctgtggagcaggagcacagcagttctggctgttgtccaaagcatgggattctggaggcagccagagccctgctgagttcctgctttctgacctggaggctgagcaggccggagtggatggatgctgtccagacgtagccacctggcctctgtttcttattttaaaattctctgctactgggctcagtcccaggcccttccttgggcttctgggactgagcatgaggccatagacagatctaaaaagtttccaccaccctacagaagtacacacagatacctgactggtgtggggtatgcctggtactgtaataggagcctaagacagcacacctaccttttcaggatttagaacctaaaattagaaagagaatcccagctgtcattgttccttccccagaagctaagagccagcctcagagcctacccaggagctgtgaaggggcaagggtcaaactgactcactctaccaggaggagaccaggttgcagtggcgtaaggccccctggtttctctggccacactccaaggcaccacagtgctgccagtgaggacagctgacacccagccagggaaaccattctagtctttattctgttggcttccagggcctgtcctggacttgtcagcatccagactgccatgtcagctatcccagtagctgagctccaaggactcaggcagagggactcagggatggggactgccaggggcagttggcaaaagtccaagtagagattacacccagcacaccattccttccaggagcagtaggtgggaggtttgacccagagaagccaatccttgcattccaggagtggcctgtgcctcccacctcttccttcccactgccaaaggcctgtgttgagaaagatgtcatgcaaaaggacgacggtggccaactaaagcaagtcttccttccaccctgtggcctgcacttgagccacaaagtgtgtgtgtgtgtgtgcgtgtgtggtacgtgtgtgtgtgtgtggctatgaggctgattcctgtttggatttttgtcctcacgtgtatcattaagctggcctttgggccttttcctttctacctcccctgtgacctttcctagcctcagatctgttaattcttttggccccagccctgtccctcactgtcctctgtccttggaccagaaccctggggtcagacccatctcctgtagctgtccatcacactgacaggcttcttcctgagatatcctcaggttttctcagccagagagctgcctttagagtccaactgttgtacgtatgtcaccttcactagaaatgtcccatcatcgtgggaggggagcagggcacaggggatggtgtgcattcagagcattgggttgggggcttccctgttccctcagccccagtcgagaggaaagagaatcgggccactgccagaaagagagtcaagcaaacctggaagggcaaatctgagagtgggaaggccaaaggccgaggcccagatttagtattcactagcagcgccttcgggtagcaggatgattccttttcctgcctgtctgctgctggctctcttccctaaggtacaggttggcaggaccacctccgcctacttctccaccatccctagcatgccagcccgttcccagatcaacctgccagtggagtcaggcagtgcactcctggagccaagagggaagggcagggtagagagggtatgtccagtagcctggagctccatggtggcttcatgcctcccttctcccagctcaggtggccctgagggctccctcggaacagtgcctcaaatcctgacccaagggccagcatggggaagagatggttgcaggcaaaatgcactttatagagattttctattgctgggaaggtgtgtttctcccacaatttgtttgtgaatattcacttgttttataaatgtctgacctgtcttgagtaagtttgtgctgtcgtcaatcttgtgggaggcctgggaaccagggttttggtaagcctgagcctgaatgaagctgtcggccaccccatcttggttctgtgggagtcaggagcctcctattcctccttaggaagggggagcagccagagcagactggagcagcttggtcaagagttggtccagagcttggtcaagagttgggggtcaattggccaaaatagtacagagcactctggcccagagtgagggtcctaagtgccatcctgcagtgccacccagccttgcagcccacttaaaccccctcccaggctgggggtcagtcagtgcagggcctgctccacgccctcaatccatcctttaattcaatgcagccacttaagctgcagcctgtggtgaggaggggatgcaggctctctggctgtgactaggtggttgagatctgcccacagccaagcctagggcgcctggatgctggctttgtctcctggccagagaatggcccctctctgtgcagtgtgccctgcttccatgctaggggatgctagccttggactgaaagctttattagctcacaccccaactttctgggaaggggcccaggcaaggcccaagaatatcacagtctggcctgcacagagtgaagaaggagaaaaggggaggaacctgccttgggaacttgtctcattcttggctctgctctgaagctcctgctggcctccctcataccaagacctgggcctgcctttccttcttgcccttctggcttctctctaataatggctttgggttggtctttggagctaagatacctttgctcttgagcaaaaggttctggaagagggagttgtcctttacatccacccctgacctgctaaggatgttccctagctgaggcaggtctacattctaaggaacgattagtagccatgatggcaagactgctttcctgagaggaaaagccaggcaccatggcagcagatgattaccgtgagggcccagtgaaaggggcctgatcacgaaagctgagaaagtagtggccacccctctgggccccagggacagggaaaagagaagcagccatgacctttggctctaggtattgggatattctcagggctggtggtcggaggttgccttctgcacggaaggtgcctccagctccttgctaggtgccgcactgaaggaaaggggccagcatgactggtcggcagtccagatttgcaaataggactccacgagttgtggcacagtttgctctgcacgttttctgccctgtggacagggtctctagggttctctcgagagaccagagaagccaatgaggtttgaccagaggctctacgacccagcaaagctaaggccctagccttggcagtccgtactctgaaataactcaatcgggaaactcagggacttgaaggcctggaagcccaggaataacaccctctcgagggagagacaatgaggaagaagccatggccaaagcctagcagggatggaggtgccagagggaacagaaacaaccaaaatgatcccaagaagtcaacagtgggaggagagggaaaggcgccaagtcttagaatgtgtgtctgtgggtgcagaagaggggtgctctgcaggaaatgcagttgaggcgctaagaaggagaatgctgggaaggtcctggcgagagaccgagaagcctggagggctcaattcaccacgagtagctgtttggggctgaagagagatttgggtcaatctttagagaagacagcctctagggagagtctttgggagggtcccctcaaggtaaagggacaggactggggtgagggctggatcccagcgcaggaggtggagtgtttctgggtctcaggcaacacatttgtgttacgttacattctcacaacaaccatgagagggactgctattgtcccatttcacagataagaagaccaaaccttagtgctctgaagtcactaatgcaaggccccactgcccagtcacttgtggagccagtgaattcacaccacctgactccaaacctgtacactttaagagcccactgacatcctctcctttctctgccttcctccacgaccctccttttccgcctgccttcttggtctctgctgcggggggccaacctggaccttggggtccagtgtcctgccattagtcatctgatacccgggcactaagcccaaccggagggacaaagcccacaccggccacggggtggaggagagtcgatgtcggatttagggcggggctgaaccaagcccagggccgcgggggccgtggcttcagcaccgcggagagcgccatctccgggggcggggctggcggggtgggggcggggcctgggcggggcgcgcgagaccccggccgggtcccgggggcgcgcgcggggcgctctcgccagtcccgcgggccgtgcgcggtgctgtgccgcgccctgccagacacaggtgcgcccgcctagcccgaactccgcggcggcggctgccctctcgccgcgcctccgcctccttcgcagccgccgcctcctccgcgccgcgctccgcccggatggccagggctgtgcccgagaatggcggagcgagaaagcggcggcctgggagggggggccgcgtccccgcccgccgcctccccgttcctggggctgcacatcgcttcgcctcccaatttcaggtgagagtccccggccgccgcgcgcctcgcccttcagcggggactgatccgcattggctgccctgcccgccccccaccccagaacctcgggaacccgggaacgaaagggctgcgtgggagtggggtctcttcccgggacagagcccccctcagaagccccgccagcctcaagtccggactggtagccgttgcatgttcacgaggctgttccctccgccattcctggtcctaggctgggaggtctgcgctggaattggaggagggggctcsgaggcctccttctccccaacctccgggctgcggcagggtctggggtcggggttgcgatcccggagcgggcaggcaggctgcatcttagcctgtgaatagagctgggaacagcctggaggggcgcgggtcgcagtttcctggggcaacgacattgttggtgctgggaggaggatgtttgagcccctccccgagccctgcctggccagatgggcctacctgccaggcctggcgtggccgggcccctctctggattgggcagcaccgacctaggcaggtgtgtctctcagggcaggcgctgaaggctcagcctcaaccaggggaatcctaggcccggctgcgggaagggaagtcggctcggctctggagtagccagggccagcgagggtgtcgaggggatccctgctggggtaaatacccagaaccctgacctgagctcctattccaccacccccaccccccaatctggtgttaggcccgatgcatttcagagaagtgaggggtgagtgttgtgtggaggaggaatagatgtacctcccccataattctgaaccctagttggtggggaggaagaggccgaagtcactgctcccggcctagagagggaggcttagacataccccattgtttccccatctcgagaactggcgccttcccctctcctggggcaccaccccagccaggctccagctgggctgtggtgccagcccctcctgggagcaaggggtcactggctcccaggtcctcaggtgggcagagacccctggggatctctaatagcatcatcaaactcagaaaccttccctgaggccctgagctgagctggaaggaccagagggggccagatggaggaggccaggcctgaaggctccagggctgcagctctctgataatgccttagactgaggtctgagactccacctggcatggtgcatgaggcctccatgcaaatactgcctccccacctggaggcctctgcagtggaagcacatggggcttagagggacctgggttcaaatcctagctccactactttctaactgcatgacccaggcaggtttttgtcctctctgggtgccatctgttaagtgggctaattaatattgattcttgcctggaaaggagaaaaagcacatcaggtcagtgttcaacaagtgtcagcccccacactagcagacaacactacggctcgctgctgtccagagtgtcttcccaaggcccctcctttaaccctcataactgccccaagagagggtagtgacctgcccattttatagatgaggtgattgagattaacaaaggcagggtggctcatctggagactacaaaagagtcagagactaaggctacactgggacccaggtctgtgcgtgtttagtccactctacgtcccagccctgcctctggcccagtgggcagcttttcttcctcgacctgcttccccaggtgtcatagatgctttaatgagaggagctgaggaagcagacaccagccagtgaatgtgtggccagctctgcggcatgtgggacaagggtggcagtaggccacgaggctgaggtgtgggccagcactccagaacatggtggcctggctgcggagacaaggccagtgcgtgggaataataagcgtcagtgtctcaggccctgccggcctgccccgctgctcccaaagcccccgctgccctttctcctggcccgcctctcactgtgcttggccaggctccacttaaccctgggtgggtagatagtgctttcttgtggctctttggtggagtcatagatccaactggcctgggtttgaatcctggctggcccttcttacctgtgtgccctgacactgggcacttaagccctctgagcctctgagatgccagcactggcccctgctcaggatggtcctaagaatcagatgagataacacgtgttgagtgtttcaagggctgaggagagccgcctgtaggcagggctgtgtgtgtgcacacacacacaggcgccttgacccccagtgccactgtcagctcccagaaaataaagggggtctgtacccaaactttggtatccccattgctcagcacgggatagttactcaataacagtggtaagcgctgacatttggaaggcactcagttcgcccaggcaccattctaagagtttcctatgtgcaagagtatttactcctcccaataactgtatcaacagagcgttgttattatccacacttgcatgaagaaactgaggcagagggaggttaggtaagtggcagagcttgtaagtggcaggcagtctgatgtcagagccaccccaaaaagaaagagccctagagtattggaagagcatgtgcggagggggcgagcatgtggacctgacctgaaggggtgggagcattcgtttgtttgtggtaggttaaatacgtgttaatttttgttctgattatagctccagctgtttatagtggttggttacctttgggtatggtatggggtgagggatttttacttcttattttacatactttttttttttgagacagagtctcactctgtcgcccaggctggaggttggagtgcagtggcatgatctaagctcactgcaacctctgtattctgggttcaagcggttctcctgcctcagcttcccaagtagctgggattacaggtgcccaccaccacgcccggctaatttttgtatttttagtagagacggggtttcaacatgttggccaggctggtcttgaactcctgacctcaggtgatccacccatctcagcctcccaaagtgctggaattacaggctcgagccaccacgcccagtgtcatacttttatattacaggttgagtatgcctgatctgacatgctttggaccagaagtgtttcagatttctaatttttttggattttggaatatttgcatatgcataacgaaatagcttggggatgggaacccaagtctaaaaatgaaattgattttttcttatatatcttatacatatagcctcaaggtaattttatacaataatttaaataattgtgtgcatgaaacaaagttttgattacaacctgtcatgtggagtcaggtgtggaatttacagcctgtgctgttatgttggtgctcaaacatttaggattttggagcatttcagatttcaggtttttggattagggctgctcacctgtatttgacttcttattttataatgagtataggttacttctgtgtcttacaaaataataaaagaaaattcaaaattaaagtgatacatgttcattataaagaaaactctagaaaagagaatttagaaatttacacagtggagacattggcactgggtaggtgggacaaagaggaggggcagaaggacagttcacgtgggaggaacagcagagacaaagggggtttcatggacaagaagggagcgagcggcctgtctggggtgtgtagaaggggaatcgtggatctgagagaccttagagaccagctcgtccaaccagctccctccccttatgaggaaacaagagagggcgagtggctcccccaagagcacacagcaaattagtggcaaagctgggatagagccaggccatggctgcctggatggttgccatctgccccagcaccctgcctcagggatgagagatggggccaccgagaggcttcttccttcattcactcaacaaacgtttgcactttgcctaggtcaccagggaaacactgcaaaggcccagacgtgggcctggccatcatgctattggtgttgtagaggggagacagacagacagacggctttacagatgggctggtcggtgtgatgatggctcaggtcaagggacccaggctcagcgggtctagacaggccccccagaggcagggacatttcagcttaggcctggtggacgcataaaaatatcacccaagggtgtcactggagtgaagggcggagaccagagcgggtgggcagggtgtctggtgcccagtctggcaggagggtggagagcaggatgtgcaggaacttgtaggccatgtgacgatgccgacctcttcaccaacagccagaggagctggcagggggttaggaaaggaatgacagggtcagacagatcctctaggacaggggtgtccaatcttttggcttccctgggccacatggaagaaaaattatcttgggccacacgtaaaatacactaacactaacgatagctgatgagctaaaacacaaaaacatctcataatgtttcaaaaaagtttatgaatttgtgttgggccacattcagagccgtcctggggctcaygcacccatgggccatgggttagacaagcttgttctaggaggatcacctggctgctgggtagagagcggccaggggactagccatcctgctggtaagaaggagggacaggttcagggtgtgaggaagagttagggggcagattagcctgcttggtgagggatacagaatagggagtggggaggcaggagtctaggatgatgctggggctccttggtgggtggggtgtccagtgggagaccagagggcggtgggcagggtgtgaaaatcatgtgggaacctgctgaatttgagactggggatcattggaggacccaattggaggawtcatacagtcagtcggttttgggtctggagctcagaggagaggatagggctggggccaaagaccctgggagtctgagtttggagggatggccactgaagcctcagagaggacatcactgtccagggagactgagcagagggcaggaagatggctggccggtggcctgttcagccaaccatgtttcggtggaggtggggaggtgctgctggagctgcctcatgcccaggaccgccttggcctggctcctgatggaccttggatgtggaggcagagagtgttgacttgcctcacacagtccggcagtggccagggcagaatttcaaccccagctcgctgatggcagagctttaaagttcgtctctggattgctggaaatgggccacaacacacttctagcttggggcccccatggttcccacaaattgggtcacagccaccatccacacgtagttcttaatcattctatgatgccatctttgttccctggccccactcttgtattcattccaaaatagcaggagcgtctctgggtgctttgccttgttccgccactggagatgccagtggagagctcatggctcctgctgtcatgttgcttgcagtgcctctttaataggcactgatttagcacctatggtgtgcagggttttgggctttgtgcatagattggagcaaaggtggggagtcagtgcccaggtgagtatgatgaccctgccctcaggaaacttgcagctctggggagggcaggcagcccagcagcagacggggagcccatgctaggctggcatgacccaagatgaaagtctgtgaaggacagcaaaggagaaaagagcgccccagattctaccccatctcacaactctgtgtccatgtgagtgtttcttcctgtgtgcaatatcatcctggggagaccactggatcatatatgctgtctttttgctcattttattagttgtcaccttaatacacagactttataatgttgattccaaaagactgcatcacatttcatctgctgatggccacgatggaaccagccccctggtgctgggtgacgcaggtgttttcagttgtttgctgtgatgaggaatgaacatcctgtgtgtaacagttcttctccaaacaatgtgggattgtttcctcgaagcagtttcccaaaagtcgaacaactggatcccagagttcttgcaatgtatcagcatgaagatgtttaaacagatcaaacatgttataaccgcaagtggggttgtccctcggggctcatttctttggttggattcagttttcgttggagatgaccyccgtatggaggtggtcaggaagggaattctgacccaaagaacaaacccagcccaaccccatgttcacccagagccaggtggtgggggtagagcgagggcctgagagggatgctgggtctggctcatccccaccccaccgtttcagccagcaccgtcttcccagaggacctgacatcctagcccagactctggtgtaggtggggacacaggaagttgattggaaaagtggactaacttagagatttccaaggcaaaaatccagagagccctgggacacctgtggttaattcattcagcatttgtcaagtacctattaggcaccacacatgttgatcaaaacagatatgatcccacccatatggattaactgactccaaggggaggccaccgcrggccgcataacccaaaggtaaaattacagtgatacggaaccacagccaggagggactccgagagcccatagcagggcggtttggcttggtcccagaggtcagagaaggcttgcagaggagaccatgctactgctttgggagctgcgctattgaaggaggagataaaggtgggaggtggggggaatgaagggaaatgatactggttggagggaaaggaggctttacagagccttcaggccacagatgagaatttgggccccttctcctaaggaccaggggaagctattaaagggctttgagctgggaagagtgaccagaccagatttgtaattcagaggtcagctttgctgtcattacctggtggagagtggctggtagaggaaccagagggaaatggggaacccacttagggttgagcggccagtcaacaggtgtcctgagaactcactgggagccagcttcgttctcagcacttaragggctgcaaagaggcaggctggatccctggaccacacgtgccctctgtcacaagagaggcttgtggggcattgtggccaggacccaaggtcaatcagctggcatccttacctcctcaccacagcacagccaggaacacaaaggcccaagaatgacatcygaacagccaatgcctggctcagatttggccttgctcagctaaagcctcagcactttaccacttaacctttgctttacatacacttctaactcagcctactacggagctgaaatagtccgttagaaagggcaggactgtggttggtggaaatgtgacccagcaaggcaggggaaaagggcctgaaatcaacatcagaacacaaaaggcatgtttgttcagggccatttagaaaagtgcagctcagggtggggtgggagcaggagctggtatggcgagaacagtgaggagctggcagggcaaaagcaaggactggggcagcagagtaggagggatcaggtgaatgcaggaacagggcctcaggtagaaaggtcagggcggtctccagagaccaaactcacagctcagagccaccaaacgttaatatggatgacgtctcaaggatcacagcatccaggatagacaagcaggtctgatgggtgggcaggggctgcttctacaggagactgctgaaacttccagacccagaggtgagggaggccggcctgcggagggccgtaggattcagtttggaggcctcctggtgctaaggctgccatgagcagggtggatcaggcgggacaggagggaaccgccctcttttccccttcttcccctcccttctcccctccatcttttcctccctcctcctttccctcccttccccacattgaccttccatgagccttcagggaccaagtgtctgtttagccttctctccataaagggaccccccagggttttagctgggaggccagaacatctggtgcctggaaaagaggaaagggcagagtcttggatggggggtgacttgcacagggtactctttgaccaatcagtcccccttgatccttggtagtgacctcctactcacacaaattccattctgctaaccctcaccagccctctgaggtgggtgggcagggattggtggcttcatcctgtatctgggaagctgaagcataaggcacctttatgtctaagccttagtgttcctcatctgtaaaatgggaaaaatggaacaaaccctctcccaaggttgttgcaatgaggattaagagagatgcatggcataaatgttggggccaagatggggcagcttcaacgtgaaagagtcaggatttatttcaggcctcctgcttccaagcctgatatggtgatcattcttccatcctgccttacttatgagaggcacctaaaaagtcagacaaagcatcccccttaacccaccccagtagagccagggatcaggcataggctctctgacccccagcccagtattctttctagcattgcccaattaaagcccagtgccctcagctgtacaggaagaatgctgctgtccttgccccacccagacctattgtccaaggaagtgggaatatcaggtgatgttgagggtgtagaagtgaactgagaagcctctaacccaggtctaagccagaccctgcaggccctgctccagcctgcagttcgagaggagcaggtggaggcagaggctgtcctgtgacagacatctagcaggctcatgctgaggactcagtgtatgcaggatgaactcgccagctctgccctccaggagcaaggggaggaaggggtcttgatcacctgctgggtacagtatagggtcatcaatcagggtgctggatacaggccccatccacctttggagcagccagggggtgggaagtgggtgtttctgagggagggctggccctrtctgctgcacacactactgtacatccaggcagatggtgacatcagccacatgcaagggctgggagggcttcctggaagaatgagcttaactgagcactcttccagcaagcatggtttgagagtctgccacgtgctccctctgagcactgggtttggcactggggagacacagtgcccacgcagactacgcatggagctggaggccttgcctgcaggcacaggaacctgctgctagtggagagccttgagggttccaagtggggcgggagggatgatggcatttctggcagttttgcctgatagtggcaggtggagtgggatggtgcaggcatagggagactgagrcagacaggccagtggggacatctgggagggcagaggcaggagctggactagggcttggcagtgaggaagcggagccatgtgtgaggagacacagatgtgtgcaggggggctgggcaccatggctcacgcctgcaatcccagcactttgagaagccgaggcgagcagatcacctgaggtcaggagttcaagactagcctggccaacatggtgaaaccctgtctctactaaaaatacaaaaattaaccaggtatggtgatgcacacctgcaatcccagctactcaagaggctgaggcaggagaatcacttgaacccaggtggcagaggctgcggtgagccaagatcatgtcattgctctccagcctgggtgacagagcgaaaggccgtctcaaaaaaaaaaaaaaaaatatatatatatatatatatatgtgcagaggtcactggcagagcaggggcatttcagggcacctctgggtcagcggtcctgcagctctcccatgccatctgagtaccaggggctcccttttgcaccactggccttctcggtgaccatctgggcaaccagtgtgaattgaacacttacttggtgctggccactgggtttttgtccctgagcctgagatgccaccctgccctggccggacggaggagggctgctctggcttctgggccaggccctcctccccacttccaccccagctggccagccacaccctccccatggcctggggaaccaccacccttgggctgcaggtcagacgtgaccctacagggcaccttgtccatccagcccccattccccacccctctgtgcagtgccctccaggggcctccaggttctgtttatgtcattccaaagggagaggaagctcattaccacacagcagcccttccagctctgctctaagggcccaaacactggcctgcccttagctgtggctctggtgcctcctgcttccataggccctgccttcctgggtcctgaaggctcaagcyctggctgcagaaggaggcagcccagatcaaacccagtttggatgcagcctgggcccacagaagcctctctgatgaggtcggggggctgagcctatggcagtgcaaaccgagtgttcattcttagggtgtttgggaagccccccttcatctcccacctggcaccctgactggggaactggccctttaaagccaaccaagggctggcttttggggggaaacatcctagatttctgccatctacttacaagcctgggccagggagggggggccactcagcccccgacaggggcattggaagggcaggtggagccagtggcattgattgcagtaacctgatcccgtgagggaggcggccacagcggcagcagcgcaagggccaggccagccgggaggaaggtgcctgcagctgagggctgcgctgggaagagctggggctgggacccgggtcggcagctgcagcctcctctcctggcctgtctatttttaatgagctccccaggcttctgcagcaggcaggacgcagaaagacaggcccaagcggtggaggccagaggcccccagccctgccttgagccctggcccccccacccttccgggcatgagagggcagccctggggccccgcagccccccggccgggcagggctctccatgcagctggtgctgaagatggattcgagcccagacaatgacagctggttggaggatcaatgggagcgctggtaggggctaccggggctggcgggggtggagaccgagttggggtgagctccatcgagctcagggtctctgatctgaatgaggcgagtggcagggagtctgggcctcctaggttcccctgggggctaagccaccatctctcctgggtgaccttgaactagtgggtttcccttgctctgtgcctcaatttcttggacttatttgggaaaaggctcatacattctccccaacttcctaaatgttctacccccccaccacccccccagcaagccaggcagagtgcccaggacctagaggtgagcaagagacaggctgccttgcagtggctggcccagccctgcattctgaggtggggactcagggctggcctagggagaggggggttctagtggagctggttagtattctggtgccctggtgctctgagctgtctcccaaggttgtaacacctctggtcccacctggggcttctcctgaccccatctgtgcagcctcctgttcagggtccttacactggataaggagaagatgttgtggttgaagagatgagaccaccaagtgcacagcatgaggctggagtcctttctggaataggctgaaactacccacactgacaccagattttccttcgcttgttccctgggctcaaggggcatgagtcttcctgagctggggcgtggggcactcctctgaggctgctgccggcgcctcgggtcttgctactgcagggattgcactgggagctcccctactccaggctgctcttctcaagtccacattctccatggtgaactggccttggcacctgccttgaccctgggaggaggctctgaccagttgggccttctaagcactgcctgctggttggcaacagaatgacagcttccagggaggagccagagtgacctggagcctcctcttccactgccaccctaggaggactgccttttggcacaagcccctcgctctttccctgcctgctgaccaccccctgcattgatacagatgaaccccaaatcctgtcctctgggggctgtgtttggccttcaagaggctgcaccctggaagaggtaacagggagatgtgagcaggcatagtgcccctgagttgtaactttggcttcctgtccccaccaggctcacccatgacatcagcctggaggagtttgaggatgaagacctctcggagatcactgatgagtgtggcatcagcttacagtgcaaagacaccctgtccttacgggtaagggcaagctcccaggagctcctgagtggggtggcaggaaggctagggacaggggtaagggtatccccatagtgacaaagggggtttcaggtctgtgctggcaccctcatgaaatgaaatgatgtgcaagaaacataggtatactgcttggcacgtcttgagtgtacaatcagaatttcatttggtattattattattattactgctgtcggggactaagacaggaagtagctccttcaactgcccacgagatgggagaggccaggaagtcttgagacctagggcagtaacaattaggaccagacttaagggagactcagggctacccctgaatccttttgggagcagccctggcagagggcctgaggcagacagggtggagtctggtggaatctgcagtgctttagggcaggaagaaacagccaaggcacccctggaatagctcctgtggctgctggctgctattacaccagacagatggcaccacgcggcctcccagaccctctctggcctatagtcctaaaggcccccactgaggggtttgcccagcattgctgctggtttgggccccttggctttgtcatagggaagatggctctctcctgtccctaaagatctgaatgctgccaggaggtccccagcacctgggtaactggggtcagatggggatcccaactatgtcttttcagaacaggaagaaggggccggcttgccaggaaatggaggacagagcacagggctaggttttagagcccagagctcctctgagcccccaagagggcgggtagccagatacggtgtcaggagagtggttaccataggagcgtgaggtgtgccttggggagggagtacctgtctctgtgttgacctcctgctactcccagagactcagtaagctctgcaagaggaaaccaaggggtgaggataatcccctagtccccagtaccccaaccttccactctctggccaggccaggaagaggcagaggcctctagatttggggaatggtctcagagccctgacttagcttctcagaggtcaggcacctgttctggactctcaccctgccctctcccccagctgcaccagcagagccttggagagggttgcctccgagctaggcaggggccccaggcactactggccagaggtgtgcccctaaggggcctcagacaagctccagcgggcttcacacacgttccagtgaatactcagctctctcagaggctgggaggcagtagtgttatccccactcaactgatgagggggcctgaaggatcaggggatctgtccaaggtgccagggagttggcggcagaactggagctagatggggctctgcatcctcaaggcaggctcgtggaggaccgatctagggctggaggggccccgggccagctggcttagggcgcggctgccaccgccttggttcctggcccccgctcgcccctccccctcggcgtctccttcccatccctctcaggtctccgccgttccttgcttggctgagcctcagtttttccagttttcctcaagaccccttcaaatactatttccccaacccccatcccttgcccaccccaccccgaactccttggcgaccactgagtccccatagcaacagcggtgacttcactctgggctcggcttacaaccccggtgaggtcaccggccgttgccaggggaacgggagggcgcaaggagtccggggtggggactgtggggaggtgctggccgtcagaggcacggctggatcggggaggcggcggcctcgcgcttcctcgcggcggacgggcgagagcgccccagtctccggcggcccctgctcggctcccctcgtgcccccttcgcgccacagaatggactcgcccgggcggggggcggtgcaagcggcctcggccccgccccggccccgccccctgacgcccctccgtgcgctgtgcagcccccgcgcgccgggctgctctctgcgggcggcggcggcgcggggagccggttgcaggccgagatgctgcagatggacctgatcgacgcgacgggggacactcccggggccgaggacgacgaggaggacgacgacgaggagcgcgcggcccggcggccgggagcggggccgcccaaggccgagtccggccaggagccggcgtcccgcggccagggccagagccaaggccagagccagggcccgggcagcggggacacgtaccggcccaagcggcccaccacgctcaacctctttccgcaggtgccgykgtctcaggtgaggcgccaacgtggggggcggcgccctgggccgccgcggagatgtgagggggagcgcagaggggctgcagcgggaaggggcacccacgggtccagtgcctggggacagcgcctgcataggggccgcggtggctcgctcccggtgttgggatccgaggagcgggcagaaccatccttacgaagagggggctgagtccagctggccgggcttggagccttgaggcgggattgaaggagggaaggactggggttaggagaggagtagggaattaagagaatgaggctttgaggggttcgaagggtttggagcctgggacctcaggctgtgacagggtttctcctttaggatatggggctcctggtgaaagtggagcaggagcagggcctggagaaaagggcatctgaaatggtcatcgtgggggaggccgtgggagatcgtggcgaggtggggatgggaagctcaggggccacagccagtttaagatctgggcagctgcgaattcccagaaggcaggggggaggaatgggagatggagctgcttggctaagttggggacctagggcccctgggagggtggctggatgccaaggagagttgaatagggttgggggagctggctgtggccctttgtcttccaggcccatcgggagcggtgcaggcaaggagctcctgggaggtggggcrgctggggctgcggggaaaggcttggtccctttcccaggatcctgtgaatggcttttggcagcccggctcaggaacgtgagggcttrggagagagctcccaggggagggagcctccgtggagtggagggagccctgtgtgggcattgtggggaggggtcccagggctgagaatgtagaatgggcagcccaggagatccaggaaggagggctgctgacaactgcatctgtcactcctcagtctcatgccactgtggtggggggtgcaggaaaactctgttatggatttgtcactgggatgattcatcctggtcccccaggccagctgctagggagacccttccttgtgctttttccaggctctaccagaaggtcctcaccccttctaggccataacttcccaagctccagagcagagagtcacctgtctctgacttgggctggatttgagcattttccaagtaaccctcagtacctgggactgggggtctgactgtgtctccagagagctcctgcttctcttctcccctgcctsctscccctcttgccaccacacacattggccatcaccacctttgttaaggctgataagagcatctccctgagggttggccagcttccctgagcaaggcggagggccatccagagccggcaagcctggctgtgacttgccacccttcctgcctgctccagaggagagttacgagtgaggcctttgacagtggaggcggggtggacacagcaaatggccctagggatggcctgagggggcagggccggggcctccctgtgccgggcactgttgaccacttccatcacaagagccttttgttccctgcacaggacacactgaataataattctctgggcaaaaagcacagttggcaggatcgggtgtctcgatcatcctcacccctgaagacaggtaagtcagggccctcttccttacctggacctccgcctgccctgactsagtccccactacagagagcaaaccctacagtctccaragggctgagtagaggtgaactgcccacccacatccctgcacgagcccatccaggggctgagatcagtggtggcatgagtgagttgactggccccagagcctgcgaagggcctgttgcccagggaggctttgtcttggtttctgtgtcaccaagctgagagtggcaggtgcaggtagctgggagttgggagagagcccctgccttcatgacctgcctgctctccaggggagcagacaccaccgcatgaacacatctgcctgagcgatgagctgcccccccagagcggccccgcccccaccacagatcgaggcacctccaccgacagcccttgccgccgcagcacagccacccagatggcacctccgggtggtccccctgctgccccgcctgggggtcggggccactcgcatcgagaccgaatccactaccaggccgatgtgcgactagaggccactgaggagatctacctgaccccagtgcagaggcccccagacgctgcagagcccacctccgccttcctgccgcccactgagagccggatgtcagtcagctccgatccagaccctgccgcctacccctccacggyagggcggccgcacccctccatcagtgaagaggaagagggcttcgactgcctgtcgtccccagagcgggctgagcccccaggcggagggtggcrggggagcctgggggagccgccgccacctccacgggcctctctgagctcggacaccagcgccctgtcctatgactctgtcaagtacacgctggtggtagatgagcatgcacagctggagctggtgagcctgcggccgtgcttcggagactacagtgacgagagtgactctgccacygtctatgacaactgtgcctccgtctcctcgccctatgagtcggccatcggagaggaatatgaggaggccccgcggccccagccccctgcctgcctctccgaggactccacgcctgatgaacccgacgtccatttctccaagaaattcctgaacgtcttcatgagtggccgctcccgctcctccagtgagtcagcaaggggaagcagtggggtgggggggtccctagcgggggcagagccaaaatgcgaagtgttctgggaggcgaccccaggccccatctggttaggactgaggcttctacctgccccgctaaacctggatcagagctgcgaccccccatccagccacaccacctcacctgcaggtgctgagtccttcgggctgttctcctgcatcatcaacggggaggagcaggagcagacccaccgggccatattcaggtgagagccatgggctggctgggcctagccaggcagcagtttgggccacacaccaccctctacttgtcacccctacatggcctcagcctaacccctgccatcagccttcatttatccactcagccctgggaggacagtgtccactctctagggactcagagtatggtgacaaagaggatggctacagtgagggatcccagaactgtgcacctagtctggccaggggcagggcacccaggagggtgaccaggaggatgcctgcccacaccccacctgacccttctctagacaaaagcctgcgcttcccacagcctctccattttagagggggccctgcccacaccctcccttggcctgtgtttcctcgatggcagatgcatgtctgcttgaccttgctctcccctggggttagtactgcaacaggcacacaggatgcttttgcaaatgtttactgaaataacgatgctgctgtggctcccagaccccagagtaggcctggctggacaggccttggtgccgaatttctcacctgtccttgctggggacaggtttgtgcctcgacacgaagacgaacttgagctggaagtggatgaccctctgctagtggagctccaggctgaagactactggtacgaggcctacaacatgcgcactggtgcccggggtgtctttcctgcctattacgccatcgaggtcaccaaggagcccgagcacatggcaggtagtgttccctccctggcctgtgcccccagccaccacatctgtctgccccaacttgctgctrggtgaacgtgtactccagatctcagccagccaggtsgggggctgagtggwagtgattttaggtccttttcacgatcaagcaaagtgaggcccggccaagttgggcagccagggattgtggcagcctctgtgggctctgccattccccgtgcctcacccaccctccttcacttggctgctcagctccctcctgctctttctgcccctcctcaattcacgcttgctttccagccctggccaaaaacagtgactgggtggaccagttccgggtgaagttcctgggctcagtccaggttccctatcacaagggcaatgacgtcctctgtgctgctatgcaaaaggtacctgagccctctcccttctcctcccttggatgggtccctggggcagagggacgcaggtgtctagaggcagtaaagggctcaggccctgggacaggagggatcagcagaggaacagacagcagctgacgtggctccatttgtcacctgtagattgccaccacccgccggctcaccgtgcactttaacccgccctccagctgtgtcctggagatcagcgtgcggggtgtgaagataggcgtcaaggccgatgactcccaggaggccaaggtgacttcttccaacccagccccttccttccatggccccaagctctcccccaagacttgygatgaagaggccatctcctgtcaccctcactgcaggccaggtgaccgccctcttgcttcttttctccctcctgtaggggaataaatgtagccactttttccagttaaaaaacatctctttctgcggatatcatccaaagaacaacaagtaagtgggggtgggatggcagtggaggaggcacgggtggtctgcagccttgaggtgggtgggtgtgggccgagccccygtcccagcacagacagacctgtccctgcaggtactttgggttcatcaccaagcaccccgccgaccaccggtttgcctgccacgtctttgtgtctgaagactccaccaaagccctggcagagtccgtggggtacgtgtacaccctgctgagcacccagccygagggagcacgcccaatcccaggccctggggctgcytcctggcgctcagctttgcccctcggtttcccccgcagctctggagaactatctccggaccccagtgygggtggcctggagggagggtggcgcggcagggtgagcctgaggagcagcttccaagcttggtagctgttgggccatgtcttcaactgayatcttactgggaaacgcgatggcaattctgtagagaacagagccaagtggccccagccagaggaaccagagctgcacttgggccccaaggctccagcgggaaaaccctgggtcgggatcctgttcctcccttgccagtggcgatctgagccatctgtgtgtcccctggcttctaggagagcattccagcagttctacaagcagtttgtggagtacayctgccccacagaagatatctacctggagtagctgtgcagccccgccctctgcgtcccccagccctcaggccagtgccaggacagctggctgctgacaggatgtggcactgcttgaggaggggcacctgccaccgccagaggacaaggaagtgggggccgctggcycagggtaggggagggtggggcaatggggasaggcaaatgcagtttattgtaatatatgggattagattcatctatggagggcagagtgggctgcctggggattgggagggacagggcttggggagcaggtctctggcagagaaggatgtccgttccaggagcacacggccctgccccatcctgggccwtacctcccctgccagggctcgggygctstggctcctgccttgatgaagcccgtgtcctgccttgatgaagcctgtgcyacctgcaagtgcccgccctgcccctgycccaacmcccaccgaagarccctgagctcaggctgagcccagccacctcccaaggactttccagtgaggaaatggcaacacrtggargtgaagtccctgttctcagctcygtcatctgcrgggcttctgggtggctcctgccacygacctcacyggcatgctrgcctgtggcaggcctaggacctcaggcggggaggaggagctgccgcaaggccctrtcycagcagragagggaggcttcctgactgacacaggcyagccccatcttggtcctgtcaccctggccccaactattaaagtgccatttcctgtctggactgcagtggatgtatctgcatgggcccctcccgtccccgtctcgctcccagcccaggaaagccaagcctttgtcacacatggtatctttatgagggccttgggtcataggtgtgcatcatagtaatactcggcaaggtcgggcccgtcccgcttgcgctgctgggccctagacaggaggggtcgaggccctcgcggccttgggtgcttggggaggatgccatagtctaaagagagaaaagagggcatgggtggtagggggcagctggctctgatggaactgaagtcacccttgaacagatgtggtttgggatgacaagcccctgaaggctggacttggggcacctcttaggggcgtctccactgtcagggatgggtaggggaaggggacaagagagatactaccatccaccaggccggaaagtggctgcgagagttccaggggggcggaaaatgcctcaggaacagaccgctgagacctgtgggagatgtcggggtgctcagccctggcccagaaggccaccgccacctccttgtgaatggggggatggctcagtgtgggggcacttggcaagccctcgaacgcccagggtaccagggccagccccactccagagaggggaggggcagcacctccaccatccggcccaagtgccctgccctctgtgccccaggagtcacctcagaggctgggagcgaagcagtgccactgccaggatgaggtggaggaagaggctgagcccagcccgggggtgcagagcccccagcatggcgagaaccatctcctacacgggtcctggctcctgtcgtccctatgctggcaggacggaacccgttgccggctcccagggccacctcacaaagggccttcattccaagcctgcgtcagcacctgccctggggcagggccagcagtctcccccgaggcttgtttttgttcttattgatgctgttggctaataggtgccaaacccgatcttgttctagtgttgctgtccaaggaataagagcacacactgtggagtcagatctcagttgaggtcctgaccttgcctcttactagccggacaagtcacttcatctctgtgtgccggagtttcctcatctgtgacgtagtccattacacaccctacagacataggccctccgaagagggcaggggatcctcaccacccagagccccagccattcctacagcaccccccccccacccccactggcatggcaggaggtccgagcaggtcccgccagctgaggagcccagagtggctctctcagccctgcctgtctcagggtctacgtgagagggagtgtgcaggctccctgtgtccccagctcagggcctttccctctccgctctctgcagcttacagcggcctgaggctggatggagggcttccagacatatggtggcagagctctggacctgcccctcaagtgcaggcttcaggagggcagggagggctttgttcactggaatctgcagccctggacccctggtaggcgcccagtgagcctgtacagctcggccctgcactggacaccgtcccctcgcaggcctgggctcagctgcaggtgccaccagaaggcctctggctggctcctggttctccactcagcagccaggctcagcccatttatacctgcagtgcgaacctggctcaccagaaccatggcaagccttcaaaacaaaatccctggccccaccccagatctgtagtatcagaacctgagggccgagcccagggctctggagctttggtaatccagttgcttgagatggccaacctgccagctggcccagccgctctcctctgacagctgaggggcccagggagggaagtcccttgtttccaaccctggctcctccagtggcctcattcatgctcctggtcctgagtaccggaggctgacaagttctggcggttccttcagccccgtcaccccctgcatgttgttcccgcactcacttcccagtggccacctccctttataagtcctggagacaacacgtctccacgagcctgcctcagcatcctgtgcccaccaaggcttgccctgccaggaacctggagttctgtccactctgtctaaccccaaagcccctcgtccttcttgctcctcgtctcctagacaccaccctcttcctccacgccagtccccaagactagctggggttacccttaatctccctatgtctgctgccactgccattgcccctcccactgctacagaccactgcctccaatgtcacggcccccattcttccacctctgcccaccaaagcatcctccaccaggctgctggaatatttacaaacacagacccctccccgcctaccatagaccaggtccaagtttctcccctggatatgtgatgctatgttcagtttggccccgaccttcccctccagcgtccagctcccacctcccatggctccacagagctgtgaccctgggcacacagcggccccttgcaggctgtctaccgaaaaactggacagttctaccggtttcaagcctgcctgagtcaaggcttggccaatggagcccgatgaaacccttcacctctgtcaccactgcaggtaggcagttgccattaccggggcacccccaagctagaccccgctctggacatgccacctcctgccaagtccccagtgtggtgcctgcatccacatgcctgtttcctccgttggtgagaggcggagggcaggggactgtgcttcactgctggtttctgatggccaggcatgtgcccagaaacgcctgttccactaagctggaggccatgggagcccaggcagccccttcccctgcctgtgggtgaggacctggggggcgctcctcagagggccctggggaaagcagtgtgtcttggaggagctgaggcatggaggaccaaggtgtagatggagccctctctgtgggtttgaaactctagcatgagaggctggctcttcacagggccagtggctgaggacaggctaagttcagggagaagaagaccagcctgcggcccaccctgtccaggccctcccccatagcagcttgcatggctccaggtggacccggcctctggagcctgcagggcaagcatggggaaaccccagctcataccccctgaactggccccggcttcctccccgagcctgtccagctcccactccctccccagtgctggccagtgcctgatgtcctttttctaagggagaaaagccttttactctcaaccgaggatgcagggcttaaagtgccacttgcgtgggagccaggctcactgttcaccaggctctgtcacagggaggctggcaacgccatggcctggggctgccagagccacagggccctgcggagaaggggcagacggagggccccagccagaagacacgctgggcagcgttcagccatcacccgggttcaggcttcctgtcctcaccaggggccagcgagagagcagcagtgttcgctcctatggctgccgaggcaagcagcttcccgggctccatgaggtgaagtcaccgctttctgtgggagaggagcctggatcccactcctagtgaaggcttcttggcccagcagtgacaaggtgcgggctgcagtggcatcgtcacaggagagcgcagtcaagggtgtcctgggaggaacgctggtggcgaccagggctgtgtgtggggcctggccggtaggcacggagaggccgcacgctgggacgctgccggagtcagttttattagggaagaggggctccctgccccacccctccccacaccctccttccgggaggtctgtcagccccaactgtagaagtagattttctgccaggtgggcaagtaatccatgagcggccctgcagtgggagagggacacatcagggcaggccagaccccaatctgcactgtggcgccacatacagcacctcacccctgcggcccaggagccagcccagctggctgtcttgccctgcccccaggaggcagcactgcaggggactctggcaccatttacaaagaccctcaggcccagagaagctcagccagggtagacactgaggggcctgagtcaggtccagtcacccaacccaagcccagtgggcctctgctgagggaggatctcagcagcccggtggaccccttctctgccattgaatccccccaagatgagatggtcccgtatcgctccaggatactgtgaccagaaaaaagctggcagctgatgtggtccccccaccagtggacaccctccttccagccatccctggctcctcaggccaccctggcctatgcccaggggcagtcccacccaatcctgacttcccgacttcctctcctgactgtgccaagaatcaaattgcaaggagacagaggagtcagggaggtgcttgcatgcatgcgccttccagcactacagtcatcgcgtccccatccctgcttacttgtgaccaggccaacgccagggacgtggtcggccagcaactggagcaggaagaggatcctggccctgggggaggcaataaatggggagcaagctgagtggggtgggggtgggtccctgcaaaccaggaggcccagaggccttcactgaccaccgtgccgaatgcagcgcattccagaaaacaaaggtgactttcttgggagctaggacaaagcccggtacacaagggcaagacctctggggttggctctggcctccaccctccaccagctcagcttcggggtggccgctgacccacaacacctcctcccattcctctttccccttccaccgacatccaacactgaaggcctctagagggtcgcatgtggagcagcgccctggcagtatggtggagggtccagggaggacaaccccaccctgccctcgggaagccccccagtctggcagaagtgctgggctgcatggaaacctcacaagccaccaatgagagtagtcaggaccttggtaggggacacagtactgaagagggcacattttggttcaggggaaggggcaaggcccaaggccctgatttttaagacaggagggttttccacaggggaactcgggtgagatgaggatgctgatgacaatacatagcgctacgtgcttactacaccccacgcactgctgtacgcgttagtcactgaacccctacaaagtgggtactgtcatcatccccatcttacaggtgaggaaatgaggcacaggcgcatcaaataacttgcccaaggctacacatctggaaggcggcctgactccttatatgtctgtctgagcagcaagaaaagaggaagcctgggggccgggtgtggtggctcatgcctataatcccagcgctttgggaggccaaggcgggcagatcaattgtggtcaggagttcgagacgagcctgaccaacatggagaaaccccatctctactaaaaaatacaaaattagccgggcgtggtggcgcgcacctgtaatcccagctacttgggaagctgaggcaggagaattgcttgaacccgggaggcagaggttgcggtgagccgagatcacgccattgcactccagcctgggcaacgtgagtgaaactccgtcccaaaaaacaaaagaaaagaaaagaagaaggctggctgggtgcagtggctccacctataatcccagcactttaggaggccaaggcgggcctttgtttccctaaaggacagggagcagggtccagagaggtgccagggtgtggtccagaaggagcagccttactcttttttctgttttaaaaaaaagatgggtcaggccaggcgcggtggctcacgcctgtaatcccagaactttgggaggccgaggcaggcggatcacgaggtcaggagatcgagaccatcctggttaacacggtgaaaccccatctctactaaaaaatcaaaaaaaattagccaggcatggtaatgggcgcctatagtcccagctactcaggagttgagacaggagaatggcatgaacccgggaggcagagcttgcagtgagccaagattgcaccac

SEQ ID NO: 96985 - DNA, 13471 bp, Homo sapiens
aaacaggtcaacattaggggaagctgagtggacgattctaaaacctctatgtgcaatttttgcaactgcctttgagtcttcaattattattaaagacttttaaaaatcccatgaacatagcaagttttccaaaattgcatggaaacataaaggtcgaaacatagttgtcaactttaaaaaaaaaaaaaaaaaacgaaagcggggcaactagcactatccgatttttggacacatcacaaagccacagaaggaaagagaatatgatgatgacaaaagagcagattaatgaaccaatggattatgacagagagctcagaaacagacccgtatatataggataacttgacataaaccagccaaggttgggttgtcacgtgatgggattaagaaaactggcttgctctatggagaaaaataggttcttatcacacttgaaacaaagatagaatccaaattaaagacctaaaaatgaacagtaaaactatgaagctattatggaagaaaatgtaggagaacatcctggtgatttggggacagggaaggagttcttaagacaagccacacaccataaagcaaaacattggcaagttctgcattaaaagtaaagatttctgttcaacaaagggcaccacagaaaaaaacaacagatgggtgacacactagaaaacattcgtaatgcctaaatggagaatgaacacccacagagtatacaaggtacccatgcaaatcaacatgagaaggacaataaacccaatgtttaaaagtagaccacagaaattaggcaattcacaaaaaggaaaaaaaaaaattttaagtatactgctcacaagcatatacaaagataattaaacactaataattaatgaaattcaaattaaaacaaagcaataactatttcacaatcttcagactggaaaaattagaaagacaataccaaatgttggtaagaaagtggagacgaggtaccctctcctgcaccatcatgggaaggcaatgtgcaattgtcatcctggaaagcaattagtttgtgaaatgagatacgcacctactttatggcgccatcccatcctaggggcagtctcagagcaattatggcacaagactatataaagggacatgaatgagtatgtttaccagagttgtttgtgatagcagggagttggaagttacctaaaaggtctgttaaggaagctcttttagatactttggaatcctatgctgtcagaagcagtgaaatggttgtacacacagcaatatgaagagatcttgaaacagtattgtgtcaccatattaagaagcagaacaagatctacaacataatcccagttaggcaaattaaactcacacatgcatgtgtgcgcacacccatacacaatagtgctatctattttatagcaacaactaacgtggttgcctacagggattgtggatgaggcaggaaacgggagtgaaaattagggaggaagaaaatcaacaacagaggaaaccttttaaggaatcaatcatgaaaatgatgagtcatcaactgagtagtagtaactcaattttctgaggtccattaaaaaaaaaaccaggtataactgtaaaacttgtatacaaccttgcatgttgaaaggatcaaataaaatgatgtaagcgatatatatgaaagtattccacagacttgtgaagcattatttaaacttaagtttctacgaggttaagtagtttgcccaaaggcacttgtctagtaagaggcagaactgaaggagttacccttaatgactttctcacctcatttacaattcaccagcaaggcaaggcagctccactttcaaaaacacatcccaaatcagattccttgtgactacactactgttttttgtttgtttgtttgtttgttttgagacagagactcactctgtcaccccagggtggagttcagtggtgcaatctcagtttactgcaacctcggcctcccagggtgaagtgattctcctgcctcagcctcctgagtagctgggatcagagacatgcaccaccaaacccagctattttttgtattttcagtagagatgaggtttcaccatactggccaggctgtgtcgaactcctgacctcaggtgatctgcccgcctcggcctcccagagtgctgggattacaggcgtgagccaccgtgcccggcctaccatcatcttttatgtgaactactctactctccaagctgggcctgctgcttccagtcttgcccccctacagtttattttctgccagcagccagaattgtcttctgaaacatctatcagctgctgcttcctagctttcacctctccaagggctcccatgaaaaccattactgtggcctgcaggccctccacggtctgaccactgcttatccctccagccagtctctaccatcaacttcctgtactctctgttccctgccctgcagccacactggcctcttcgctcttctctgcacatgccaagcatgttccccatctcaagtctttgtattcgctgttccctctggctgcaatgctcttcccccagacactcacagttctagcttcctcatttcattccggtctgtagtcagatgtcacctgccttctctgaaatcctttctaaggaaactgcctcccagtgctctttatcctctcatcttccgttactttccttcctggcccttattacctgacatcattatatatatattatatatatataaatatattatatatttatgtatatatattatatatacatattataatatatattatatgctatattatactatattataatatataattattataatataattattattattatatattataattattaatatattatatataataattacatgtattaggtgaataggtgaataaataattattcacctattcgctgaataattaggtgaatatttaggtgaataattatttaatataattaggtgaataattatatatattatataggtgaaatataatatatattatataatacgtattatataatatatattatatatcatacgtattatatactatgtattatatgtaatatatattatataatacatatataatacatagtatataatacgtatgatatataacacatattatataatatataatacatattatgttatatataatacgtattatatatgttatatattataatataatatataacatatataataaaatatataatgttatatattatatattatatgtattatataatatgtattatatataatatataataaatatataataaataaataataaatatataagaaaataatatataatatataatatatattataatatatataatatataataaacataataaatataaatatatctaataaatatatatatttatttctggacttgcttgattgtccatctccctggccagtacctaagcatcttgtcttagtcaccactgcagccgcacagctcagacaatgcacgtggaaaacaggtggatgtaaagatttcttgaaagcagcaatttaacaaactctgatctgatgcctcccctatgctctttcactacaccacgctgcttcccaggaaaaggataaatgtgtgtacagttcgtcattctctcctaacagattcaaaggtccatggctcatctgcttcttcttcatgtactacaaagcccagcaccttgtaaatgcaaggtaaaaaggaggaaacaaatgagcgcaaagtaaccaccataaaaggtaaataagaaaggaaaggtagttgatggtcatggagaaactactcagttgtattcaacggcatctgaccattcagcggtcaatccttcttttgtttcctacgcgtctatatgcccaagccacagttagacgtttcgaaggagataaaaatgaattccagttgtggaattaacagaagaatttgtgaaggaggtagcggtcgaaatggttaaactgaatactcatagacaggtaacaggctcattgcctgtgaactcctgaaagacaagaactgtaacatattttatttaccttggtgtcttaaatgcctaacaaaacgtccagaacataaaggcatttggcaaatgttaaacaaacttgggagaggcaaggcattccagcagaaggaagaagtcaataaaatacacagatgacagaatacaggacatataccagcaccagtaaatagtgaggactggctggtaaaaagcgttcatgaaagcaagtgcaagaaaggctcgttaaaagaaatggcaagaaataaagtgagaaagtaggatagggccgagacacagaatgccatgaatgactgaggggtttagattttcaatgagagaccactgaagactttttttttttttttttttttttttgagatggagttttgctcttgttgcaaaggaaggagtgcagtggcccgatctcggctcactgcaacctctgcttccaaggttcaagcgatttttccgcctcagcctcctgagtaactgggattacaggcacctgccactatgcccggttaattttttgtatttttagtagagacgggctttcatcatgttggtcaggctggtctcaaactcctaacctcaggtgatccgctcaccttggcctcccaaagtgctgggattacaggcgtgagccaccgtgccgggcccactgaagactttatacagcaaaaggtggcttgaggagactaataagagccccctgctcatatcaatcaatcaatctaccatggcttcacccaaactgcctgcaattctaccattagaaatttttattttaggccaggcgcagtggctcacgcctgtaatcccagaactgtgggaggcctaggcgggaggattgcgaggtcaggagttcaagaccagcctggtcaatatggtgaaaccccatctctactaaaaaatacaaaaattagccgggtgtggtggcgcgtgcctgtaatcccagctactcgggaggctgagacagaagaatcgctagaacctgggaggtggaggttacagtgagccgagattggccaccgcactccagcctgggcaatacagtgagatttcgtctcaaaaaaaaaaaaaaaaaaaaaaagaaagaaagaaagagattattattttaaggcatatcctctgtacgaatcttcctaatatccaaattatcctgtgaggcaatagaaaatgttgtcgtcattcatttatacttctgtgtaaaacggataatcagtttgccctctcctggctagcgagtagccactaaggagatgggaattttgaatgcagatgaaagtttaactttttgacttcgaggcactgccttggaaagataaagtctggagtacaaaaagaaaaaagaggttaactggtccatgcctttccttgagagccaaccctgttctttcagcaagcagaattgagtaaagatgaagagaagacatcagaatctcccttagtgagaattaaattttgatgacccagaaggtaagaaataatatgatacactgaacatttttcagaaattaaaaaaatggttctgtagcatgtagacactcataactttataatctgtttagttttcctcagaaatggtaaagactttacctaaatcacatccaatcacttcatgaacggtgactgacaataccaattcaaggaatacgatggggcaagaagaagaagaaatttataaagacaatgccgaaaatccacccaaatggtgttacgaaccagaaatgatcatcaggatggtaccagccacacgataaccctgagaactccatccaggtttaatggaaaccgggtcctccatctggacgggtttcagcttggtaaatcctgattctaggccacagagggctcatcttgccggctagctgggcggcaggctgcgcggaaaacgccaggaagtatttcccggggcgcccacaagggacccccggctccctgcggagctggggtggggcgggcactcaccgcttgtcgatggcgtcgatgtttgaatggaggagccacagctcctccgtattgtcctgccgggaggacaggatcaagtggtggcccgtcaggcacagggtgccctcgacagccgggtagaaaggccggtgcagcaccacattgtccacccgcggggtcttaatcagctccgcaaactccatgctcccccgcggccggagccagggaaccgagcccggtaggtgcgaggcggttaccccgccgcagggaagtagcggaaacacccggcgcggggctggcccgtggggcggggcgggccgggcggtgaggctgggcccgccccaggctgggtgggcgcggcgaggcctacagccgccggcaccggccgcggggagacaggggctggggctggacgaggcccaagcgcctctcccgcaccgcgcggttcaccaggcctaggactcggccacagagaacccctctccacaggcccaaggaccgccgctgccgttgggctccgggtcccgcgttggcaagcggagggcagtaggagaaagccgcctcagaatccgcttccacgccctggccgctagggactcctagcggaagtggctactcgctgctggagcccacaacaactccgggcggaagcagcaggtctcgaaactcggaagacgcggaagtcgcagccggaagttggtcctcgctaggtcctctggaaatgcctccggaaacacagccagaccagaagatgtgtgttcctacgagaaaaaaagcttgtctttgccttcacgccctcccgctgcctttcttaaccacctacaaatattccttatcagaagaggtccgggaagagggaggaggtccctgtcttgccttcctccgcttgagtagtatcccctccagaagctcttcagagcgtggggctgctgtaaattgtgataattgttatgcattagccctgaagacatggcaagtaggggatggaggcggtgactgtgaccttacggaatcctccaggggtcagggagggacacagggccactccacaggctctccgagagcgccgcgccacgaggtgtaacctggagcaagaaagaggaaaaacaggaatacctgtgagaggaacccaagtacatgcagtgcacagaagagcaagtcacttgacttgctggcggccaccccrttaatctgcagcagagcctggacttcagtctgcatctgtgaaacccagcgcatgggtgcgttggtcaccaccgcacagcctccccgtcagacacccacgtttcgccaaaaatttattcaaataattactcctttgcttgttcctttcccaccgcccacttctgacatttttattcaaaagtaggaaatagaagagaaatatgtttgagtgctggtctgctgtgacttcattgaccttttaaatcctcaccatctagtacctaagcacagcgagttggacaaactctcacagtattcacaaagtaaattgccacaacctcatcagctcatccaacacttgtccatgcttttgattttgtccttcttaaaatgtacccttcttaaaataaaccactttatagacttgttttaagtgagatacgtaaatgcctaccaactttccttggtgtctttgttgcatagttactgtagactgaataatagttgccattttttatatttttgcagtttaattgctttcgtccaaatagatggaatcacttcctttgtaatatatgaagtgttttaattcatttttataactagcattcctgacagcacaggtatccaccccctgaagttcccattctatagaacaaaatagcaaataagtattttttttttgttccataatggacacccagtatacacccagtatacacagggacaccgcatacagggaatcagctttattttacaacagagcttcactttacccctctggcaattaatagattctgggtatttattaagaactttaaatttaatgcaaagactgttaaataccaccagctcagctctggcaaaggactgttggctttgtttatctcctatcttcatccagatacactgccatccctatcccagcccgatcttgggtccttgaaaaaaatgacctatcattccaactaccagggaggaactccctttgaattaatgaatctggatgacttataagacttcaaaagtatggaaatgacaaaggttaaaatgacaggatgagcagtaaaccctctccagtccaatcagagcaacctttttgagggtgcattcccacagaaacccattaggggcccaacatcaacatacacagagctaaaattccagatgccactttgtattgaaagaagccaaaattctgttcaggtcgtgggaacttgaagtcttcaatgcaaccacaccccagaaattaaccctcacacaatcatgtaagctatgcaattaaccaaactgcatcgtttagaaaacctgtatgcttttcatggaaaccatccctagttaagggcactttaaaggatgcacagtctaagtactgtgaaggtgggcccactagctgggttgacattttcgcttggccactttagtaggaaacttaaccacttgggaaagtgaaaacaacaagctaacccacatgttcaccatggaaaacaatttttgtcttgaaaaacaaggaaccttttccctgtgcagcaccagttcctactgtgtttaccagccaattggactggaacctgtacacttggtttttagcctccgaaatcaatatagctcccggccgggcgcagtttctcacgcctataatcccagcactttgggaggccgaggcaggcggatcacctgaggtcaggagttcgagaccagcctggccaacatgctgaaaccctgtttctactaaaaatacaaaaaattagccgggtatggtggcgcacacctgtaatcccagctactctggagactgagacaggagaatcacttgaaccctggagacagaggttgcagtgagccaagactgagccactgtgctccagcctgggtgacagagggagactgtctcaaaacaaacaaactatatatatatgtgtatatatatatatatatttagagagagagagggagagctctcaacaaccaatccctcattatacctttaactgcaaccgccagacacaaatgagcaatccaactcaaacgcctttttgttgggctaggaataacagtgagagcaggaacgggagttaccgggcttgcaacttccctatactgttaccagcactttccaaggattttgtggaaagcttggatgacattgcccaaagtatcgtcacaacacaaactcaaacagactccttggcagcagttgctttacaaaatagaaggggactggatctcctaactgctggaaaaggtggcttatgtctttttctagaggaagaatgctgtttttatgtcaaccaattagaattagtaagggatgccacccagaaattagctgaccaggcttctaagatacgacaacagctgtccaagtcgtggtcctcctgttcaaaaatgctaattacgggttcatgagtccttcctctgactggctcgttgttaattatacttgccttggtttttggaccatatttattaaatacattaaccaaattaatttcctctcgcctagagaccatcaagcttcagatgatcatgcaacaaggtttccagccagttcaggtgaagacaccactactggccatcaagaagctaccctgtatccactagacagagcagagtgagagttctgtgatcccaaataggtaggcaccgcaccccaagtcagcatgaagcagttacagaagaaagaccattggtccctctgcctcccataaagatttatggggatcatgtctcacagcgggaaaatgagacaggagaatagggtctagaggcagggaacctaaggccaattctcactgacttcctagaactgaatcagaggggaaaccccacctcttcacacgaatgtaacgaaaggatcagaggctactccctttgcactgcactgcaaatgaaaaatggaaagtacctctgattggtcccctcccacaaccattcagactggttgcaggccaagtcttcatgtgtaactttgtaactaccgtcacttcagactctgattggtcacctcccatgatcagtcagacttgtgacgggccactccttcatttacatagggtgtaaccaagtaaccaatgggaaacctctagaggctatttaaaccccatgctgcacgatggctcacacctgtaatcccaccactttgggaggctgaggagggtggatcacaaggttaggagttccagactagcctggccaaccgacatggtgaaaccctatctctactaaaattacaaaaattagccaggtgtggtgtgggcctgtaatcccagctattggggaggctgaagcaggagaattgcttgaacctgggaggtgtaggttgcagtgagccaagattgtgccaccgcactccagcctgggtgacagaacaagactccgcctcaaaaaaataaaaaaattaagccccagaaaattctgtaaccagcgctcttgagccacttgcttgagcccgctcccgctctgtggagtgtacttttgtttcagtaaatctatgcttttgtcgcttcacttttttgttgctttgtttgtgaattttgtccaattctttgttcaaaatgccaagaacctgggtgatttgtagtcagtactctccaccagtaacaataatattgttacacctgagagtccagtctaaaaacaagaaccaacagagtagggaagatgaggggggatgatttacaaagttatttttttaaactggagtttttgactttcttcatttatgtggataagttataacaattaccaattgtggaatgaagaatttaattacagagtgaagaatcagggaacgttttatggagaaggtatcatttgaaaacaggaccttgaaggatgagggtcacactctgaatggaatgtggccgacagagatgtccaatttagtgatatctcctagaggtggggatgcatttttcagtaattccattacctttttcttttagtttctttatgtggggggaggcacatgaaaagctcatggtttcattaagtgaaaaatgtttacttttctataacaccatgaacttttttgcccatgaaagaaaattgtcaatatcatgctggattgttgtaacaaaactatttaaaaattacatctacttgtgttgaagctcaaagcatagaaagcccttgagatctgaggaaaacaaaaattcacttgtaaggaatagagcatagaggtgagtttcggagattgagagcacaatatgttactttattatacgaacagtagatggcagtggagtttaacagtaatggataggcttccattctattaaaataattcaatgaagctgtagtcaaacacattcttatccaaactgcctggacataaggatctgagaggagtctgataacccaaagaagatggtggcatttataatgcacgtaaaagagttactcaacaacttacagatgttattattataatcagtctgtgagataacaaatggcattgatatgtaatcatctagacgttattctcccaaatagtcaaccagctcttagtgcctatttggtcatcagcactgtggggaatggaaacaataggtttgacatggccattgccctcaaggagtaatagctaatttgggaacgctaacacgtgccacacttggggagaaaatacaaaaattactgttgagttttgaagtacagatttactttcctggttttgtgttgccctactaggccgtgagtacttagtagaaattgaggccttttgaatgtggtttgaacaaagcaggccgaccgtgtccaaaattagcaggaataactgagacggagaagacatggcctgtgtatgctcctaatgaacagccattctccgtgtacttagttgttttgtattgacagtcagcagctgaaaccaacccaataacctcattccaggtctttcttatgtcttcccttcccttcatctcccccaagcaaaccagtcaccaaatggatgattctgtcttttcatatctcttgaattcctccacttctccccatgcccaaggccactatgttagatcagactaccatcatttctcatctacttaacaggaaaaatattttagttggttttctttcttccagtggggctctccttcaatccatttttccatttggaagctctttggttgtctttggtgctctaaattctctctctctctctttctttctttcttttttctttctttcttttctttctttccttctctctctctctctctttctttctttgcttaacttataaggcccttggtgatttagccttttaagcagagatcagcatcacaggtctcatctctgctcttctttccctatccagcagtctctaatctccacccatatgcaattttcatgccagctatcctcaaataacttgccttttcctcctgagattttgcacccagttataaacttgttactacatggaggtgtggaacagggaccagcatcactgtcattccctgggatctttgttagaaatgtctcactctgaacctgctgaatcagaatctgcatttttataagattcttagatgatttatacacacattaaagtttaagaaagcagtactttaaataatttttgtgttctttctgcctggtatatatttacctcactcccagcaacttgtctgtcaacccgctaatgctaccatccttcagatctcctctcagagatcactgcctatgggaagccttccctgattttccctcacaaatatgagtttcacaatacataggcttcatagcaccatataataataactcatactaattgagtgtttactctgtgttctagacattggctaaatgccttacatgtagtctcatgtcctccttctacagtgttctgaggttgatcttgggaggaattatgtctctccctccgccaaattcatgtgttgatgtcccaaccctcagtacctccataggctatttggagctaggatctttaaagaggtaagttaaatgagataattaggatgtctgtaatccaatatgactggtgtccttatactaagaggaaatttggacacagacacatatgagaggtgaggagagagggttcaggagaactcaaccgtgctaacgctttgatctcagatttctggcttccagaactgtaagagaaatttctgttgtttaaaccacccaggctttgatactttattatggcagccctggcaaactaacacggttggttattgttctccttttattgaggcacagagaacttaggaacttttttttaggaacttttccaaggtcgggagtaaatggtccagatctagactcaagcagtcaagtgtagaccccacgatctttaccaccatgctt

SEQ ID NO: 96986 - DNA, 12342 bp, Homo sapiens
gcccctgacggagctggacatccaccaccgcatcctgcgctacaccaactaccaggtggcgctggccaacaaaggcctgctgccggcccgctgcccgctgccctggggaggcagtgcggctttcctcagccgcggcctggcgctcaatgtcgacctgctgctcttccgcggtcccttctcgctcttccgcgggggctgggagctgccgcacgcctacaagcgcagcgaccagcggggcgccctagcagcgcgctgggggcgcacagtgctgctgctggccgccctgaacctggcgctgagcccgctggtgctggcctggcaggttctgcacgtcttctatagccacgtggagctgctgcggcgcgagcctggcgcgctgggggcgcgcggctggtcccgcctggcgcgcttgcagctgcgccacttcaacgagctgccgcacgagctgcgcgcgcgcctggcccgcgcctaccgccccgccgccgccttcctgcgcaccgctgcgccccccgcgcccctgcgcacgctgctggcccgccagctcgttttcttcgcgggcgcactcttcgccgcgctgcttgtgctcaccgtctacgacgaggacgtgctagccgtggagcacgtgctcaccgccatgaccgcgctcggggtcaccgccaccgtcgccaggtgcgacggcagatgcccggggtggtggtgtgtgttggtttctctgatctggggccatgtgaggttccccccgaatccttacctctcccaccactggggccctctagccctacatcccaccgcgcgtcctcctaatcgcaggccccttccccccacggatcccgcctttcaggtctttcattccggaagagcagtgccagggtcgtgcgccgcagctcctgctgcagacagccctggcccacatgcactacctcccggaggagcccggccccggcggcagggaccgcgcctaccggcagatggcgcagctgctgcagtaccgagcggtgagggtgggcgcgacggcgggctgaggaggaagttgtggggtctgtctgcgcggagggtctgtctgcgcggagggtctgtctgggagagggcatgagacaaacggactataccaggagtctagggagtgactgggtggggaggcttcttgccctggcgagggtcgctggggactgcttggtcctgataacgcgcgtgggcccctcagcgacccctgctcagcctcaccgctgcttccccaggtctccctcctggaggagctcctgtccccgctcctcaccccgctgtttctgcttttctggttccgccctcgtgccctggagattatcgacttttttcatcacttcactgtggatgtggctggggttggggacatctgttcctttgcccttatggatgtgaagcgccacggacaccctcaggtcagagccgttccctggccctgggggtttgggctgggtgggagttcgcttgcctctcgggagcagacctgagttccagccctggctccattgcttgctacctgtgccgttgagcgggtcacttcccttcctgtgctctcgtgccctcgtctgtcagatggcaacaatggcaatgtgctctccagagcacagccaaggccaggcttgtgaacacacagattatgtctgtatagcctatgatggagttgctggcacatagtaacgtcagtaaatgggagcaaagaccacctgggggtgaggaatgggcttggccggtgggtggggctgagtaaggactggtgcctggaccaaggctgtcaggatcaccctgggcaaagcactgaggctcagccctatccccgagctggcaatcagtccaggggtgacgaatagatgacaggcccaggttctgcactgctgctgtatttttgggtgatggtgaacaagtccccattgtggtctgtttccttcacgtggaagatggggcagtgtttcctgtcccacctgttcccataaggctcagtgttcttagcacctgaaagactgtccttgctcacagtggctctcggcgggacagactgaggcctcgctgtctcagcgtgcggaggacggcaagactgagctttctttgatgcggttctccctggcgcatccactctggcgccccccagggcacagctctaagtttcttgggcacctctggggccgagtacaacaagatgcagctgcctggggtgccacctcggctcgcggcccctccaccccgggggtgctcagcaactgcacctcgcccctggtgagtcccaagcctggcctccccttctgccttcacccccacaactcctctccaaacccttcccctctaggctcaccttaggtagtaacctgcctcaccagcccccgcccccagcctgctctcctgccttctttaggcctctgcttcctccctactccgtttctgtcctctcttctgactccctctttggctttccctctcctcttgcacccagcctgaggccttcctggccaacctcttcgtgcaccctctcctgcctccgagagatctgagcccgacagccccctgtccagctgcggccacagccagcctccttgcctccatttcccgaattgcccaggaccccaggtgaggagtggaggctgagatgcaggggcatgtggaggggggtgggctgatcctgtaggagtggggagctggggcgctgaggggggattcagaaggggagtcctctggggtgtggcgggaggagggcatgacttttgacctgcttcatgttatgttccagctctgtgtccccaggaggcactgggggccagaagctggcccagctcccagaacttgcttctgccgagatgagtctccatgtcatctacctgcaccaggtgagtagaggggtgcccaaaggagaaatgtggagagaaggcaggtgaacaacatggagactgaggtggggtggagtctacggaagggtctagcagagtggcaggaggaggctgaaaagccctctgcctctagcccaggtgcttggccctgccctccttggggtgcagccctcattcctcctcctttccatgcagcttcaccagcagcagcagcagcaggagccgtggggtgaggctgcagcctccatcctgtccaggccctgctccagcccctcacagccaccctcgcctgatgaggagaagccatcctggtcaagtgacggtgaggagggtggggcctgcaggggacagagcctggtggacactgggcatcatggaactgcccagctgatggcctttttcaccaggctccagtcctgcctctagccccagacaacagtggggaacccagaaggcccggaatctgttccccggagggtttcaggtgaccacagacacccagaaggagcctgaccgggcctcttgcactgactgagacgactcctcagggtcagtattgcctcctgtgaggggagggagaaaggacggcataggtagttggtttggagtccgacttgaagcgatgggagcagtggtgggaatttggggtgatgggaggtggtcatctctggaatctagacccctggactgcttgccaagagccgtctcctcccacaggtaccctggcttcggcagccacaggagattggagggtggagtagaaaaacacaaggagtcattgttagaggccccatagatgacaggcccaggtgctttagttgggcaggacctgggagtcagtgaggaactcgccccgagaacagagaaaaggtaggcaaggagaggagatgctgatggcatctggaaacaagtcttagagatggtctgcacccagagggaataaggggagacatccccaactggaatgtgtcctggagcagctgcctgggaagaagtcctcgagtttcctcaaggtgggggacagaggtcaaggatgaggccgagctaaatggaagggcgacagtgaggcaggtgggctttaaggctgtggattcgtcatgctggcggctgccagcagcactttcaggttccttggggcttgtaggggatggggacttgtcagtggaaagacgggagggatgatgtttttggacttcagtacgggtgtgatgtcccaggaagtgggtgtggctccccatcctgtatgaaataagcagtaaagcttgctcatggctgttgcacatctctgtgactcttgtttctggcaggccccactcctggcagctgagtgctgcacctgccttctcgatcacgagcctgagaactgcacgggggagcagcccagactggctggaaaccatgttttcagagtgcagggtcaagtggcgtgtaggactctgtcaaaagaatgacccctttccccaccacatacccacaactgcacaggttaaaacagaaatcttgtcattttataattgtaatccacgccgggtgcagtagctcacacctgtaatcccagcactttgggaggctgaggcggttggatcacgaggtcaggagttcaagaccagcctggccaagatggtgaaaccccgtctttactaaaaatacaaaacctagccgggcgcggtggcaggcacctgtaatcccaactacttgggaggctgaggcaggagaatcacttgaacttgtggggtggaggttgcagtgagctgagatcacgccactgcactccagcccgggcggcagagggagactccgtttcaaaaaaaaaaaaacaaaaaaaaaaaactgtaatccacatgagctggggtaggcactttagtagttctcctaacatctggcacagtcccttatggtaaatcttcaataataaatacttgatttagagattagactttacaggtaagatactcctgagagaggcaagaggaatctaacattcgactaagaaacaggaagcgggtggcagtaggccctggggtaccgctgctgggaggggccttccagattaaggcggacccaggcccgaggcaacaggcctagagagggaaaagaggcgttttgctccttcctggaggaataatgctgaatccttgcagcctctggacagatgtgagaaggcaccacctcaagaggggaggagcggggctgatcctggtcgggcggacctgagtcgggcagccgctctcccggaactggaagggaaagccaggcggctctcaggggctgttggtgtctgagccgggagggtcgaacgcccagggcactgcgccccgcaactgacgctcctgcaaggaaaagctctgggtgcgtatgcggcttgtcacctcctgggtgcgcagcgtgagcccgaaaatgtcttcgtggtagcgttgctgatcctgtcggaaaagagcacagtggatcagaacccgactcggagaccttagcaggaaccccgcacgctcaggcccggcccgcccctccgcacccgcagcacgccgatgacgtcgccggcctcgtccagctccatgtcgccctccgtcgccaggatgcgctgcacggtctgcaggacgttggttgccatggtaacatcgccgcagacaaacatgtggccccgctcgaggcacagcacgcggtgcacctccgcagccagctccgtcctcaggatgtcctgcacgtaggtctgcggggcggcggggttagggcgggccctggtgggggtgggcgcgggggcgcagcccggggctgctggctggccctggacgtgaaagtctccggagcgggcctggtggggcctgcgtgccctggggcggtgtcaacaggggcagagccaaaggggcggggcaggggcgggaggaggcgggcctagaggggccggggcacaagggtgggccagagtgtgcaggggtggctgagtggtcgtgggaggccacgggagggccgtggttggtgtgccccgctggagagcgcgagtcctcccctctctccctatcttcaggttaccattgcgccctcagggtctcacaccttggggttgtcaggttcccgggagaaggcggtgaggactcggccaaacaccccgcgctgctgggcgttctgcacctcgtcgcggtagagatggtcaagttgggagcatcggcagccgaacaccaaagtcatgggagtgggctgcagccctgcaagcaaccccgcgcttgggaaggctcttctccggggcacagtgctagtggggcctccccacaggccaccgtcgcccagcctggcagcccagcgttttgggctgaaaccacyattactttggctgtttcatctctaagagagtgtagaatgctttcacagagaccctgcacagccctgatttacagagggaagggaagcgcgggtgaggtggtggcccctggtggagctgcgctagaatgcgcggcttcggactcagaattccatgccctttgcattgtgtgacatcgcagtccccttccccgctcccacttcatattctcccatacttataactctcctcccagtcacagccctcttcttttgattgacagaccaccctgggcaccccatgctcaatatgaacaccttgtagcatccttaggtcttggacagacctcggtcagctctggcacagtcaagaatccaccttgggcagttcttctttgagtcttagccctaatccctttgaaaattctattttcctttgtcctcaatccagtcaacacctactatgtaccaggcaccaggaagccagaagctcagggcccagcccttgcctttggtacctgccctccccttggtctcatgagcgtcttttcagctttgtggactttgtttcctgccctctctttcctatttcctgccttccagccccacccctctgtccctagattgtgtgactcccttcaggcagtcctttagtccccagcctcacctttgctctcaatgtcatgcagccgctcctgccagaatccccggaagggggcaatgccagtgcctggacccaccaggatgcagggcaagctgggatcgggtggcagccggaaggagggagccctggcaggagagacactccatcaggtcccctttgcctttcctgctccaccattctcaccatgcagggtgggtggagcaaggaggacccaagttcttcccatctcaaaaaaaaattaaaaaaaaaacaaaaaacaaaaaacaactctacttgctgaaactccttggatctgtggtttctggagattgcaccaaaggaaatatagttcattttggattgaagaatacttagatgactcaggggatttagaaaacgtgggaagggtgaaagacactttcagttcataatgggttcactaagtgtgtttattttaagtatccttaatagtggtatttagtttatgttcagtagatgggtacggtttatttgtagtttagccacctgggtggatttgaatcaccaggcccagctgatggcagcctaggaactgttctcagtcctaccaggacttttggttcctggctgcgagagcgggcaagacttctggacacagcatgaaggaagggtctcttaaaatccttcaccctcggtccgggcgcggtggctcacacctgtaatcccaagactttgggaggcggaggtgggaggattgtgaggtcaggagctcgagaccagcctggccaacatagtgaaacaccgtctctactaaaaatacaaaaattagctgggcgtggtggtgggtgcctgtaatcccagctactcaggaggctgagacaggagaatattttttttttttttttgagacagagtctggctctgtcgcccaggctggagtgcagtggcacaatcttggctcactgcaagctccacctcccaggttcacgccataggagaatctcttgaacccgggaggcggaggttgcagtaagccgagatcgtaccactgcactccagcctgggcgacagagcaagactccatctctgggggaaaaaaaaaccaaaaccttcaccttctttgagtccttggtgacaccaaggccaaagggtggtcttaaccctaactagtagttctccctggattgagtgaggatttagtgactgtagttcccaggtgccatgctgcccaacatcagacagcccagggacatagagaggaacacagaagctttcagaaagccacagggccagccggtttgataccagctctggctctgggagctatagtttcagggcagaactctgagtctaaatgaatgagagagccaaagcttagccagagttctgaagtgacctaatgacaccacacccttgacatgttacagagctccttcctgtttccagtgacacccctcaccagtgacactcctcaccaaagctgccaccctgaccctgggcagctccccaccaagtcctccatctcacttacccccggatgaagcagggcacagggtctccgggcttgagctggcttagccacgtggagcagactccatagtgcagggggcccagcccatctgggggtgggaaggagaggccggtgaggggccagagaggggccggtcccaaccctgctgtggccaggcctgctcctgcttgttgcctcaccctgagtcctgtatgccagcacagctacagtgaggtggatctctcctgggtgggtgctgggtgccgagctgactgagtagtaccggggctggagcagaggcagctgggtgaggagcagtggggcaggcagcgccaccgacgggaactgctccagcacctccagcagcgtggggcagcggaaccacttccactcctcgtagcgtcggggatcctggcggggcaggatgcagtgggttggaggccccatagcccttcctagtaacctcccttcttgacccctcccccactgagcctctttagggtttctccctgctcagttcaggccaatagagttttctctaagacctggagaatccagccatgaattcctccctgaggagctgggtcttaaagcaccagtgcatgtcagccaggagaagaaagtccaggggggactttgcatgggggtttcctgccactggggtccccccagctcatcccgtctctctagcccctgtgcctcattggggtggcccccaacctggctgagggcctccagctcctgctgttccctgggctcttctgccaaggtgctgagcagccgcaagagctgagggctgggtggggaggtgatgtccaggaagaaggtgagagcctggcgcagcgtgcacgggggcagccgggggtcccgcacccagccggggggagggccacctggggatagtgcacagggagctctgaggacagggcccagcaggactgcagtacctgggctgatgtttgtgttttggtgactgttagagagcctgcccttgagcagcggggtcggcctgtctaggtagcctcagtgtattgttcgggggcccctggccggactgggttggtctgggctcctctgcctctgactccacccccttattttaaataaagcccaggcattgatgtggcagcaaatagccccagtgccagctccagagcaagctagattgctaggggagccttggagaggagcccagagggaggggacagccttttggtgggggtgcatttgagggtgtggggatggtccagcaacaaggccagcccggcagtgggcagcacagccagctctgagcctgcctgctgagctgtggaggaggtggccaccccctgggtcgggtcctgagctcctggaggcctggggccgggggtggggctgggcatggggctggtgtgccctgttgcttcccaggctgcccctcaccagggctgcccttctccagctgctctactgccacgggctcagtgggcgccggcgggtcctccacgcggctcagcagcgcctccacaaggccgggccggttgggcgggcagacacctatgtggtcccccggctggtactgcagcccctcctggcctccggtgtccaggcgcaccaggatggtggccctcctgggggtggggagaggggcacttatggggagtcagagaggggtgggggcgggagaatgtgggaggaggagggtccagggtcagggtgttcaggacaggggttggggggcggtaaagccgtcgtcctcacgtggacttgctgctttgcaggttttccactgagcggattgtagcctggaacatcttccgcctgtgcacgtggatcagacctgggggcggggaggggcaaatgaggcagcctgagctagggagcagggcctggccccagagtgctttagtcccggggtgtgggggcctcagagaaccagccgggttagggtgagggcagggcccacctggcagcaactgcaggccctcggcctgggcgctcagccggtacctctggcgcttccagctccgtttggggctgaagatgtctcgggcggcggccttggcatcctctcccacacagaaggtctcacaggcggcctgcgggacaggccggtgagggctgaggacctcccgccaccaggggtcgccctagtgaggcgcctgggcggcttcactgcgtcttgctcctggggggttggcagccccagtggctgaggccggcgccaaggacagcaccttttccgccagcccatttcatggattggccgctgggcccagggacccggctggctctttctctgcacgtcctgattggtgcatcgttccttatctggtgcgtgttaatcccgtgatccgagaagcatagtgcttggcacacggtagctctgtgaaggcgtctgtgtgttcagacctgcattcaaattccgaatcccgtacttacagtgacatgcctcagtttccccatctttacacctcattgtgttctggtgaagattaaatgagatactttatgtaaagcccttagctttccacaaagtgcgtgcagatagtaagtgctcctgggaagggacgcacaattcgggcggcagaggggaccccacggggcagatccctgggagggtgtggatcccgtctactcctggtcaggcacacagctggaaaactgctgggccagtcccaggcttgaaatgcagggctcacccgtgattggctgagcctcatatcaccaagtcccgttaatctttcttttgtggtgcgtgtgaagtcttatatctcttccttccttcctcggcccctccctcccttccttcctatctccactgctgctgctctgcttagctcagccttcctgcttctggttcggtgatgctgtaatggatcctacgcctctaaagtcctattcccaaaacctgatgatgtggtctcatcccgctgcaatggctctttttgtttaaattctttaagtcttattttccgttcccttcttcccaatcagggcctatgtgtttctgcagcctgacctccccgtccctgaggtagcccccactccctctcctcctaggatgccctcctcctccaatcaaggcaaatctgctgagctccagcctgggccccgggacagcagcactgccctgaacagtgtggcactggggagaccgagcccttgtcaactgcagacatgatccccagacaggcagcactgcccctgaggaagcccaggcttaaaaagccacagcccccagggatccacctctccctgtgcttgcttgcccggcccgggaccagttctgcggtgcaggcaccgccccaggctgtctggcctctggcttcctgtggcttctgtgctggcctcagcttcagcccttgcctctgtctgaccttctctctgtcccttccttctccctccatcctgcccatcctgggtggggtcccctgccctgccctgcaccccctccctttgtgcgcccacttgtgaggcccagcctgtgcctggctgaagctccctcctgccagggccctgcctgctctctttcggctgcacttctgcctgggctaggcacccctgtggtcggcagggccatgtcatcctctgcccctgacccagaagagctggctatgccatggagagatgagggtggattttggaaggaacaggaagggaccaaagaaccaaacagaatcagggcagagtgaggcaggaggaggcatcccagggggcaggagtcagagcaggggctgggctgggctcacctggaaggcagcctgggcccagcctcggaaggcctcctcctggccgcacagctcgtcgccctggcccagctgcagcagccgctccccgcccagttcctccagccgtgtgtccacggcacgagcaaaggcgcagaagtgggggtatgcccgggagccgagcccgaacacacagaacctggggtgcaggggtcgtcagtggagctccctttgcaggccacgtttgcccaggcagcttgcccacccgttgcacccctcttggtgaggccctgacctgagggtgcccagggcccctgcactgtctgtgttactggactccttcctcttccgccg

SEQ ID NO: 96987 - DNA, 13669 bp, Homo sapiens
  misc_feature (1)...(13669): n = A,T,C or G
atgaaattcattctctagcaaggaagcaagaaacagaaaaactaattctttctggagtgacaggctgtgaaggaaaatatagcagagaatgatcagagaaaacaagggaagggcgggggatgctatttaaacagagtggtcagggaagcgctcctaaagatatgacatcggccaggcgcagtgtctcatgcctggaatcccagcactttgggaggcagaggagggggatcgcttgagcccagttcaccagcctaggtaacatagtgagaacccatctctacaacaaatttaaaaattaggcatggtggtaagagcctgttgtcccagctactgaggtgggggttgggggtctgtctgaggtgggagcatttttttttttttttttgagacggagtctcgctctgttgcccaggctggaatgcaggggcgcaatctcggctcactgcaagctccacctcccgggttcacatcattctccggcctcagcctcccaggtagctgggactacaggcacctgccaccacgccctgctaattttttgtatttttaggggagacggggtttcaccgtgttagccaggacggtctcgatctcctgacctcgtgatccgcccgcctcagcctcccaaagtgctgggactacaggtgtgagccaccgcgcctggcctttttttttttttttttgagacagtctcactccgtcacgcaggctggagtgcaatggcacagtatcagctcaatgcaacctccacctcccaggttaaagtgattctcctacctcagcttccctagtagctgggactacagaggcgtgccaccacacctagctaatttttgtatttttagtaaagacagagtttcactattttggccaggctggtctcaaactcctgacctcgttatctgcccaccttggcctcccaaagtgctgggattacagacgtgattgagcctggccagggagcatcttttgagcccaagaggctgcagtgagctgtgatcgagccactgcactccagcctgggggacagagggagaccctgtgtccaaaaaaaaaaaaaagatatgccatttcaacacagaacatacagacataaaggaacaggcatgcagagcagaggtctgagcaacgttgttccaagcaggaggaatagtgaataataaagtccttgaggtgggaataagcttgcagtgttagaggagcaagcagtcagcgtggttcaagaaaagcaaagaggagactagtaatgagatggagaagcaagcaggagccagataaaacagcactttataggtcagagtaaggagtcctgaaacctctggaaaggattctatgaagggaagggatgaagagatctctctagcctgttctagctgttcttacaaactgtaggaagaccaattagggctctatagcaccccacaggaaagatgacagtagggtgggatatggtgggacatggtggtggagatggtcataaatggctggattccaggcatattttgaaaggtaggactgacactctggcagatggactaagtggagattgtgagaaagagaatcaaagatggcttttagatttttcgcctgagcaaatggatgaatggagaaactatttaatgaaccatgcaagactgggaaaggggcatcattgaggggataattaagcttttttaacctaaggatgaatttttataagtggtaatgcttgatcaaatgatttacatattaaaaggttgataaaattgttagaccagaggccgggcatggtggctcatgcctgtaatcccagcactttgggaggccaaggcgggcgggtcctctgaggtcaggagttcaagaccagcctgggcaacacggcaaaaccccatctctactaaaatacaaaaatagccaggcatcgtggcacacgcctgtaatcccagctacttgggaggctaaggcaggagaatcgcttgaacccgagaggtggaggttgcagtgtgccaagatcgtgccactgcactccagtctgggcaacaagagtgagattccatctcgaaaaaaaaaaaattgtcagaccatcctccaaaaaggttataccaatctatctttctaccaacaatgtataagcatgtctatttcccaatatttttgccagcagggaaaaaaaatcagatgagaaaaaattttattttaatctggattttttttattagaaagtctactctttgttggccatttgcactatttctgtgaactgcctattcatctcctttacccatttttctagtagataggtactttccttactgatttgtgttccttgtacatcaataaatttaaccttgtctgcgtaattgcaaatactgtttcctgatctgtttttcagctttgccacagtgcctctataaacagaagtggctcttatttttatgtagtgaaatctgccttggtcttccttatatataacgtttagctcattttaggcactccataaaatttgcctataattaattcactactattaaggacttctgtctctggtatcagccctgcaaaagccttctattttttttctagtgctttatgggtttttttaggtttaagtcttaacttcatctggaactgattctgtggtatggtgtgaggtcaggacgttctgactcctgacatagctgaactttctcccagcaaaaatggtctctatccacaaacagccacttaactccattctttccagccagtgggctcctctacttagcgccacaagggaaaaagtccaagtcaccaatagctctcccctagggctgccctcctctctctggtctctcctcctctcgcatcagttcttcatagagcaactacagcagtagttttttcaaatgtgctgtcactctgtttataattgtcaacgactacctactgaaaatggaattaagtcctgactccttaccataatatacaatatcccatgcttctccagcctatttctgtaacactcttctctcatccactaaacctcagccacaccggccgcctttcaccctgtaggacaagcccaagttcatttctccctcaggccctttgcacttgctatttcctctgccggaaaagctctcgccatccaaactatggcttcgacgactggctgcctctcatcatttgggtaatgtcttctaagacaggccttcccagaccctgacgccatcccatctaaagtagccccacctcgacgggcgcggtagctcacgcctgtaatcccagcactttgagaggccgaggcgggtggatcacctgaagtcaggagttcagccattgcactctggcctggggaataagagcgaaactccgtctcaaaaaaaaaaaaaaaaaaaaaaagacgggggagaatcacctcagggcaggcgttcgagaccagcctggccaacatggcaaaacccctcctctactaaaaatacaaaaattagcggggcatggtggcgcatgcctgtaatcccagctactcaggaggctaaggcaggagaatcgcttgaacccgggaggcggagattgcagtgagccgagatcgtgccattgcactccagcctgggcgacagagcaagactccgtctcaaaaaataaaataaaataaaaataaaaaaataaagtagccccagctcagtgactctccatgggattaccccttttcactctattcgagacaaatgccattaactgaattatctcattcattcattgtattcatgtttactgcttgccctttcccacagacagtgctcttgaaggtagggtcctggtctgtcgtgttcacctctgtaacccgagtctcctgtgtcttcaacagagcaggtgctcagttaacatttgtattacagaagaggaggaagctacccgggtttggcttcttaaccaaacttgtgaagactccctaggattcgtcggatcgcctttaacgtcggtaactctggagtgtgaaatcagtcatccttctctccctccttctcaccctccagccagccccccatctcggacaaagcgctacgcctgctcaactctttgcaaaatataactctgggaggcccgagactggcgcctacacggccttggcgctgctgagccatgctcctggcccgtcacccataagcagcgagaaagcgccaagtttccgcagcccccgtccggccccgcccgccaggggaggaggggggaaggggaggacagagccgcttaccagttcatccggactcaggactccgaactggactctcttgatggtgcgcagcgggcatgcgctgtcccccgagggggggccacccccgtgcatggcggaggcaggcgcgctgcgcaggcgcaaacctcactacaaaaagcctgcgccgcctccgcctaggtgctcagacctcgtcagggcggccaccgggaaggacctccccgagttgggaggaaaaagccggaggaggggaaggtgggggagggaaggaggcggggaaataaggagcgaaaggagcccttctttcccttaccggaaatttttcagctcccaaaaaggaaaaaaaaagaagggaaaaggaaaaggtttttgggggaggaagaagaaaaagggtaacgaataaataagtaaccgggttcctgaacggcagaggttacggcagtttgtctctcccccttccgggagccgccttcttctccaaccgtcccggccgcgctctcggcgcttctgagcagcgaactcgctgaacgacgcttcttatagattcgccctcgcgtccccgccccttcctttcccgccctcccttgcgctacggggcctcctgcgcaggcccgcaaggggtgcgagccagagtcgtgggtaaaccccccgctcgctggttgggcgaccttttgaagtgacagggagagaagaatttttttctttaatcccaccgcctctcctcgctgctcccttttgcactgaggcttaaggtttgaagactcgagggtaaaattgggccgctttcattctagtttggacaacggtttcatcttcagcaaaagcctctcattcgtagcctcccccaagctggaaaatggtctgctctgcgaatcggtaatggcggcggggcggggcgggtcctcccggggaagggcggttgctcatgaatatgcagttctcttgctgaatatgcatgaacaaaccaagatggcaggaccagtggcttgtccggaagtagccgatgtttgtcaaacggcccccggagacgggtgggcatctcctggcctgtaatgccgcgctgtaccgagccatgatcctagatccatggcctgagcctctcgaagagacttcagctgggaggcctgctctggaaggagggtggccactgtccgggagagatcacgggaccgcgacaatccgagaaaagcagattagccatggggcgggccacgaaagtcctgggggatttggggtcaaggcatctgaacattaggaaatcctccactttgtagaatatttcaggaataaaatggggggcggggatcccaaggggttctccaatgagaacggtcgtaggactttccactctccctccaaagcagagacgacaccactgcaagccacattcagagtaatccttgtttgatgtcaatgtcacgtcaccaccccaaggggggggcacaagcacgaggaaaggaaacctttgccgtgaggggaggggnnnnnnnnnnnnnnnnnnnncagctgctggctctgtctttgccggaacactccagccccaatgctcttctctttgctgctgagtgaagtcctccccgtggcccacggcctccctgcctcagccgtttggatctgctcctcagactttaccccttagttatgccctgattccaggacccagcctggtctccacatcccttggtcccaggctggccccaggtcttccaggtagtccctctccaccaagtccccaagtcacccttgactctgagaggtatccttctcccacaccagttcttttccagtcacttctcctcccatgtttgtcttcagtctttgcctctatttatccctgtccctcccaacccccgggctcccaagttctatctcactcctccaccttcccttccctctcacagctgaggttctgggctgtgatgatggcaatgctgcccagcacaacccctgcccccacgatgtcagaaggtgccacagtctcatggagcatataatactgcagtataagggccaccaccacctcggaatgcaggacagcgcacaccagggcagggtgggccttggtgaccgcatagctcacacatgtgaaggagaccaaggygaggatccccactgcccccacacaactccaactcaggagatcactgggcaacacggggggctgcagcacaaagaggcctggcacagagcccagcagccccaccaagccagataggaaggccactgttgggaggcaggagggaaagtgcagagaacgatagaccagaagccccagggacagcgccagtcctcccacgaaagcctgcccatagcccagggyggtgtagacacccgtgatcccctcctgtagtgtccagagtccaggtcccacaatgatgattagtcctaggatgctgcccaacagtccacaccagtcgtagccactgagaccctggctctcaaggcagagggtgaggacggcggagcagacggtggaagaacctttgcgaacagtggcagcgttgccagcgggcaccacctgaaccgcactgtaggcacatccaatgctgaggacgttgagcagggcatagaagtaggcccggcctcggatgtcaggaggtcccagaagggggtcgccacgcagtttaagtagcagggcaatagggaggtggaagaggcatcgacagatgagcagctccagcgagggcaggttggaagcctggtaagccatatgagaaagggggcccacgaagccagyaggcaggcccccacccagcagggccaccagcaggccattggtggcatcagagggctggcagcactggtgccagyggaggctgggtggagcggagggcggcgatgggtgtgtggagtcaggcgggttcaagtaggggtgactgccagcctgttagggagaaaggagctcagggtagacagcagccgcagcccaggcgacctggggcagggcagatgccaggatggggtctgggaccctgtgggactgtacagtgttgggctatcttgctgaggaactcttgggagctagaaagggcctaaaagatgagtgagatgttataatgtgggcctggagcaggaagcaaggagtgagcagtcctggagcatcgtttccctgggtaagttgttcctgggaggagaaaaaggacccaggatgctctctcggattgaggaaggggaggaagcctcagatgctatgcatctgtatgatgccacaggttccagagacatctgggtacaccattatgaattctatttgtgggtatctctgagacagctaagttttaggaaaggaggggaaatggagcaaccaggagctatagggagggagtactaggcccctggcccccacactcaccatctttccttggactttctcctctcctcctggctcagggagcctgggcccctcagagctccagccattgtgacatggttggagtgggggtggggttcttccctggaactctcctgaggtggtagcacgcctattttcccgctgagtccaactctgcttcttttctttctttctttctttttttgtttgcgacgaagtttccactcttgttatccaggctggagtgcaatggtgtgatctcatctcactgcaacctccacctcccagattcaagcgattctcctgcctcagcctcccaagtagctgggattacaagaatgtgccaccacacctggctaattttttttttttttttttgggacggagttttgctcttcttgcccaggctggagtgcagtggtgcgtgcaatctcggctcaccgcaacctccacctcctgggttcaagcaattctcctacctcatcctcccaagtacctgggattacaggcatgtgccaccacaccccgctaattttttatttttcgtagagatggggtttctccatgttggccatgctggtcttgaactccttacctcaagtatccaccccaccaccccccgcctcccaaagtggtggaattacaggcatgagccaccgtgcccagcccaactctgcttcttttctatttatgtctccatgactccaaagtttgtctgattcttttattctttttatggctagctctgtggctttacattaatttgtttatttatatcttgcatggtttcagagaggtttttttgttgttgttgtttttttgagacggagtctgtctctgtcgcccaggctggagtgcagtggcgagatctcggctcactgcaagctccgcctcccaggttcacgccattctcctgcctcagcctcccgagtagctgggaccacaggcgcccgccaccacgcccggctaatttttttgtatttttagtagagacagggtttcaccgtgttagccaggatggtctcgatctcctgacctcgtgatccgcccacctcggcctcccaaagtgctgggattacaggcgtgagccaccgcgcccagcctcagagaggttttaaggcaaggagctgtgaaccctggctcctccatctccttagtttttaattttccagcaccagggaggagttcttgggattgtccctgtggagtttcaggaatgtgttttttctgtgtgtgcttccacctggtgttttgttgatgctgtccccagaggccgacaccaaggcctctgcatttatgttcaagtatacagatgtggatctatctgctggtggggacaaagtacccagccagcttcatgtgttcatttgcgctggtggtcgttcgtgtgtgccccgtatgcagggccagggccttctttttccgcggcctgctgagctttcctgcgcattcctggagagggtgtgtgtgtgtgtccagggctggccctctttgagtgtgccgaccctgggtctgtgagtcccaccgggcctgattatgagtctgccatgtcatgtctgcaccctgagagcctgtgtgttatgctttcaggcagtgtgcaccgctgagtgaagggcgtgcaggaggaagggcggagggagccctttccctgggggtcggtggtcttgcgcccctgccgggatgctgcagcccggcccgcgccccgctcggtgtccacccgcccggtggcccagcgcggcgcagtgtcatgccgcgggggtcagtcctggggaaggccgtcgggcgctcggagctttgtgtcggtgtcggctgcgctgcgccggcctcctctcggcggcggcggcggcggcgctggggggggactgtttccgggggtgggggtgggggggtaagaccgggggcggggggagccgatgatgtcagcggcggcggcggcggcggcagcggggccgggccggggcccggcgctgggggggccagggccggagctggagccggagccggagctggaggcgggcaaaaccggagcggccgggggcggccacggtgatgagccgggcctggcggacgcggcgccatcgcagtcagggtgggccctggggcgaactgggcagggccagggcggaccggagccaactgccaggccccctctccgctgcccggcgctgcgggagccccgaccgcgccccgcgcccagaccgctctcctttggggttgacctgggggcgcaggggtcgggggctgagcctggccccgcccccgggcgcgcacgacgctggggggcgactaagggggccctggtatggcgtccgagcgaggggcggccgtgggacgcgatcgcctggggccgtggaaggggaggtgctcactccctctttgaagggttaattctgcagcctaatggccccctccccccgtggggcagattgggggtggggtggggcgggtgtgagcccgggcaagcgctgcaagctgctgggagggtgatggcgtaggagccaggcagagagggggaggggtgggccgccgagcgccccagagttggggtgtgcggggtgcgcagggcgagctggggccccggaaccgccgcgccgtcggggcagggttgtggctgtgagtcttggagatcgtgtgtcttgtgctgtgtggtggggcaaggtaaacctctcctgggcaccaccgtttgctggcagccaggggtctgggtagggccctccctgggccatggagatagaaagccaggaagggtgtccagtgttgtggggcagagttacaagacgagccctgtggctttgggtgacagatgggtattctgagcagggcacagcatgctgggtgcagagtttgttcgatgtggggctgtatgttttctacagcatgtgttttctcgcatgtgtgtcttgtgctgcacctatgacctgtttatgaactgttttctgcagagctggcatgctgtatgtgttgcggagggtgccaggatgcagtgtatgtgcccttttggagggggcggttgtgggcctttgagtcagaaggcgtcacgtctgggtcccatttctgtggccctgctgaggtgtggtccagtggtgaagagggcgatggatgggtttgcgtgtctgtgatgagcgcgttgcatgggggctgcgcgtctagaactcagatcccaaagatcatgagaggagcgaggaaccccggggtatgtctcaggggcctgtgggtcagttggcactggtgtgaggggctcgaggtggaatgcgccagttgtgtttatgggatcatgggcagccaagcgaggggaaggttgtgtgtttgcaacattctccacaggattcttttgtgacgttgtttgtaggagcctgtctgggctgctgagctgggaggcaaactggtcagaaaacacatgtggggagggaggtggcgtgacaagggcagtgtgggcctcagacccaagaggccagccgcaagcaggctgtgtgtgcgtgcctgccgtctgtgtgcttaagtggcggtggggctgcggaggggatttggtatgaggaaggcgggagataaatgcagggtagcgcatggaggccggcgggaggcatgggtgttgtcagatggcccagctaatctttgcagggtctgtatgtttgcccctcatgagcctgcccagcgtgtcagggtcacccggaggagaggctgggcggccacaagggaagtaagcttagacagagaggctccttggccatgtttatgtaaaggctgggtgtgactcttgtcactaaaatggaaaaaagaaacgtgaagttttcagcctcctcctgcttcaccctctccctctctctgccccccttgtgggtatctctgacgcacactgggccccactcctgcgacggtggaagggcctcagaacagaattcgctcactaggcagattcctcagaacaggttttcctcacctttggggactgggcccttctaggggtgtgtgtgcaagtgcattccaagcctgcacaccactgtctactgtgcccggccccactggaaggatgtgtgtacgtgggggaagggagggtgctgcggacaggccctccggcatggggggctgggaaggggtggctgccgtgggagcctgctcaacaggtgcacagtgacggtctggtgaagagaaaggagccatggtccagggctgaggagctctggcgtctttaccattccctcactggcacttgatctgaaggaagctcagttcctcatctgcagaatggggctgattgtctgccctgcgtatcttccaaaagcacatgggaaacggacccggaaagtggctatagtctgggggctgtgcctatgccagcccctgtcagccctcccccaggactgggaattcccttcttggggcttcgctgataataatggcagcacacacttgcttagcactgaccgtgcaccagcctgtcctcagggcacttatatgtggccactctgtcctcagaacaacaccctgaagtaggcactctacctccctttttcaagtgaggcagctgaggtccagagaagttaagtaatctgccccaagtcacttagctagtaagaggtgaagctgtatttgaacccgggcaatcaggttgaagatcttgtgctcttaactactgtactctgctgccttctggaacattcagtggatggtcctttctgtgcaactccctccaacactcttctccccagttgctgcagaacttagcatttgcagcagtccatttcagaagacccggatgctcagggatccccagctgagggcatgagaacctgagtctctgctgctgtgtaaggtggatgctggccataggagcacaaaaggttgatgagtcagaggaaggaatgatcgttctcatcctgtggatcagggagggccaagaaggaggtggccttggagtcagatcttaacgttttggagggattttgacaagcttggggaaagagcatttctggcagaacaagccagcacaggcaaaggcatgaaggtgtgggtcatgtagaagctggagagcacactgggtgtctggggttttgttcatttgtttagaaactgggtctcaatatattgcccaggctggactcaaactcctgggctcaagcaatcctctagctgcagcctcctgagtagctgggactatgggtatctgccatcacgcctggctcacgctgagtactgtgtgtttgaagaggataacacaaggcaagattaaaaaggaagattggagctagaccagagcccttgactgcctggtagaagaatttgaactttcttctagagtcagtggggaccagtggaggttttgagcccaggagtgatagtcctgaactgtggttagggacgttgaccctcagggggaggagggctggatggaggaaggtaagcctggaggccaggggatagctgggaggccataaccttggaccacgtgagtgttaacaaggacctgagctatcgaagggaagatttccagagccattcccaagctcggcggcgatttcagccacacttgatgactgctggatgtggaagtgagggaaagggtggagtcagacatgacacatttagcacttagcacgtgagaccttgtgcggtggtttatgtaaccagctggcgggccataggcctcttcagggccaggtctagcagtatggcagagggaaagattgagcatctggggtcagctgggcctggattcgaatcttgactgctgcttacaagctgtgcgacctcgagtaaggtatatccctctctgagcctcggtttcctcttctgtaaaattagaataatatggccgggcgcagtggcccatgcctgtaatcccagaactttgggaagccaaggcaggtggatcacctgaggtcaggagttcaagaccagcctggccaacatggagaaaccctgtctctactaaaaataaaaaaactagctgggcgtggaatcccagctactctggaggctgaggcaggagaattgcttgaacccaggagacggaggttgcagtgagccgagatcacgccactgcgctccagcctgggcaacaggataatataaaacctattgtgggtggctgtactgagaatatcattaaatgaggtaatgtgtgtgaggccccaagaagagtatgaggc

SEQ ID NO: 96988 - DNA, 69939 bp, Homo sapiens
  misc_feature (1)...(69939): n = A,T,C or G
atatgcatatattgaaatatcacatgtaccccacaaatacacactcttatggtaccagttgttttattttttaaagaagctattgtcatgactgtgcccagagaccatcccatgcccctccccaggaaatacattcttaactatcttttttcttagcccccaacctcctacccatattgcagggggggctagcttgcttctctacaaagtgggtgtctgaccaagttgcttccatctctcaaaaattttctgaaatgataacaagtttatagaatcaatgaatgattgtgaggtctggacttctaaaaataaaataagtaaatgaacaaaaaaatttttttaagtccaacttgtatcactttgtcctagttaagaaagcaagaaagtatgcatttttgtattaacttctttgcaatgatttagttctattaaatccctatttttctcatttcagggatattatgatataaatagtgaagtgtttttaagtttgccttgcatccttggaaccaatggagtatctgaagttatcaaaaccacactgaaagaagatacagttactgagaaactccaaagcagtgcatcctcaatccacagtctccaacaacagttaaaactttgattctcaaatgcaatttgagaggctggacttctacctaaagggaaaagtcatttaattttacctatatataggtttgaggatttctgtatcctgctacttacttttacaaactgcttggttaaagtagagggtttcttgattagctttgtgatgtaaatccttaaggagttatacaaggaggggaaaaattaattttatttggggttcttgagatatctatgctgttctttaaatctacagcaggggtaaacattcatctgcagtgtgcatcaatttaaatcatatatcctaaactaaaagcacaattcatacttcgggaatattttataagtaatatatctttaaaagaaaattaccctttgacttttataatcaacataagttccaggcccagtatggatttacaaaatctgtgtcagttgtacattcacaggatccacagcttaagttactaatgtttcttgtgtaaaatcctgttggtagtaatagtaaagcattgtatttcccttcttcaaattaattacctaccaaaaaatggaaaagaattttacatgcactttaaaatagtaaaatggaaagtgaatttttaaaatatatgcattaaaagtttactttaatttccagtgggacttcctttatgaaattttccataacctcttcctggagtattacaagatctccaacatctcataaactaattgtgatattagtggaaccataagcaaatgtatatttttagtggaaatagattatgaatgaaagccaagcaccttactttaaagccaaaatatgagattttcattaaaaacattggtcataatagggagaggttttttatttgttctgagcaaatcctttaacctctcctgatgatacagttcagagtacacacactttggtgatggatcaagagcaatattttcttatgtgaaagatagcttattattactattgtgacatacaactaatagtaacagttaacatcaacacttcatatataccaggcagcatgataagcactttattattttactgaatcctcacaacagaccactgaggtagggactattgccatcatcattttataaaaggaaattgaggtttagtcctcaagaagtcttggctattaaggggcacttatccatacaacctctactttttctaggcactaaaagggggaaaaggcttaatagccaaaatagttatcaaaagaccctaaagctggggtcctgtacaccatgaaaggattactttcattctcatgtaagggcatgcttttataaaaaacaaacatgggctaggcgcagtgactcacgcctgtaatcccagcaccttgggaggctgaggcgggcagatcacgaggtcaggagattgagatcatcctggctaacatggtgaaaccctgtctctactaaaaatacaaaaagttagccaggcgtggtggcaggtgcctgtagtcccagctactcggaaggctgaggcaagagaatggcgtgaacccggtaggtggagcttgcagtgagcagagatcgcgccactgcactccagcctgggcgacagagcaagactctgtctcaaaaaaaaaaaaaaaaagtttaaaaattagccaggtgtggtgatgtgcacctgtagttccagctactcaggagggtgaggcaggaggatcacttgagcccagaagttcaagattgcaatgagctatgatcatgctactgcactccagcctaggcaacagagtgagaccctgtctctaaaaaaataaaaataaagcaagcatataataggttaatccagatggagttaggagggtttataagggcagacacatcctagtaaagaggaaataggcaaactaatgctgttttagtgtaataaggaatgcttataatgatgaactttagtcataaagaaaaggtgaaattatattcagtaacccatgttaggaaagcagaaaactatttaatatgcttggaaagattccaaccagagttaactgaataaaaaccttggacatttgaagagaaaagcatttagttctatctaatttcaatatgcacgtgaattagttcatgttactctaacaatgtattcttactgtccttttttatgaaataggaaagtaaaactgaaagaactatttcttgtgtttttaaaactagccttttctaatatttgatatctaattaaagttagataatatgtaatatgcttttgaacaataatctaaccagaaaatattgtataataaattaccaagaaatcattacattaattataaaaggaacatgtcaatacaacaaatgtttatttaacacctactgttactccaaatactgtgttagaatttgactattcgaagatgaataatagtctttgccctctggaaggccacaatgtagaagtaattctctgtatcagatatttccttgagtgttaagtgtattagtaatcatgttgtaaatcccagtgtaagtcaagaagcaatatcaccaccaccacctccctatgattttgtgataatttggcattttcaatgcttgttaactttcatgttttcatttttatgaaatcatgcagagcttgttataatttttagtggggtttggattaaaatgcttttttgatgtagcagaagatacattttttcccattttacattgttttccttaaatattaagaataatgagtaaaataaactgattttaaaatcaccaggagatgcttcatttattaagtgaaacattcagattaaggaatttttttcatataattcacacagtacccaggatatttagttattttgtgtaaaatgaagagactagattttatcattttcaaacttttaaaaattatttttagcaagaaaactttttaaatctttttgtttttgagccaggttctcactatattgcccaggctggactcaaacttttgggctcaagtaatcctcctgcctcagccaatggagtagctgggactgcaggtgcaccatcagcttatttgtgttttcatctgtgataatcggaggatttaaaattctccactaatatacgtgaggatagaaatcaaaatgcctaatgagtggaaaaaaactcatctttagtgttgaaatggcaagcaactttcaaaagcatttcaactactattaccttcacattaaaaaattaactgattttgcatatttctaaaaccacaaagacattttccccacacacattcaatcctccatggttccaatgaaatagataagaagttaacactttatattgaggtatagtgttgaccctaaaagattgcaaaagactgatagtaaacatgcagcaagaaagcttttttaaacaatatattgctgggcacagtgactcacacctgtaatcccagcactttgggaggctaaggtgggaggatcacctgagcccaggagttctgaggccagcctgggcaacaaagtaagacctcatctttacaaagaaattaaaaattagctgggcatggtggcacacgcatgtggtcccaatatacatgggaggctgaggcaggaggatcacttgagccagggaggtcgaggctgcagtgggccatgttcacatcactgcaccatgacctgggcaacaaaaatatataaatgggctgggcgcagtggcttacgcctgtaatcccaacattctggcaggctgaggcgggtggatcacctgaggtcaagagttccagaccagcctggccaacatagtgaaatcctgtctctactaaaaatacaaaaaattagctgggtgtggtggtgggcacctgtaatcccagctactcgggaggcttaggcaggagaatcgcttgaacccgggaggcagaggttgcagtgagccaagatcacactatcgcactccagcctgggaagcaagagcaaaactctgtctcaaaaaaaaaaaaaaaaaaaaaaaaaaaaaatatatatatatatatatatatatatatatatatatgtaaaatttattttaatatttataaatgttgcatttataaaatatataaataatatatattacctggcattcctccaactcacaaaggtacagttgctctaattaaagggactcctggttaagccgtggctttaagaacagtttgaaaaccttcttgcttttaaaagacataaaacagcaagtaaaatggaaggacagacagacctctagtttggtttgactggagctgtatgcttaactaaggagctgaaaaacagaggcggaggttgcagtgagccgagatggtgctactgcactccagcctgggcgatggagtgagagtgactcaaaaaaaaaaaaaaaagaaaaagaaaaagaaaaacaatacctattaatagcctttatttgtgcgtgttagcaacagtttataatgatgcttccacatgctttcagttaggccctccttgtgaatgtgaccttcacttagacgccaactttgaagggaatcaatactacggccttgttctcattagggctgtactaaaataattgaaactgtcacacatcatcaaactcaaaattttacaataccttgaatgacactgtgcttacaaaactgacggtgatgtgtaatgatgactaatgtaagtcaccatgaagaatttttatgggaagtaaaaattcaattaagatggaagtacctacccttgcattgtgcaaggcaatgaagatctgaaggaagcctgccttcaagggcttggattttgacagcggacaggtacacaaatacagcaccaggtaaaatacggcctgtattatcatttatgggtgggtacagaggagaaattctgacttacggaatgatttcctggagaagaaattactatctggcttcttgtgaaacaaaggctctacactttacccttgccaacgtatagtatgaaggtctttaagcttaaaaaaaatcattaattagaggaccactgggcatcatctaaggcaagtgtatgactttagagtcgggagaaacttgcgcctgagctagaaatgcactagcctaccattatcacaagagcaagtcagtgacagaacagttctctgaccgccagtgcagtgccctcccacttgatcaatcagtcattaaggctcactggcaagcccttcgtacttcttccctctccggcactagcttccttaagtcgactctgtgaaatacctgctaatcttatcctgaaccagagtttcgaccctcggaacagtcttgcccacatctttgggacccgattcgtcctgctgattccggcactcgaggggcgggttggttggaacccaccccgccaggcccctctcaatcccacacggtgtccacccttgcccgcaggacggcggcccggaagtgacgtagtggaagcggaagtggtgtagtggtgccgacttcctgttgtttgaggccgggttgsgggtgtgcgattgtgtgggacggtctggggcagcccagcagcggctgaccctctgcctgcggggaagggagtcgccaggcggccgtcatggcggtgtcggagagccagctcaagaaaatggtgtccaaggtgaggctgcgacgcgctcgcctcccagggcgcgcccaccgctcccttccgcgccctgtcgagtccgtcccggcccarccaagcaagcttcccagacgggccggaagccccggtgcagtccttagcsacctcctcagamccccgccccgaggcgcctgtcgcctggtgcgggaatccccgtacgggagctgggagggtgggggacggcgacagtcaacaaaggcgtggagcggaggctacctgacacctgccgcccacccgccctcctctcttccactgagtttggagctgtctgtggggcagtgtagtttttcgtttgtttttataaacacaaacaagggatcatacttagttgtagatctgaggcaatcctctactcctgtcccaatctagggatcctccagtcttagcctttcttttgccgacccgcagagagtgtggccttttcagttttgtattctccagaaaagaagcgaaaataccagtcccttactgccccaggtgaaatacataccattaccatttcagggattttctaagagtaactacttttaagtgtatgcttcttataacgcgtatttatttgctttgagcttaatttatgatcttcacggctcaagactagtgttttttttttcaatttttaaaaaagcagttaagcattttgtattttaaagccatgatttatttatataattacttcaaacgtggcacctcacaccagagtggaatggcttttgttatgttttgttgtaattttccaaaactatgtaaaatgattgagagttgagtcttgaccagttcaacgtgttagcttgggatagttttgtcaaagcaagaatggtagcaatcagcggtttaagcggtttcaatttttaataaaacacactattatgtgtaaaacttttttaaaaacagactttttccagttaaatcgcccccatagttcttgattgaagaccaaataatctctaaggagaaaatgacagctttcaaaataaagcatatattggttgtgtaatcgtatattttaggcttcttggttttgttttgataaacttgttatccttagttatagaagacatatgggaagccatagaagattgtgacccaggtaaagatccatgttgtaacttttatatatcactttttgaaaaaaacggtatattgttttacatagtatgtaactgaagagtatctgttccatgactcttttttttttttttttttttttagagtcttgctctgtcacccaggctggagtgcagtggcgcgatcttggctcactgcaatctccgcctcccaggttcaagcgattctcctgccttagcctcccaagtagctggggattacaggtgcccaccacttcacacagctgattgttgtatttttagtagagacgggatttcaccatgttggccaggctggtcttaaactccagacctcagtgatccaccgctttggcttcccaaaatgatgggaatacaggcgtgagccaccacacctggcctccatgacatttttgatctttaaattgatagcatagtcattaagatttagtccttgggctgggcgcagtggcttacgcctgtaatcctagcactttgggaggccaaggcgggtggatcacctgaggtcacgagttcaagaccagcctgatcaacatggtgaaaccccgtctcctaaaatacaaaaattagccgggcatgatggcgggtgcctgtaatcccagcctactcgggaggctgagatgggagaatcgcttgaacctgggagacggtggttgcagtgagtcgagatcaggccactgcactccagcctgggtggctgagcaagactccatctcaaaaaaaaaaaaaaaaagatttattccttaatgtatgtatattcatataaagagcaagaatattcaaatattagcttattttttataccctaattaagtttcctaagcttccctagagaaacctgccatcaaagacaaaggcaaggcatgttcagaagatattttatacctctacctgccttcccctccacccaacctgtgattactttagaaacaaaaacagaggtagggaagaggtgggagagggcatcctacctgccttttggtccttgactcaatatctggaaaattgagactcctgtatgtgattatgacgattctgagcatcagcattagtactgtccaacctatgaattttagacaggtaagaataggaagtaaagtaatagaagcagttgtggggctccttcctcctaaagaagggcttcaaatgttttcctttcagctggtgtggtctgatgtaagaattgttagccaggaccctgaacacatagctagggtgaaggtcattattgttttctctttatctgattgtaggctctccacacacatcatggtactctggccacctgccttatgttttatgtgtttattataaaaggtctttttttcccttgagcattatcttagctcccaacttcaacataactttcaacacctttctctgttatttttgcaattaacagatatatttataccagattagtccttcttcttttacagaaacaacttcccactttagatgtttcatacatacagccacttatatttttacatagtttatctacagcatttctagaggcacagtcactgctaaatgagtagaagaaaactgtgggcctggtgtggtggctcatgcctgtaatcccaatactttgggaggtagagatgggagaatccacttgaggccaggagttcaggatcagcctgggcaacatagctagactctgtctctacagaaaatttaaaaatcagccagacttcgtggcttgcacctgtagtcctagctacttgagaagcagaagcaggaggatcacttaagcccaggagttcaaggttacagtgagctatgacagagaacctgtctcaaaaagtaaaaaataaacattttaaactataacaaaattggccaggtgcaatggctcatgcctgtaatctcagcactttgggaggctgaggtgggcggatcacttgaggtcaggagttttggaccagactggccaagatggtgaaaccccatctctactaaaaatacaaaattagccagacatggtggcgcacgcctgtaatcccagctactcgggaagctgagaaaggagaattgcctgaacctgggaggcagaggttgcagtgagctgagatcacgccactgcactccagcctgggtgacaaagcgagaatccatctcaaaaacaaataaataaataaaaataataaaataaagattgatatgtccctcactgttttaggttctagggatgcaacagtgaacaatcagacaaagaaactgtgcttctggaatttaaattcttatagaaggcaataaacaactcaataaatacatcaagaagtacgttggaaagtgataagtgctttagagaaaataaagcagggaagaaatggggaatgctagggtgtggaaatgggatgagtcaccgttttatatctgatagtaaagagaggtctttctgaaaaaatctacttgagctcacctgagagaggtaaagaaactgtgtgcttgacatggggcttacacctgaaatccaaacattttgggaggcggaagctagaggatcacattgaggccaggagttccagaccagcctgggcaacatagcatgaccttgtctcttctctactaaaaatataaaaaaattagccaggcgtggtgcatacctctaatcccagctggttgggaggctgagatgggaggatcacttgagcccaggagtttgaggttgcagtgagctgtgatcacaccactgtactccagcttgggtgacagagcaagatcctgtcaagaaaaaaacaaacctggaacaatctggggtaagaacatttcagaaggaaggaaaaacaaatgcaaagactcatagacagaagtttgtcatgcatgatagaggaacaacaaaggagggtatggtggctagactggagtgagcaagggaggaaagtggtggtatgggtctagacagcatcaatggtatgggaggtttggagggccttgcaggccattgtaaggaccttggcatttacttggagtatgatgaaaagccgttgctgtgtttcagctgttagcaatattactctagatgctatgctgagactagactgtagggggttaacgatggaggcagagacacgtaaggaggctgttgcagtaatctaggtgagaggtgctggtggcttagaccaggactgtagctgtggagattccggatgtattttgaaggcaaagctaacaggatattttgacagatttgctgtggatgtgaagaaaagagagggcatcaaggataatgtcatggtttttggcctgagcacctggaaggatatgtatgtatacacatatggaagacactggagaagtaaatttggggagaagatgaggagttcagttttkgtcatgttcaatttgacatttattagatatccaagggaaatgtcaaattggtaattgtatatatgttttctggagttcagagaagaggttaagattggaaaattttaatttaagggtttcaacatataaattaattttcaaccatgagggagatcaaaggaatgagtttagatagagaagaagaccaaggacttagcctgtgctcaataataattggttaggataagagaacgaaccagcaaagagactgagaaggcacaggcacagagtgcaggagaacagttgatgtcctggaaatcaaatgaagaacatgttttaagagaaagggagctgggcatgatggctcatgcctgtaatcccaacactgtgggaggctgaggtggacagattgcttgagtctagaaattcaagactagcctgggcaacatgctaaaatccagctctatcaaaaatatacaaaaattagccaaacactgtggcgcatacctgtagtcccagctacttggaaggctgagatgggaggattgcttgagcctgggaggtggaggttgcagtgaactgagatcacaccmccgcactccagcctgggtgacagccacatgctgtctcaaaaaaaaaaaaaaaaaaaaaaaaaargaaggggccaggtgcagkggttcatacctgtaataccaacactttggaaggctgagttgagaggatcacttccaggagtttgaraacagcttgggcaacatagtgagatcctgtctctatgaaaaatttaaaaattatccaggtgtgatggtgcatkcctgtagtcccagctacttgggaggyggtggtgggagtatcacttgagtccaggaggttgaggctgaagtgagccatgatcataccactgcactgtagcctgagcgacagagtgagaccctatctcaaaaaaaaaaaaaaaaaaaaaaaaaaaggaatcagtttggtcaaatattgctgaatcagcttggtcaaatactgctgacaggtgaagtaagacaaaggtagaattggtcattacatatcatgtggcagttattggtgaccttaatgaacaatttcagtgaaatgctgagtgtagaagcctaattggagtggatttgaagagaccaggtctctagacgttgagcatcagtggttgctgatatcacagagatactcagatatattgtgctccatgatgaaaaaacgttatcctctatgaagtgatcttaccagagaagaggagaaaaatataaaagcaaattttttttttttttttccaagacggagtctagctctgtcacccaggctggagtgcaagggcacgatctcggctcactgcaacctctgcctcctgggttcaagcgattctcctgcctcagcctcctgagtagctgggattataggtgcgcaccaccacgcccrgataatttttgtatttttagtagagatggggtttcactgtgttggccaggctggtctcgaactcctgacctcgtgatccgcctgcctyggcctcccaaaatgctaggattacaagtgtaagccaccacgcctggccggaaattttgtaatcatgaaaataacctctagatccaactaactcacagaaacatatatctatgaaactatactaaagggatacaattaacacattccaaactgtgagagcctctgtaggacaaatgaacaaatttctttaagaaataaattctaaggagcaaaaaagagatgtgcccatcagttaagtatttttcagctgaacagtaggtgaataaaatgttcagtaagaagtgggccatacgtgcctgtaaatcccaacactttgggagcctgaggcaggaggattgcttgaggtcaggagttggagaccagcctgggcaacatagcaagaccctgtctttacaaaaataaaaataaattagctgggcatgatggcacatgcctgtagttctgtatacttgggaggctgaggcaggagaatcacttgagcccaggagttcgaggttacagtgagctgtgattgtgccactctacttcatcctgggcgacagagcgagaccctgtctccaaaataaataaaaggagtgaaatacagataaatgctacaacgtggataatctcaaaaacatgctaagtgaaataatttagtcatgaaagatcacattgtatgaataagcaaatctgtagagacaaagtaaattcgtggttgtctaggatgaaggctggggacaagtagaatggggggtgattgctaaagggtatggatttctttttagggatggtgaaaatgttctgaagttgattatggtggtggttacacaactccaaatgtactaaaaaccattgaactatactctttaaatgtgtgaattatatggtatgtgaattatatctttaaaaagctattaatggtgagttaaataatataaattattgagacgttttaaccaatgcaatgtgtggactttatttggatcctgattcaaactgagaacataaaaaacatgacttgagactatagatatttactgatgttaagaaaatagtgattattttagtgtgataatagtattatgggttttttaggttctttcaggctttcattaatgttaacaattagtggaagagattttaagaaaattcatccagctgtaaaatatatgcattggttttaaactaaattcttatgcgattttgcttttcagtacaaatacagagacctaactgtacgtgaaactgtcaatgttattactctatacaaagatctcaaacctgttttggattcatatggtgagtttatgcagtaaaaatagcaatttctatactttgagtttactctctttgttaatgattgtaattttttccatttgaggtttgtggatttttcaattgtgggattgcaccaccgcctaataaaactgttggagggtagcaaattagaagatctaataaaaacatttcatatttctttagttttagttttttatgttaaaaaaaaatactgtacctggatgtggtggctcatttctgtaatcccagcactttgggaggctgaggtgggtggaccactgagcccaggaggttgagaccagcctgggcaatatggtgaaacctcgtctcaacaaaaaaatacttaaagttggcctggtgctcctgtagtcccagctacccaggaggctgaggtggaaggattgcttgagtccaggaggcagtccaggaggcagaggttgcagtgagccgagatcgggccactgcactccagcctgggcaacagagcaagamcctgtctcaaaaaaataaaaaacaaaacctctaacatagaactatgcaaatttaaacctaggaggggatgttaaagataatttagtccatttcccaaagtgttgtctgtagacccttagttatgctgggaacaggggtagaggcagaattctatagttaagcttgagcaacttatggattaaacaaaattgagtttcattgcatgaagatttatcagagcctttagtatgctaatgtgttgtgtatcaccgagacgagcaagaatatattgtataatacatcctaaagttatttaactgctgaacctccctgcccccatagtgtctctttatattttcaggaacacattttgcgaaactatactctggactgtccctttcattttatagatgaggaaaatgttatttaatgtggtctttaattctgtagagtaggtaagcataacagtttgtctctactttctattgagacaaagttgtaaggcaagacaacgcttggagttttccttattttaaaatagtcttttctgtccctaccaaatcctaacataatttcttcaaccctgtctccttgaaaataatatgccagggccgagggaaaacccatgctgctgcttgtccattgtgagtcccttagctctgaargcaaggaactgaattttgtagctgagactttctaaatttcatttgcttccaaggctttgaaaacattaggaaactggtgaagagaggtgggaagcaacagaggggcaatcagttctgcatttcctgaacaataaagacatgaacccaaagtcctcttccaaacctaggacacgattccttctcatctcagcctaccttatttctgtctgcatactatatgtacaatggtattttgaactacaaaggcctcacattaccaaaattaaagttagtttttaaatggcttcagtggggagaaaaatggttggagctagaattttatagtttttactgcatataaaagaataaatacatttatcaaaactgacaaagactccattataaagtcttgtatagtttcatgtggctggactaagtgtaaatcattgttaacaaatacttttagagtaaacaaagccccaaatttatataaggtggttttcttttttaaaatgcacaaaatcagaatacattgcggtatagcttacattcgtcaacagtaagtaaaataacaaaggtcaagaatgtacagtcgtgcattttgtagtgatagagatatggtctgagaaatgcattatttggcaatttcatcattgagtgtacttagacaaacctagatggtatatcctactacacacctaggttatatggcatagcctgttgctcctaggctacaacctataccagatgttactgtactgcataccataggcagttgtaacacaatggtatttatgtatctaaccgtagaaaagttacagtaaaaatacagtattataatcttatgggaccagtgttcttatgtgcagtccattgtagacccaaacattacacagtagatggctatagttctatgtttttgtactgcacattacaacctttcctctatgggtatagtgttaattccaaattattgttagaaataatagctgtccaatacaaactatgtgccatattaattatagacataaattatagatagaaaaatgtgtgtggtatgagaaatacagattgaaagaaattgtttatatttggctatgaacttttctttttttcattttaatactggctaaggaggctgaggccaggagaccatttgagtccaggagttcragtccagcccggacaacttagaccccatttctaaaaaaaaaaaaagctgggcatggtagtgcacgcctgtagtcccagctacacggaaggctgaggtgggaggattgcttgagcctagagtttgaggatagcctgcacaacatagcaagaccctgtctccaaaaaacaataataaataaataactgtgagcgactagggataaatgtctgcacatctctaaaatagaaagacagtaggttaacatttagtatggtattgtttgatagtgtttttttgtttgtttgtttgcagtggagttttgctcttgttgcccagactaaagtgcaatgggcacagtctcgcnnnnnnnnnnnnnnnnnnnntataatcttatgggaccagtgttcttatgtgcagtccattgtagacccaaacattacacagtagatggctatagttctatgtttttgtactgcacattacaacctttcctctatgggtatagtgttaattccaaattattgttagaaataatagctgtccaatacaaactatgtgccatattaattatagacataaattatagatagaaaaatgtgtgtggtatgagaaatacagattgaaagaaattgtttatatttggctatgaacttttctttttttcattttaatactggctaaggaggctgaggccaggagaccatttgagtccaggagttcaagtccagcccggacaacttagaccccatttytaaaaaaaaaaaaagctgggcatggtagtgcacgcctgtagtcccagctacacgggatgctgaggcaggagaatcgcttgaacccaggaggtggaggttgcagcgagccaaaatcgcgccattgcactccatcctgggcaacaggatgagactctgaaaaaaaaaacaaaaaagagctgatcaatgacattgagtgaatcaacaaagaattgttagttattggacaggatggatgatacattgacaggtcagcccctttcaaggataatgatgaattttaaccagtctttctgaaagaataacttatgggagtatcttaaaaaatgctcatgattaaatcattgttctttcctttcagtttttaacgatggcagttccagggaactaatgaacctcactggaacaatccctgtgccttatagaggtaaatgtcttattaggtttccagcatagatgcattttgaatacataataaatatgttgccaaagagttataaccaaattaaacctactttctcagggctttgatgctgatatagattttaacttctattcaaattgaagttcatttggcagtaacacctaacattttcagctttcttaaaacttccttaccaagatatatgaacaaataagtgcctaagttcaccagaggagtttaatgtttcactgaatcaaataattgtagaactagaaatggatcttacttgcctcctagttcagcctcccacaccattcaaactttcctgacaatgggaagctaagatataggcttcaaagtcaggacagagttatgtttgagttcttgctctataatcttagcagttttgttacatgttatatatggatatctttgacatttggataatagtacctaacttgggggaagtgagcatttattagataatgaatgtaaaggacgtggcacagagcctggaatataataagcagacagttaaaagtagctgttatttatggttgtgatgttggtgataatgctaatgatagataattgatctctgttagcctgtctttcaccctctgctgaaatatttagtggtgaggaagcatttagcttaatgagagaccattttgtttttggacagctctgtttgttaattattccttgtaattagctaagacctatgtcctttacccattgatttcacatagtacctgctattcataaggcaataaggataggagctgtggctacaaagatgaataaaggatgtacctcttctggaagaactccactaataggggaaacaaagggaacagatagatatttacactattctgtaactgctatagaattataaaatgaaaaagtgctatgagattacagaggagaacaaggccacatgggaagatcacagaggaagtgacatttgagccactattaataagtcaaccattcataataaacagagggaaaaaacagttaattgagtatcagcattgtataaagcaagtataagtttagggaagactgagtaaaatttaagattactgactttgctattgccctcaggaaataaattctgctgggggaaataggaatgggggggatgcggatatatgtataaattgtatctagactaaacctctgttcctttaaccattcttcaatttaaaaataataaaaatrgagtaactgaagtttctatttctttttcaggtaatacatacaatattccaatatgcctatggctactggacacatacccatataatccccctatctgttttgttaagcctactagttcaatgactattaaaacaggaaagcatgttgatgcaaatgggaagatatatcttccttatctacatgaatggaaacacgtaagtattmatagtgttctgtgaattagttatgttttatatattttgctcactagcatctgctttcttttagcactcaaggaggattcgaggtaggatagataagttcagataatggactaatcactgagttgagggtaaattagaaaaggctgactaaaagaaatgggtttctgtagagctttgtaattttcagaatacttatattcaatattttgttggctttagttgaacctttttaaaataggcaggattcacatagtgggaagtgcattttaaaaaatagtatcctggtgaggtagttatggaattcaaatctgattactcaaagcatttctgtcaagaataatagtagggaacttctgtttatgtgtctgatagtgtaactgtgacakattaatgttcctatgaaaaataactagaaaagcaagagaaaatacaaacaacacctgttggaaggctttggaaagctgtttaggcaatcaagacatgtatggccaagattctgtagagargaaaacagcaaagagatgaggtagttctgccaataacttttcccccagggtacttactrattcctttttttttttttggagacagagttttactctgttgcccaggctggagggcagtggcacaatctcagctcacttacaacctccacctcccaggtccaagcaattcagcttggtagactcaacctactgagtagatgggattacaggcgcccaccaccaaatacaaaagttttgtattttagtatttagtagaggtggggtttcaccatgttggtgaggctgttctcgaactcctgacctcaagtgatccacccatctcggccttctaaagtgctgggattacaggcataagccaccatgcccggcctacttacttattcttgatgaaggatgaagggctgagaatctgggcaaagggccttagctaagaggcagagaaacctgcagagtctctagcagtctcagagggctgaaaagacaaaagttgctgttctgtctaccaaagtaactaggacttttagatccaagatttgggagaaaagccataaagaagtgagtagctctggggatggtggctcatggctgtgatcccaggactttggaaagctgaggcaggaggattgcttgagctcaggagtttgagaccagcctgggcaacatagtgagaaccccatctctataaaaaaatattttaaaaaaaccttggcatggtggtgtgtgcctgtgaccccagctactcaggaggctaaggtgaaaggatcacttgagcctgggaattcgaggctgcagtgagccatgattgcatcactgycctccagcctggacaacagagcaagatctgtctccaaaaaagaaaagaaaagatgagatactctgaattttcccaccttaagagatatgttgaattcctgagcttcaaagataagatgctaaaaaaaaaactaagcagaacgcctctgaaaatcagccaagttttcagcagtcttaggttgaggaggcaattggagttcagtaccttatcaagaaggggaacaagtaaacatcctaggctgttagttggcaccactggaagaacacatcttaggagggagaacttagaggtagaatgagccttataaaaatctgtccttgaggctgggtggggtggctcacacctgtagtctcagcactttgggaggctgaggcgggaggatcacttgaggccagaagtttgagacgagcctggccaacatggtgaaatcccatttctactaaaaatataaaaattagccaggcatgatggcacatgtctataatcccagctactccggaggctgaggcaggagaatcgcttgaacctgggaggcggaggttgcagtgagccgagatcgcaccactgcactccagcctgggtggcagagtgagagagactgtctcaaaaaaaaaaaaaaaaaaaatctgtctgtccttcaatcagctcagtccctgatcctgactgtctgcctgccacaggatagggtgaacccttgctggaagaagataatatatagactctctataatttttcacaatgtctagcatacaatttatatttatcaagtacaccaagaaagagaaccaagaggaaaaaaagacaatagaaacgggacatccctccactccacccccacaaacacacaggtaacttggttatcagacacagacttaaaaatggttgtgatcagtgcattcaagaaaatagaggacaagatggtaaattttattaaaaagaaactaagtggaaatcttagaactgaaaaatagaataatagagattaagaactcagtagatgggtttagtagcagactggactcagtagaatagagactgcctcaacctcctgagtagctgggattacaggcgcccaccaccacacctggctaatttttgtattttttagtagagatggggttttgctacattggccagtctggtctcgaactcttgacttcaggtgatccgtccgcctcagcctcccaaagtgctgggattacaggtgtgagccattgtgcctcgcctcagtttgaattcttaacctgttgctttatattaggcctggaagtagatattaacatagatattaatttttttcttcaaagaatttagtgtaaaaggaatggtatgataattaaaacttaccttgacaaaactgtaagaatgtatgaatgaagaattgattcatactaccacattaatgaattctgaaaacattatgccaagtgaaagaagccaagcacaaaaggccatatattgtatgatttcatttatatgaaacatttaggaaagcaaatctatagagatggaaagtagattagtggttgctaaagggctgtggggaaagggaaacgggaagtgactactaatgagtacagggtttctttttcggatgatgaaaatattatggaattagatggtggtaatggttgcatagcttcgtgaaataataaaagccactgaaatgtatactttaaaaggagaaagtttatgggatgtgaattatatttcacctacatgcatgaggcttacatgaggctatgatttagttaaggaattttgttgggccgaaaaattgagaaagcatgtggtctcagtggccatccccacacacaccagccacagtatctgtgagtgttgcacagatactgtgcttataacaccccgagtctcagtatataaatttacaggcaaacacaagaaaaatattggaaaagtagatatcagcaagttttcacagaaagctttgagaaatgttattaattgtcatcttccatgagttaggtcaaaattgaacaaatgaggtgagtttggttctttggaaaaggtgaaaactgccactgaactcttctgtcaggagtattaaaagaagtgccaatcctaatcctgtaatcctgactacttgggagactgaagcaggaagattgttgagttcaagtctgagctgggcaacatggcaagaccttgtctggggggaggaggggtgtaaaaagtagtttctatgaagatggttagcctatcaaggtgattgagtaattcttcagaactcagtgaacttatgaatgaagtacgtgagatgagatatacacaaaatagattaaggagtaaaagaagaataatcaaataagccattttgaacaactttgtctagcacagcttaattagtggttggtagatatttcttttgttgttttttgttgtcattgttgttgttgggttttgtttttgtttttttgaaacrgggtctcactctaacccaggctggagtgcagtggcgcagtcatactgcagcctcaaccttcctggctcaggtgatcctcccgctgcagcctcctgagtagttgtgaccacaggcgcatgccaccatgtacagttaatttttttgtagagaccaggctggtctcaaactcctgagctcaagctggattacaaaatggaggggaaagtactggaatagacctagaatttttaaaattatgcatgctgcaaaatagccttatttgatcctcctgcctyggcctcccaaagtgctgggattacaggtgtaagccaccacccctggccagtgctcaataggtatttgagagaaaatcttagtaacttatgaaaaaataggaatctctttgtcattgttggaaggaaagatcctttaacaattcacccctttgtactacaatctagcaatttctaagctagaatctacgtataatttttttgtttgtttgttttgagacagagtcttgctctgtcgcctaggatggagtgcagtggtgtgatctcagctcactgcaacctctgcctctggggtttaagcaattctcttgcctcagcctcctgagtaactgggaccatagacgcacatcaccacacccggctaatttttgtgtttttagtagagatgggattttgccatgttggcccagctggtctcaaactcctggcttcaagcagtccacccaccttggcctcccaaagtgctgggattacaggtgtgaaccacctcacttggctagaatctacctrtaatttcagagttcataatatctttaataaaaattaattttaagaacacgtatttccaagatatcattgatgtcttttaatggcctttaataatattgtgactgttgctcatattcatccctaaatttgtaccagtatacttataatacattgtacagtggcaataaaataaatttttgttagttctktggagtcaaatgaagaacaaaactctatgaattttgcaatatgctgctttaactagtgctatttttatatacttgaagcaagaaccttgctgcacatcatgtttaaaaccacttaactctattaaaataaattaattaaatgaaattttcatgattggggtcctacaaagaaaattatcaagctgagttgaaaaccgatgagaaatggctaacctttttctttttactgaaaagcaactctgtagctgacttgaattttttttcattttgtagccacagtcagacttgttggggcttattcaggtcatgattgtggtatttggagatgaacctccagtcttctctcgtcctatttcggcatcctatccgccataccaggcaacggggccaccaaatagtaagtagaattgagattttactttaaaactcatataaacaaaagagaacagaaacctttktaaaaaaataaagaaaaataatgacttctttgctttttagtttatcaagctagtggattttttggaagtattctgaggccccacatctgcatgtacagattcccaccaaagactggcatttgggcttccatttgtaggtagaaatctaagaatggttgtgctggattccaaaatggaggagaaagtgtagaatagagctagaatttttaaaattatgcatgctgcagaatagccttatttgatcagcttggaagcacatataacttgaaaggtagtctgacctctcctttctctttgcaactacaaaatcagtgttgtagataaggattaaggtcaactgaagcgttcacattcagctattctgggtatacacaattggacatctagctcttagctttcttctctttcgtacagccaattcatgattttaccttgtgtggagtggtgggagcatggagagagtgttgcttctsccctaattggaatatattatctctgttatctctattttcttgaataattcttactgatacttaaaaatcactctgaataattgtgagttggttgtacttattttgaatttactaaatctgcattgatttcactgtgttttgagctgtgactttttttttttggtaaattttctttaagattataattaaccaaacttgtttatcttacaagacaaattatatgtgctttcatttttcttctgctgaaaattatactttttcctttttaatccattctttcctgaggaacatcttggtttataagctgaatgggaatttaacagaaagaatttttgaacccatttctctttccttccctaccttcccagaataagcttgattttaggattactatttcttttagtaaaggtactggtaattcctttggattagaaatttgtttttatcttattaaattctgttgactctagtgcccaagagtagagtatcttgcttaagtttgaaatrcgaaatatttggccgggtgtggtagctgtaaccccagcactttgggaggccgaggtgggggtggatcacctgatgtcagaagttcaagaccagcttggccaacatgatgaaaccccatctctactaaaaatacaaaattagccaggtgtggtggtgcatgcctgtagtcccagctactcgggaggctgaggcagatgttgcagtgagctgagatcgcattactgcactccagcctgggtgacagagcaagactctgtatcaaaaaaaaaaaaaaaaaagatatcaaatatttcctagtctcattacctttgtttatttgctcagataatatagcgagtgaccgctatgacaaaggtaaccttttcagaaattcaggtagtctcctaagcaacttttttttttttttgagacagagtctcgctctgttgcccaggccggagtgcagtggtatgatctgggctgactgcaacctctgcctcccaggttcaagtgattctcgagcctcagcctcccaagtcgctgggattacaggcccccaccaccatgcccagctaatttttgtatttttagtagagtcggggtttcaccatgttggccaggctggtctcgaactcctgacctcaagtgatctgcctcggcctcccaaagtgctgggattacaggcgtgagccaccgcggccggcctgcaacattttttttttcctaaatttctttgagttttaaattgacattggaagtgcagtattcaagaaagagaccatactattgttactgttgcaattcaattttgtactcagtcactgtaagtcatgttaaacactctagagcagattctttactatttttttttgtcagttaagctcaagattaacttctctttttcttcctctatgttgattagcctcttggcaccactgatcttagttctttggcattcacgttctctttaaagaatgtataaagtattctttaagcttgctgggttttaaccttttatccctagtatttctaagcttttgttttgtttgtttctttgttttgagatagggtctcactctgtcacctagactagtttttaacagtctggataatgtaagttttgtataggacttctcatagtagtttgaagtctcttgaagtctttaaaccaacaaaatcagctgtgctaattggccaacatagttataaaagaaatatcaaaagatttattagatataataaagaagttactytctaagaagttaaccttggaccraagaaggccagaattaccttcctctaaatttgaaattgaacttgctcttaggtaatagacttcttgagaactttaaaagctgaccaggttgacctgtttgccagttcttttggtagggattgtcataagtattgtaattcatgtttaatgatttcaggattatgaaagggagaggtatttgttttgttttggtgctgagatttggattttttaactgtgaaattttgctgtgtattgacagtgtgatgtatatcttattcagtagcctacatattcaggccttgtatattatttttacaatgtgaaaaaaattgtttttagcttcctacatgccaggcatgccaggtggaatctctccatacccatccggataccctcccaatcccaggtaatgaaaaacgttcttttgaataattgtattacaaattcttctattagatctagaatcaaaataatttgctaattagggcattaaaataaatttaattgcaatttagtggaagataaaacttggtttattcctggaatttatttatttatttatttattttttttgagatggagtcttgctctgtcacccaggctggagtacagtggcgcaatctcggctcactgcaacctctacttccccagttcaagtgattctcctgcctcagcctccctagcagttgggactacaggctgtgccaccattcccggctaatttttgtatttttagtagagacaggatttcaccatgttggccaggctggtctcaaactcctgaccttgtgatctgcctgcctcagactcccaaagcgctgggattacaggtgtgagccaccatgcccagcctatgtatttttttttttttaaaagaagagagtattataaaatatttttccccttggctgaattcattataactagcattccatttaatatttcagctatctatactagatatacaaatttcttaaaaggacttcaagatcaaaaaccaattgagatcactgtcattactcaacccatttctttcctctttaaaataaaaatgcagcccaggagctgcttttctgtagattgaaagaaactcctttcaaattatacacacacaccttaaaattctagcaataaggccgggtgtggtagctcacacctgtaatcttacccagcactttcggaggccgatgcaggcggatcacctgaggtcctgaggtcaggagttcgagaccagcctggccaacagagtgaaaccccatctctactaaaaatacaaaattagccaggcatggtggcacatgcctgtaatcccagctctttgggaggctgaggtaggagaattgcttgaacccaggaggcagaggttgcagtgagccgagatcgcgccattacactccaccctgggcgacagagcaagactctctctcaaacaaacaaaaccccacaacctatcttttctatacattgcaggaatcaattaatggttcagataatggggtcaaacttgtcgcatgatatttacttattcagttcatagactacctgtactatcaacctttattatccatttagtaataacataggtaactaaattaaattaacaatgaaatcagtctgttaacacacgctagaaagtcaatgataaataattactaacccatgttttaaatgtgtacttgtttcagtggtaatctaggagtactctccaaaggtggtctatgggctaacttaaaatcccacccagcactttgggaggccgaggtagggattgcttgagcccagaagttggagaccagcctgggcaacatagtagacctcatttctacaaaaaaaattaaaattagccaggcatggtggtgtgaacctgtagtcccagctacttgggagggtgaggtggaaggatcacttgagcctacagatcgaggatgcaatgagccgtaattgcaccactgtactccagtctggccaacagagtgagaacctgtctcaaaaaaaaaaaaaagattggcatatactgatgccaagatgagacttccagctgctctaacaattagcaaggaaaatttaactctactaagtcttcttagtttcatataacccagtcataatcctcatggataaatgcagccagatttctgaacacatgtcataggtaaatatatatatgtacatatataatatctaggatcttgaaagttaatttagcaaacacttcatttctgggttgtcttaatttcacaactttttagaaggtaataagcattctgtcactttggataggtaagcagagattagaagaacatttgtcagggacaatagagaaagattcctttggtagtaatatataagcaggttattcattttagatttcttgaggccctaaattttctgattaagttctagaaatggaatcctacctgaagccttgaaattacaaggctactgaacaattgctagtaaaaagcagctttggacatagagggaataattgttgaaggtacactatggaaatggacttctgaacaataaagctacagatggagatttctctgaagttaatatctgtaggcttagaagagttttataccaagttacaaaaaaattcagcaatgtgatcacattatctttgcaaaggtatgcaaaatgggagaaactccagaaaaaaagagcagtttatcccagttttcagaaaggtggatttagaaatttcagtaggattgacatttctttacagcattatagcatggattactgaagagactagaaacaaaagtactgtgttcagtagcctccagcatgtgtccactaggaacaaaaatgctttcttttttttttgtctgattttgcttttatactgatatataagagaagtaccatgattacattgaatcttcagcaagtcatatataaaacttagttgaggacaagttataaagtggaagctgataatacaaataggagaatctttgaaccactgcattgaaaaaggattattgacgataaactcagaaggagctcttgctccagtgtcctaggctagctttttttttttttttttttttgagatgggggcttcactctgttgcccaggctggagtgcagtggcataatctcagctactgtagccttgacctcctgggctcaggtgatctttcaacttcagcctcccaagtagctgggactacaggtgtgtgcccctacacctagctaatttttctatttttgtagaaatggtttcgccatgttgtctaggcttgccttgaactcctggactcaagtgatctacctgcctcagcctcccaaagtgctaggattacaggtgtgatccactgcacccagcctgggctagctctttttaatcagtaattttaatgcgcttgtaaaaggcaaatgtcatagaattgataattatagctaaaataggattaattgagatttattgtctaactaaccaggtggccagtaatcatcctattctaattttcttcttcgttgtaagggaaacactgactagtaagcattcagaggaaagcaattagatctgaaaatcatgtcctgagacaaatggttaaaggaattaagaatagttagggctgggtgcggtggctcacagctgtaatcccagcagtttgggaggctgaggcgggtgaatcacgaggtcaggagattgagaccatcctggctaacatggtgaaaccccgtctctactaaaaatacaaaaaattagccgggtgtggtggcgggcacctatagtcccagctactcaggaggctgtggcaggagaatggcgtgaacccaggaagtggagcttgcagtgagctgagatcacaccactgcactccagcctgagcaacagggcgagactccgtctcaaaaaaaaaaaaaaaaaaaatttaacctgaagaagagaagcttgagggaaaaatgttagaagttctcaaatattcgagttttaggagtctccaaatagttgagtgtcttccaaaatgcaaatttaggactcctatttataaattatattgaaatgatgtttaatgttaaatagagaaagatgaccatttgtcagggatgttataaatgatgtgtgtagataagagattgttggaaaggtgattggagtagaatacctctaaggaaagttcctctgactttgatacgaatacatgaatgacagaaactgtccagaaagtgagaaaaaaggtttttttttaaactaaagatgagtttggtacgaatgttatcaaaagaggaaaaaaactatttaaagacaagtgttttcgggttaaatatccccaaaggttaccaataagccacaggtamaaattaaatagtatcattttcccacagactgagaaatcggaaaagttctctcacaaattacttgttgcttctgatgctgttggattgtccttagaaatactctagttacatttccgctgctatgagggtgactctcatataactgggaccaagcaagagcatttagccatttaagagtaaatgcagtgtcattaatamaatttccatagagctttacttgaataaacacttgcagctccaagactataaattcatcaactggtaaaacaaccatatgtcaarcttaacttcctgaatggggttcttcaaaatactataaggttgggtcatcttaaatgttaaatgttttttgttcttgtctttagtggttacccaggctgtccttacccacctggtggtccatatcctgccacaacaagttctcagtacccttctcagcctcctgtgaccactgttggtaagtacccttgaaaacttgtgtttcaccatataagcaaagtctaactccctgttgtgaaaagcacatttcacttgtgaattttggactactctttcttcttagaggaaaacctataataatgtactataatcttaaacttgaagtaaatgacttaacatataaatgaaccttctaccagggcatgaaaataaatctgattaactcatcaatctttcttttgatcacatagttttatttgtgagccaaacatgtgttgaactattagcagatacatagattttcctagcttggttatatgtgaaaacagatcaccatcattaagagaagaaagtaaaatgggttaatatgagcaggtcaaatcagacaaatgattgaagaccagtagtttttgctttttgtgtttgcttattagcgttacctgaaatataattttcttcaactaaaaaaactaaggcagtgagagaatttctttagactccagccttcacctatgcctatctcccactacctgcaccaccatatctgccttctccctgttaccataagttggttatctttgcttctatctaaagctgatttctccactagaccttatcccctctaatgtactcaggggcatcacttcagcagttccttcctctcaagttttgttctctactggatgactcatcagcacagagaaccatgccctaaaaaagccttaaagagtccaattgagacaaacaaatggaaagacatttcatgcccatgaagaattaatattgtaraaatgactatattacccaaagcagtctgtagattcagtgcagtctgtgtcgaaataccaatgtcagtttccatagaaatagaaaaagctatcataaaatgtatatggaaccaaaaaagaagccaaatagccaaagtgatcttgaactaaaagaacaaagctggaagcatcatactacctgacttcaaaatatattacaaggttatagtaaccgaaacagcatggtattggtataaaaacagaaacagaccaatggaacagaataaagaacctagaaataaatctacatatttacagccaactgattttcagcaaaggtgccaagaacatatattgggaaaaagacattgttcataaatggtggtgggaaaactgggtatccatatgcagaagaatgaaaactggacccctatcttgtaccacatacaaaaatcaacttgagatggattaaagacttaatgtaagacccaaagctataaaactactagaagaatacataggggaaacccttcgggacattggcctaggcaaccattttatagttaatatctcaaaagcatagtcaacaaaaatagactactgcgatgatactaaattaaaaagcttgtgagccagatgcagtggctcacgtctgtaatcccagcactttgggaagccaaggcgggcgaatcatttgaggtgaggagttcaagaccagcctggccaacatggtaaaaccccgtctctcctaaaaactaaaaatgcaaaaatctgggcgtggtggtacacccctgtaatcccagctacttgggaggctgaggcaagagaattgcttgaacctgggaggtggaggttgcagtgagctgagatcgcaccactgcactccaccctgggcaacagagcgagaccttgtctcaaaaaaaaaaagcttctgcacaacaaaggagatagtcaacaaagtaaagagacgacctgttgagtgggagaaaatatttgcaaagtacccatctgacaaggaactaataaatatacaaggtattgaaaccactcaacagtaaaacaaaccattaaaaagtgggcaaagaacatgaatagacatttcttaaaggaagacatacaaatggccaacaggtatatgaaaaaatgctcaatatcactcatcatcaggaaaatgcagataaaaaccacaaagaaatataatcttatcccagtttgaatggccattattaaaaagacaaaaaataaaaaaataacaaatgttattgaggatgaggagaaaagggaacttatacaatgttggtgggaatgtaaattaaagccactatggaaaacagtatggcaatttctaaaaaaactaaaattagaactaccagacagttcagcaatcccactgctgggtatttatccaagggaaaggaaatcagtatattaaaggaatacctgtactcccatatttatagcaacagtattcatactagctaagatatggagtgaacctaaatatttatcagcagatgaatggataaagacaatgaggtatgtgtacacagtggaatactgttcagccataaaaagaatgaaaacgtcattgtagcaacatggatggaattggaaataaactaggcgcagaaagacaaatatcaaatgttctcatgtgggagccaaaaaacttgatctcttggaggtagacagtagaatgatagacaccagagacttaagaacggtgtgtgggtgggatagggcttatgaagaaaggttggttaatgagtacaaacatacagttagatagaaggaataagttctaatgtttgatagcagagtagggtgactatagttaacaatgtattgtctatttcagaatagctagaagacttaaaatgttcctaccacatagaaatgataaatactcaaggtgatggataccctaaataccctcacttgaacattacattccgtgcaggtaacaaaatatcacatggtacccacgtaaatatgtacaaatattatgtatctaaaaaaattttttaggccaggcacagtggctcacacctgtaatcccagcactttgggaggccaaggcgggcagattgcgaggtcaggagttggagaccagcctggccaacatggtgaaaccctgtctctactaaaaatacaaaaaaattagccgggcgtggtggcgcacgcctgtaatcctagctactcaagaagctgaggcaggagaattgcttgaaccctggaggcagaggttgcagtgagctgagatcagacaactatactccagcctgggcaatagagtgggactccatctcaggaaaaaaaaaaaaaaaaaaaaaaatatatatatatatatatatatttaaatataaacatatttatatataaacatatataaatatacataaatataaatatataaatatatataaataaatatataaatataaatatatatgatatatataaatatatataaaatatatataatatataaatatataattatatatcatatataaatatatatattttatatatatatatttaaaaaagaatcctcttctctattccacttttcctgccaccactattggatgtcttcattcttctctgaataactccttgaagtaactctctttgttatcttcagtacctcttctccgtttttctcttaaacctccttttggactttttctcataccattttgctaaaactggtcatgattaccaataactttttgaggttacatccaatggatagttactattctcatcttacttgtcctatcagcagcatttgacacagttggttacttcctccttgatacactttcctcttgttttccaaaacaccatgctcattttattttcttcctgtctcatgggtattcatacttagtctcctctgcaagttcttccatttttcttaacattggtgtgaccctggcttagtctccttggcactctctatcctcactctcctgataatttccaccagttcaatagctttaaataccatctctgtgcccccagttctcaaatttatgtctctgacctatacctctctcctgaactcgagattgttatatccagctgccttttcagtatctctacttggatgtttaataggcatctcaaactcaaccaaaaccgaattctcaatcttcctaacacctgccccatctccattgttacctactctatactctttggagtcatccttgactcctcatcaggaaatcctcttgtcttcaaaatatatctagaatctgatcatatccagtgctgatccaagtcaccattatggctcatctaatttacttcaaaagccttccacaagatttctctgcttctttccttgtccccctacatctctcttttttgacacagcagctagagtgatcctaataaaatataaataaattgtatcactcctctgctcaaaaccttcaagtgatttcctgtttcactcagagttcagtccaaagttcttgggcccagaaggccctacatgatcctgccctcttccccattacttttctgacctcatctcctactggtctcctgtcttaggatttgtccacggcctatttctgtgcatggatcagccaggcctatccttaccaatttgctgccaccaccaccaatcccccctccaaccccccacccacacactcaacatccagaagagtgcttggtatatagaagtttgctgttgaagagatttgctgagttcctgaatgaacatagaatcttgtgaagtttatttttctgttatgttttctgataacttgtaaccatcctgaggtctgatgtaaatgtcatccccccaccccataaagggttatttccaccgtttttctcattgatacacactattcaggttccagtggtgtggttttgatttattaaaatgtatttgtcattaatgtaactacaatataatgaaatgattggagttagaaacctaaatgataaaaggtctttaatccataagcaaagcacactaaatctggtgaagctctcttattttggttcagcattatcaataaaataggaatagtgctgtttgtcaccctgtttctcattgaaataatagtataatccttttgatttgtagagaaccttagtttacaaagatcttttttatattaacttgtttcattacattaggtacgaagcatttttttatagcttagatgatttccrtatatccaaagaatagaaatgtgtggaaaatggtatatgtggaatcagatctcatgtttatgatttttgaacgggtaatcaaatcaactaatattttactctacattttcaagagtactgtcttaggcatataggctagaggcaaattattttatgataatttaggatatcctttaatatatattgtttttctaccctttgatctttacctacttgatttgatttttttcatcatatttcattagttgaacatttagtagtctgttgaactttagacttaaaggaaagcagaaacataaaagtatcatttagatattagagtccacagtcacattttctcagtatatcaatggtcacgatttgggctgttattctgttactgaggccatgagaaagaatgaatttggttatttatccttgttttttttgttgttgttgtttttgagacagactcgctctgtcgccaaggctggagtgcagtggcgcgatcttggctcactgcaacctccacctctcaggttcaagcagttctactgcctcagcctcccaagtagctgggattagaggagcgtaccaccacacccggctaatttttatatttttagtagagacagggttttaccatgttggccaggctgatctccaactgcaactcctgacctcaccacctgcctcaacccaccaaagtgctggtattacaggcctgagccaccacacctggcgctatccttgttttttgatacaggatcttgctctcttgctcaggctggagtgcagcagtgctgtctgcccactgcaacctccatctcctgggctcaggtgatcctcccacctcagcctcctgagtagctaggactgtagacacataccaccatgcccggctaatttttgtattgcccaggctggccttgaactcctagattcaagtgatccacccgtgctggcctcccggattacagatgtgagtcactgcactaggctcccttgttctttttgaaacttagcagtttcactctgtagatttattttatwttattttattttattttattttattttattttattttattttattttattttatttttgagacagagtttcgctctgccacccaggctggagtgcagtggcatgatctcggctcactgtaatctctgcctcctgggttcaagtgattctcctgcctcagcatcctgagtagctgagactataggcatgtgccaccacacccactaatttttgtattttgtatgttagccaggctggtcaatctcctaacctcaggtgatccacctgcctcggcctcccaaagtgctgggattacaggcatragccacctcacccagcctggattttaattttatggtgtaatctgaattaagaaagatttaaaatttaccagatgttcaaaaatattagtatatagtatggtacccagaagagaatggtgttccactcagtgacacttccatatgttgtgaatttatgtgtgaggaatgtcagtggactaattggcccctccctttggaggatgtactgtcagctgtgcttgtgccagaatctccaggtttatttgatctctgtagagtactttttttttttttttgagacggagtctcactctgttgcccaggctggagtgcagtgatgcaatctcagctcactgcaagctccgccctccaggttcacgccattctcctgcctcagccttgatctatgtagagtccttttatcagagtgctatagacatcttcaacctcagtttacatagtgttttgaaaactaactaggggaatgaggaggtggtagtcggtgaataatgaaggaacaaaccaattcatgtagcaaaaaaaaaaaaaaaaacctaactggtagtatgcattgaaacttaacacaaagattctttttcctgttactgtaggagcaaaacataaactgactatacctatcttaatcagtttcacatacaagatccctgaaaaatagtgggtatggatgggcaccaggtgagccaccatgaagtttctctaccacaaccaccacccctgcccctggyaaaaaaagaggaagttaaaaggctttggtgattccttactccagtctcagcagtggtgaaagttctcttttgaaggttgacttattttaaaaagctatatagaygattgtagttgatttatagctctgaatcctaggctttaggcctttaacatatacacagtttgacctttcagtagttgcagtttaataatagtaaaattgaagagtaggtgtttattcccggttaaagccaatacctaccacagaatttttcttggtaaaacttcataaatactgtatatttcaacctctgagttttaaaaatgtcattttaagattttgttcctaaaaatcaaataaacaaggatcagaaacagtaagtttggaagggtgctattaacagagattcagggaccagttttacctttgttaaagtgttgtttaaaaatgtgggagtggaaaaccctgaaaatgctgcagctgaatgatgtgtttctgtagtttccactctttagtccatactgaatatttagataaagaaaggaaaaggtgaagaaaaataagagagcttacctgttaatatttctttgaggacagaagctagtaaacatgacaagtttttcttgactgtcttatccaatgctgttcttccctctggccatcctagattaagtgtttggcctacagaaactgtactttcaggatatggcacccaaggcacccagcccatgtgggtttactagtgcacgcttgcttgtgtgcaggtttgggtgcctcttccccacacctttcacagacttcctttgggaataactgcctcatcttcaggataagtagcgttttcttccaatcctggacagtcagtgagtcatgagtgaaatttaaatgctgagagtttagtctgctaaatgttaaatccttttctgccaaagcaataatgataacagaaataatgataacagaaattcaaagcaataatgatagatttgaaagcttttaaaaaagctattgtgtaagttaacaaatgatttttattttgttagtaaaggaaaggtaggagaagctgattcatttggcttcctgtcgttattcctatagaatacctctaacataatagattcttaaattagtcttttcacaaaacgttaattttaatggaattactttgattctgattcatttttttaagaatagaattttaactctccttcagatttattggcttttgtgcttatgcctaccaggtagcatctttcatcttttatgacttactatgatagctgaatgattttgtcacactgtttcttttttggagtagttattattttgctgtctcattttagcaagacttatacctacttaccttcacttttgaaaactttaatttttatgtaaatgaatttaaactttttttgtggtgtgtgtttattttcaagaagtgtaaacctgctgatagctttctttaaattttttcttattgattgtgttgatagaaactttctagagctcaagtaaagcgcatttttctgagtgtttaaaagataaattgaggccccctaatttctttggaagaaaagctccatagcctgcacaaagcctgtaagtagtattagaagcttacatattcatacactataaataaaaaggacttttgtaagccatgtaatggatttgcagtgtttgcacttaatagcacagatcagaactcctttgctcatacagttgtctgaaatgttcttccttcttcagagatagacctgttttttgttttttattatgaaagaaaaataatcctcatatgttctcggtctagtttctraatagatggtcagtaagctactgtgtgggattacttgggctccatagtttgctgtgtagcacagatgccagacctaggaccattatgtgggcctgagcaagtaacatccaggagtaaaaatgctgggcaggtagtttacttttgctgattaagggtgaggtcagaaaaattatcgttgagttatagtttactttgggcttatggattctttctctaatataaaatagcttcatttgagttccaggaagtagtgatcgtttgtaaatactcttaggagataaatgaaaccgggtgtcttaagtgtttaaatagtggctttaaatcaggtagtgtatactagtgcactgtgaatatacttgcataaattattcaatgaatttttgggtccattgagtgtagagtgttggtttcctaatactagaaaaattatatcttatttcctaaggattaagtttggagatcagatcctacctgacatttaaaggaagttttgcttaagattgttactcaaagtctgttagctcttcaactgctaatctggaattgtagaagggcacttttgaaatctgactctgcttgagtaaaaaggtcagtgtgttggggacttggggtatggcagtttgccaaaaactcttcttattcttgttatagcaggtatagagaatattcaaatttcttctaagatgtttgagaagaaagtttggtttggtaagtgttcacaaagtagatgagaatcttccaccaaatcttttttcttatttgtttgcataaacattatcttaaagtggcatggttcatcgaattttgaactttgatgagtttttcttttacttctttgaaaaactctgggtttttctttttttactttcttatttcagatcttagttataattcctttttttttttttacaaagtagttcgattttttaaagtttagatatacttcacagtgaagtctatgtgtgatagagataagactaggtctaatcttggtgtttgtaacttcctcaggtgaactgtgacctttataggccaagcgactgctgcctcggcttggttcttattttragggttaatgactttggctggaaagtcttggcaaggacttatttggtggtattatggtagcatttgcctgaacatattctataaagagaaacagaatgtaaattccaggatttaaatgtgtgtttttaaaaataaggatttaaaaatttagcatcagtataatttgacccattagaccagatataatagctttaacaaagtatgttgatgtgtttatgtgtgaaaaattcactaactataaaaagactcttaagttttcattagttctgataacttctgtgccaatgaatggaataccaccactgttgcatgtgattgaatgcttaattatagacatatcatttaggtacgtaatctatgggagaaggattttccttcctgtctcacaagaaccatcataatatttcatatagattataagacaggttcttctagaaaggttttaaaattccttttgctaatgcagccttactataaactggggacttaatgaaatcttcaatagtcatcatatcatgaatcatcctttggatatgaaattctaaaccaaactcttgtagaaattggctctttttcactttctttaaaggactttttaagtacagtataagaaattagagatttttattcggtctaaattctgtccagatgactgaacagctaagactttaattcatattaagtctgtgaaagagagctcactctctgacgtattttaatctgtatgttcagtgagtgtggaaagatgtgttgcctttttatatggcctcatttgaagtagaccgacttattctacaaattgccatgaagagcaagttcttgattaggtaagaaaatactctttagttaaggacctgtaaagtttggaagttcacaaaaccacctgcacttctgacactcattgcaagttcatggtttcccaaggccaccctaaagttctataattatctagaaggactttaaaagctcactgaaagctattatactcacagttatgacttatggcaaaagatacagattaaaataggctgaggaaagacacgtgggcaacccagaaagtttcaagtgcaaagcttctagttgtcttctcccagtggagtcataggcagtgctgacttttcccagtaacagtatgtatcattatgcatggagtattacccaccaaggtagctcacctgagccttggrtctagagtttttatcaggacttggtcatatagacaccattgactgcctgtgaggctgacctttagtctccagctcctccagaggttgagctgttacctatcactgcatggcccagacccccccataaatcacactgttagactgtctggtgtagataaagaacactctaattagtcaggaagttctgagggcttagacatcacctccaggagccaagggcaaaggcgtggcctctctgggtaaagttaattctttactacacagaaccaagctgtaaggcattttgccttattttgcttgaactttaaaaatatccgaatacaggagctgctgctaccgtcgctgcagccacggcaggcaccgccaccgctgccagaggagtgggcttgggaaagaagtggtcacctcacttggagctttgctcagaagcatcctcgtcccctgcagccctcccacgggaacgactggataaaagtgagctggtacagaaagccaactcactgagcaggctgagcgctatgatgatatggctgtagtcacgaaggcagtcacagaacgaggcatgaatactccaacgaagagagaaatctgctctctgttgcctacaagaacatggttggtgcccgctgctttcctggcatgtcttctccagcattgagcagaaaacagaggaatgagaaacagcagcagatggggagagagtagcatgagaagatagaggcagaactgcaggacatctgcaatgacgttctggagctgttggacaaatatcttgttctcaattctatacaaccattttctatttgaaaatgaaaggagattattttaggtatttttctgaagtggcatctggagacaacaaacaaaccactgtgtggaattcccagcaggcttaccaggaagcatttgaaattagtaagaaagaagaaatgcagcctacacatccagtttgacttggtctggcacttaatttctcagtcttttactatgagattctaaactctactgaaaaggcctgcagcctggcaaaaacagtatttgatgaagcaattactgaattggatacactgaatgaagagtcttataaagacagcactctgatcatgcaattacttgggacagtgttactctgtggacatcggaaaaccaggaagatgaaggagatgctggggagggagagaagtaatgtttcttgtgctttgtaatctgttcaatgtcactctgtaccctccacgtatatcccttgtgtggtaaaaaataattgtatgttgactttggatttttcacagcctcagcctagcaaaaatggttcatgggataaacagctggtgtttgtattctaaaactcagattggtcacataaatgccacggcattctgaagttttgattttgattaacattgacaggattactgtgtgtttaattttttttaattcaacactgtgattatggggttttgtaatttagcaaaactcttacttgtagaaaaaatagacctgaattatgtgtaactttttggaaagtttaatctgataccagaatcattgaaatacaattccattgtaaagttgtacagaaggttatagagattatattatgatgctagaacctggagtgagacacacatcatttggcatttgagtttaatggtaattcatagtaatgctgcctgttgtttggcacttaaagacacttgacctgtttgggctgttgccactcaaaagttcatgaccacagatgtccacagtgtcttcctctgaagaaactcgaatcctgaaatttaaattctttgtggcagataactggcttatgacaccttgaaaagtccaagtgctcatataacacacctgactaaatccccttttctactgcagtgtgttcactttgttaccaatttgcaacttgtgcttcaataatggaatctattttcattgttaacactgagctaaagaaaagccrtgtgttttatgaatgaccttatctgtttcctggataatacctttaagaataatcttctgagtcaggcatggtggtgtaggcatatagtcccaactacttgggaggccgaggcaggaggatcgcctgagcgtaggagtttaaggctgcagtgccctgtggttgcacctgtgaaataaccgcactccagcctrgacaacgtagggagacctcatctccaaaaaaaaaaaaaaatagaatgatgttctgtagagattgcctttcacttgaggagtactgaatttcctggcttggggcttttaaattttgaaatcaaaacattctttcccaccatccttttttttttttgagatggagtcttgctgtgttgtcaggctggagtgcagtggcatgatctcggctcactgcaacctccgcctcccgggttccagcgattctcctgtctcagcctcccaagtagctgggactacaggcacgcaccaccacgcccagctaatttttgtatttttagtagasatgggttttcaccatgttgatctcgatctctggacctcatgatccacccgccttggcctcccaaagtgctggaattgcaggtgtgagccactgcgcccggccccccatcatcctttttgactgttgactttggttttcccttccctcctctctaaatttctgtccttctgcttccttcctttttttgctttttgaattctatctttacctgtcttttgttcactttttaatgctgtatatgggcaggggtgagagacattagtgagcaacttggtgagcaagcctggctttaaagacttgagaagaacttctagcaccagagctctgtcttcctccagttctcaacacggtgttgctctttagtcataccaggatctgaatcaaaaaagtatttttaaatatccctgacttctccctgtattgaggctggccctgatcatgctttttagtgcccctcaccaggtctcccaagtgcacttatccagctcaactctcagatgtgttttaacgagaccctatattcagggaagttgtgtggacactgcagtggagagaattgataataggcctatcagtctcacaatatcacccctctacctttaacattccatctagctgtagagtccatctgtttgtccatctgctgaaatgagaaaagaaaacctcatgcactgatttaaaacaaaccaaaaaaagaaaaaaaacaaaaatccctcctttctaactgaacaaaaatgtgcagttaatagttggcccttgaaaatgcagtagtgaatgtggagctaagcctgtttgtatatctggtagctcttttcttgctttgtttttccttaaccagtattctgcctaatgttttcttctgtgatggttatattgtctagcaagcacacctgtggttgtgaaaatagtatagcaaaaaagaaaaatcctgttactgatgtactaggtttgtgtatgtcttttaaacagttccagtttcaccttacacagaataatcaggaaaagtgtaaaacttcaaaagtgaaataaaaattttatcagttaaaaacaaaaaatacccaaatacaaaaaaaaaagatctaccaaaagcttcctgcctaatactgtaatttgaagatgagatgggcaacatggagcaatggaaaaggaggatgtatgctcactgaagcatgagctgggccaccactcctgttacaaaccaggaattatagcagattcctatactttgaggtttttttgtttcttttgtttttgttttttgcaatagcaaataggtgggatgccaggcacagtggctcatgcctgtaatcccagcactccaggaggctgaggaaggaggatagcttgagcctggaatttgagaccagcctgagcaacatagtgagactacctctctactagaaaaaaaattttaatggttacagaaacgatctaatgttttttcttccttgtgttaaggtgttttagtaaagttttctcaaattatattgcattttacattttttctaatcctttgaatttgttgtgagagaccaaaattataaatcagttttcccctccctgccaaaaatggaaaccaaagcaagtccaggagattgaattatggtaattatggtagtattctttgttaaagaatttggatgttcccttgggaacagaaatttttttttcttttttttttttattatactttaagttttagggtacatgtgcataacatgcaggttagttacatatgtatacatgtgccatgttgttgtgctgcacctactaactcgtcatttaacattaggtatatctcctaatgctatccctccccccaccccacaacaggtcccgatgtgtgatgttccccttcctgtgtccatgtgttctcattgttcagttcccacctatgagtgagaacatgcagtgtttggtttttttgtccttgtgatagtttgctgagaatgatggtttccagcttcatccatgtccctacaaaggacatgaactcatcattttttatggctgcatagtattccatggtgtatatgtgccacattttcttaatccagtctatcattgttggacatttgggttggttccaagtctttgctattgtgaacagtgctgcaataaacatatgtgtgcatgtgtctttatagcagcatgatttataatcctttgggtatatacccagtaatgggatggctgggtcaaatggtatttctagttctagatccctgaggaatcgccacactgacttccacaatggttgaactagtttacagtcccaccaacagtgtaaaagtgttcctatttctccacatcctctccagcacctgttgtttcctgactttttaatgatcaccattctaactggtgtgagatggtatctcattgtggttttgatttgcatttctctgatggccagtgatgatgagcattttttcatgtgtcttttggctgcataagaaatttttaaagaatttaactgccgaaggggcttagccctgaattatggtggctggttgggcagaattgtttgaatgaagtgaagcagtgatagtgttgatgatgcaggattttcttctcagtcactctgcaagccagggacctctgacgagcgacaccctgcctgggcctccctcagccatgctacctgctgccagagacagccctcccattcggcccacttgggccgagtctggcttacccgctggttcccgagttcttgtcctgtgcccacaaagaatggggatgcactgacaatcaagagtgagcaagacagggagttttattgactgatgaaagagctttcactggagaggggatgcaggggtggttcccctacccaaaggtgggaaagtcccctctaagtggctgagtcctgcggcttcttacaggctcagaataggggaagggcaggccataggtagtattggaaaaggcaacatttgattggttaaaaggcattattgaggaagaatcaatgggaaagggtgggcaaacaggaatagaagttctcactctaggtcaggggtttcatccgggaccagcagtccaatctttcagccttcaggctgtttttggcttgaaggtggcgtttcaccggggacccaccccatctgcctcagcatttggctgcctcctgttgctgttaatgaaatccataattttaaatattttactctattaatgacttttcagcactgtttccaaccacatgccttcaaagcagtagagcttcagcagttcatttttctgattttcaggtagagatattgatgagttctttcatttggtttaataccaccataccatttattttggagagcgctcatatatttataaacaattttaataattaccttcttctacattgcagcagaagacaagagaagggaagtttccaaaaaagcacattctaaggacttctaaccatctgaggccttttctctaggactcctagaagataaccaattctgttgatttcaggagatcattcagcaacagtttgccacccttaacatttagtatttaggctgcataataaggattatagagacctttccttcagaaaataggttattaaactaataaatatagtgataactgttaagagagagcagattctagttgttgtgctgacgttttgggaattatggttaatggaggaaagatcattggcaaagattaggtttcaccataatttaatggtagagagaagatgggatctgatgttcgagagcattaaacttttttgttagtttagaatggcttagagtttgttgacagagtttgttgatggttttggtaaaaagcaggatcatctaacaggtaattagaagacccaggtaattcacaaggcccttcaggaagtttgcttcccagctactcgggaggctgaggcaggagaatcgcttgaactcaggaggcagaggttgcagtgagccgagatcatgcgactgcactccagcctgggtgacagagtgagactccatctcaaaaaaaaaaaaaaaaaaaaaaggcggcaattaaggttaaatatacttaacgtcctcacgtagtattttataatcaaacataattaaaagtcaaaatgccatttacacatttgctgatttgggacaataactgaagaacactgatagtcataaagaatacccaaacttatattagaaaggggacctttttgaagaaaatatccagaggatgtttatttgatctgaaatatgcatggaaatgatataatatactgattaggaagggacatttggaagagaatagtaaagaatctgggaataaacagtttatcagctgttgaattttttggatgtcattcttttttgttcatctgttctgtcctgttggtaaagggtgaagtagtaaaagtcttacagagggaagccttattaacctgtacattcgtttagggaaactgcccattctcagtcctctcactggcctctacagtgggcacttgtctccttcagcttagcagcgaagcctgatgttggacttggcctgcaccaaatgtttttccttagtggaaattattgtgccatttgttggttatttaggaataattgtaattggtagggacatagcctctgtctcattgagaaaataactaattgtagctaattgtttgggctatgaatagggaaactgggtttaacatggattaatagtaatctcttgtagggcaagtatttctgaatcaactcagatttttacattatttctcatgaaactggtaacataatttttttctttcctcacattttgaaagtgtcggttcatattgcccccttttctgaaggttcctgtgagacaaatagaaggaacttgggaagtaagcaagtgttttttgcctytktttcctgcaggtcccagtagggatggcacaatcagcgaggacaccatccgagcctctctcatctctgcggtcagtgayaaactgagatggcggatgaaggaggaaatggatcgtgcccaggcagagctcaatgccttgaaacgaacagaagaagacctgaaaaagggtcaccagaaactggaagagatggttacccgtttagatcaagaagtagtaagtgactcattaaagacttaaaatttttggattgaattgtagccatggcagagtgttctatatgttccctggatgttgtgggcatagtaggagttcagaaaattataggcatctttaaacatttgaatgtaattttttatacctttgtttacagtggagcctatgtttggcatttggtcttagattgggaggggtataatatttagaccattttgtttgcaccttgtattagttcgttttcayrctgctgataaagacatatccgagacttgagagaaaaagaggtttaattggacttacagttccacatggctggggagacctcagaatcatggtgggaggcaaaaggcactcctttttttttttttttttttgagagtttcactcttgcgctcaggctggagtgaagtggtgcaatcttggctcactgcaacctccaccctccaggttcaagcgattctcctgactcagcctcctgagtagctgggattacaggtgcctgccaccatgcttggctaatttttgtattttttagtagagacggggtatcaccatgttggccaggctcgtcccgaactcctgatctcaggtgatccacccaccttggcctcccaaagtgttgggattacaggagtgagccactgtgcccagccaaaaggcacttcttacatggtggtggcaagaggaaatgaggaggaagcaaaagctggaacccctgataaacccatcagatcttgygagacttactatcacgagaatagaaagaccggctcccatgattcaattaccacccctgcgtgccatccctccccaccccctgctacacacacacacacacgcacacaggtccctttctgtgagatacaattcaagttgagatttgggtggggacacagccaaaccttatcacacctttgccctaggaaatgttttaggcaaaggatgttttaacccaaaggaggactgtttgagtgcttgatgttgccagttactaggaaataagtttagagagttctaagccatgataaagatctgcacatcttaggagcagacttaaaaggacagtactattttattgtttccaaaggttgtgtgagccattttttaaaagtatgttcagggaactttctcaataatccagagatacttggttggctaaagagctacatataaacatagcatatgcaaccttcagctctttaagctttctcataacagacagctatgccttggacagtccgtgtgtaagtcagccctatggctttgcttaatgatgataaagtggaagcatcagcataattgaagtgccaatttcacgctccattttcatccccatgagggagaatttattccagtaaatgtgtgtttttgatggaatagtaaagaattcttagaaggttgagggctttgtggaaagtgatttgtatgtacccattagccttacaaagtggttctagattgtaaaatgagcctcgaagtagccaatttttagaattcaggaaagtgacaccaatacaactcagagcctacaaccagcacctgcgtgtgatactttgtgattagaatgcagacatttgggcctctatgcattgaatcctcttcatagactgaggaaagttactctcctatggcaggtgcccatttgttgggaagaaaaacctcttatgattttctaygtaaaggaaccttctgctggaaagtatcttgtctgatggcttagtttgcagtatcatttgtcgctgacaggtgacaagcttgttactgtcactgaaagtgctgtcacctcaggatatctccatcattactctatttcactcagcatagtagatcacatcttttcctctacctttgaccagggtgttatttgaaacattattctcatccatgagttgtttaaacatggttgttagcctgtcttttcctgtgaagtgttgtaggtgtctgacaagtggataattatgtacagttattaatgcttggactgttctgttttcaggccgaggttgataaaaacatagaacttttgaaaaagaaggatgaagaactcagttctgctctggaaaaaatggaaaatcagtctgaaaacaatgatatcgatgaagttatyattcccacagctcccttatacaaacagatcctgaatctgtatgcagaagaaaacgctattgaagacactatcttttacttgggagaagccttgagaaggggcgtgatagacctggatgtcttcctgaaggtatttcttcattttacrttccaagattttttaacttgggttgtagaggcactgaccttgcaaaccacaaaccaagagagtttctttgtagtatggattaagattctttatcttcccaaaaaacactaaatgagatgtagggttttgcaccatctttttacctacagagtactgaggattggtctgagcaggggaagagaagtgggctggtggctgcagttctctgcccacaggcagcattaagatgagtgtaactcttctgtgcctgggtggatcaggaggtacgatcagatttccattggttctttgaggtcataccacctaaattgagatcactgattgtgccacctccattttttatctgttaattttcttagagttatataactttagaccagttttcccacatcaaagtatcaggctgccctttcaagccctcttgwatgaaagttgtctcaagcttaatgctgttgtacagaggaaaatctagtaagcgaagtttggctactgctgtctcttgggtcatggagaacatggttttagggataatagcagccacccttgggatatctgatccagctgtagctggagcctggtcaggtcatgtgctgatcttgcctatctcctctcactgtgggggaatggccaaaccatgtgcctcagaagtggtacaaccacatgaatggctggatataaaccagagacccaagagaggactctttttctgtacaatctcttgcttgagtggcatggcttaggaaaagaaagtgtaggtcaaactcctgagccagatcctgcaatgtaatgctttccctgttgagtaagcctttataatatgcagcttaaaagccacatataatgaggtattcattccaaaggttggcaggtcatgagttagggttcttagatcccatctaggttacaaattgtctattttatgcctgggcctaaatcaaagccattctaaactattcaaacttttctcccctcccagcatgtacgtcttctgtcccgtaaacagttccagctgrgggcactaatgcaaaaagcaagaaagactgccggtctcagtgacctctactgacttctctgataccagctggaggttgagctcttcttaaagtattcttctcttccttwtatcagtaggtgcccagartaagttattgcagtttatcattcaagtgtaaaatattttgaatcaataatatattttctgttttcttttggtaaagactggcttttattaatgcactttctatcctctgtaaactttttgtgctgaatgttgggactgctaaataaaatttgttgcataatttttctctcctttattggacttkaggaaagatccatgaaaccttagtaagcccaacttctcatttagcaaaaaaggcataaaatccatcttaagttgaaatttagtattattctacagcatataaagtraattaacatggggatataccaaatagaaatctaaattttgaaatatttgaaattgaagcatttgagtaacttayctgtgaaaggtccaaggagatgctctcctaccaaccctactaaatttgtttcctttctaggcctcactgaaccataagtgttttcatcaaaaaggagcagagtggcaggtccaaactatatacctgataactttaggattaaagggaaagatagtgtaccattgcctccctgcttttattgtcatttaaagtttcgtcttcatggtgagtgattctgtagccaagtttgtgaccacccaatgaactatatagctgctgtatgtcctgcagagctcatccagaatagaatgttcttgatcaaaatgagagtgctagaaagctcatgaggctacaaggctacaaagaaaagtatattccaatttgggatgttattaagataattaggcagcccactctactcccaagagaagaatgaccaatttaatctgttgtcaccaagcggtttacagcttaaggccttttctgtaaaaattaaaatgcactcaaagaataaaaaacagcaaggtcaaatcaakgttttatctagtgttaggaacatttagattactctstgtgtgtgtgtgtatatatatacacttttatttttacattgtagagatagcatgtaaatgaacataggtattaagccatagagaagaattactatgcacctgatgaaaagaatcaggatttgtgtaacacagtaaacacattcttgtggaccagatggcaattacgtatacatacaaggcaagtactgagaagtaccaaaaacatctttgatgccgtcactttaaaaaaaaaaaaaaaaaagtgtcatctatcatctggatactaaatcaaagctaaggccaggcacagtggctcacccctgtaatctcagcactttgggagttcaaaaccagcttggatgacatggcaaaaccccatctctacaaaaagatacaaaaattaggcaggcatggaggcacacgcatgtggtcccacctactctggaggctgaagtgggaggctcacctgagctcgggaggtcaaggttgcagtgagccatgattgtgccactgcactccagcctgggtgacagaatgagaccctcccaaaaaagaaaaaaaaaaaagctggaaggctatactaaataggtcactctttcctctatttttccaacttttagaaattcaaatttattcaaaagtttgacatatacaattccataactactatttcatcttcaatctacagaattagctttaagcaactttaaagcttgagctccttctgaatttcccaaagtgtttctgcactcttttgcaagcaggcctcctcttcaagagtcagttttacttttatgaggtctgtgataccattctctcccaggatacatgggacactaaggaatatgtcttcatttattccatagaggccctgaaagtaaagacttaaaaattattccttttttaacaaagttctgcaatatgagaaacaacagttgggaggtgaatgaataacagattggtatagtacgaactatggcagagtaccaaggcagagaacttttttcttttttttttgagacggactcttgctctgtcgtccaggctggagtgcagtggcacgatctcggctcactgcaagctccgcctcccgggttcacgccattctcccacctcagcctcccaagtagctgggactacaggcacacaccaccacgcccggccgacagaaaacaatttaaaacatgattagacatatttattgttcagtttcaacccaccatctctccatataggccccagcctcctgccatgtttgctggggctcacccttctttcctcatctccttactccataccacttcctatcaggagaccacttcaaaattcctatgactttgtttgcagtgatctagatctgtcttgttgtataacctctcccatttagactagcagagggatctcacccatgccccaactcccctttccccaggagactaactgctaattattttgtgtctagtgctgctttcttagatctcatcattggacataactgaaactgtaagagaacaactccaaaggtaccaaggtctgcccatagtggttcccaatgtttctagatactggtagaatcagttcacttagttaaataataaagatgccaaaacacttacttttatctaataaaaagaaatgtcacactagaccaggacaaaggtctacaaagataggctctttccccaatctccccactcttcagcagcaragaacagacttcaggaagagaggtgcttcccacgagatcaaacccaaaaccagagtgcctcaaaaatgttctttacccccctattttatgttgagttaatgatttttcgaacatgaatgtcctaccttacttagggtagaaactggatgcactctcctaagattcttcaaaatactttctgttaaatcagctacagataggctaatgccccaagaagtataacctttcattttgaccatctcatagccactgtagatagaagaaaccataaacataagttaagatgcacttgtcattgaacttccactttgtagcaatgtatctaacaatgccacaaaactgcagtgactccatcaacaacttctagaaattacttgtagtatgtatgcattttttctttcttcttttttttttttaagtcttgctctgtcacccaggctggagggcagtagtgtgatctcggctcactacaacctccacctcccaggtttaagcaatcttccctcctcagcctcctgagtagctgggattacaagcatgcgccaccatgcgtggctaatttttgtatttttagtagagacgggttttcaccacgttggccaggctggtctcatactcctgatctcaagtgatccacctaccctggtctcccaaagtgctgagattagaggcatgaggcatgagccaccacgcccggccatatatatgcatttttgagagagggtctcagctggagtgcattggcatcatcagagctcacctcgacctcctgggctcaagcaagccaccatatgctcagctaattttttattttttttgtagagatagggtctccctatgttgcccaggctggtctcatactcctgggctcaagtgatcctcccacacctcagcagagatggggtctccctatgttgcccaggctggtstcatactcctgggctcaagtgatcctaccacctcagcttcccaaagtgctgggattataggcatgagccaccatgccctgccacagtggttaaacatttgagttacaagtacagagatgcagaaattaatatggaatcaattccaccactacaataaacactatatagcaagtgtttgaaaaaatacattgtcagtcaacaagtgagcccctaccatgtgctcaatactgggttaggctcaggaataagcaacacagaatcagttcctgactgttgaagaatttataatctggtgaatatgatcacacagaaaagcagaartgcaaataaaaatatgggaaatacaacaacatatatttaagggactaatctcaaccttctaacagagttcaggctcacaacttctaaggtactgaaaatgtgaaactagcatattacctggaaatcacttttttgtggacattttcccactgctcaggatctttatcagttcctatatctgggttcagatccttcagagggacgccagcaatgttcacaccactccacacaggaactaagaaagagacacccaaaatcccacttcttacatggtattagcagggttttggtttttgacctcagcaaaactgttataattgccctgagtgatttccaactaggaatgttccgatatctgagccccactccagatattctaaatctagatctccacagatggggatccacaattctattatcttggcaaagattctccaaataagaaaattgcagttttaaactttccactaggaagttctagtttttctccctttaagtctttttccatagccaaggtttacattaaatagatttcaaaggtttttagccagaagacactaaggggggacaaaaagactgctattaccacagcactctttctcttccttcttatattcttcagttatacccatcccttaatctgaagactgcctactacatgaagtacactgctgacctttctgaactagagtgtcccaaattaaatacaaactatatcatgttacttagttctctatttaagaaaagcgttataatcctagccatccatatgtaggattatagtatcaatctcacatttttcaaatctgtattttttgttggttattttaaaaataagtgtggtaaaaattaaacgctactaaaagggcctaaagtggaataaagtcttttctcccctcccaggagctactttacattaaatgtctgtatgattgataggaaatagatatttcagaggctcaatcgtgcctcaggcttaccacttgagtcgccatgctctccaaggatcagcccatgacagctttcagagtggatgccaagcctttgcccaataaagtaacgaaaacgagcagagtccagattacaaccacttccaataacacggtttttgggaaatccactcaacttccaggctacataagttaagatatccactaagaagaaaaagttcatatcaagaaatgtcctcatctacaaggatatgttttttagatttacctaacttaaaactagtaaatctgatgttttgtggaggaggcaagaaacatggttctctatccaaccccagctatacgccaactcttaagaatatctaccaaatagaagtaatgaaaaaccttttcgttgatactttgcacagcttggtatgcagaaacacagaatgttcactccacagaaaattctgagaaatatgaataaacaaatactctcttatcaagtctttcaaataattttgcttagagaataacccattttcaacaaaaagcatagttaagaggggaagagagggatgagcgcagtggctcacatctgtaatctttagtagaggtggggtttcactatgttggccaggctggtctcaaactcctgacctcaggtgattcacctaccttggcctcccaaagtgttcggactacaggcgtgagccaccgtgcctggcctagtttatattctttaatgcatttttaaaacaaagatttttaaaaaatcaatgacaagtgttattttaaccataaaatagaaggaagcaaagagcattgaatagtaggraaaaattatttttttaatagagacagggtcttgctgtgctgcccaggctgatctaactcctggcctcaagcaatcctcctgccccagcctctcaaagtgctgggattacagatgagtgaccatgcccagcctaaaaaatatatttttttaaaacagcatcagaggccaggtgcagtggctcacgcctgtaatcccattactttgggaggccgaagccagtggattacctgaggtcaagagattgacaccatcctggccaacatgctgaaaccccgtctctattaaaaataaaaaaattagccaggcatggtggtgcgcgcctgtagtcccagctatttgggagactgaggcaggagaattgcttgaacccgggaggtggaggttgcagtgagccgagatcgtgccactgcactccagcctagcaacagcaagactccgtctcaaaaaaagaaaagaaaagaaacatacgtcatcaccaggcgtggtgactcacgcctgtaatcccagcattttgggaggccgaggcgggtggatcacgaggtcaggagtttaagaccagcctggtcaacatggtgaaaccccatctctactaaaaataaaaaaattagccaggcgtggtggtggacacctgtaatcccagctacttgggaggctgaggcagaaaattgcttgaacccgggaggtgaaggttgcagtgagccgagatcacaccattgcactccagcctgggcgacagagcaagactccgtctcaaaaagaaaagaaaatgagaaagaaaaatactttaagaagaagcttcaccccagaaatgcaaaggtggttcaatatcaaaaaatctgtcaacatattacatcagatgagatttaaagaaaaagatagatatgatcattttaactgtaggaaaactcattcagggattaaaaaataaaactaaatctaggaacagaaggaaactgctttttatcttaaaaaggtatctatcaaaatccaaagcaaacatacattatgaagaaaacttagaagccttttcattaaagtcagaaacaagacaaggatacccactatcactgtttctgtttaacattatactggagagtcttctaggttatgcaataggacaagggagaaaaaaactaccaagaataaaccaaggccagacacggtggctcacacctgtaatcccaattcttacagggaggctgaggtgggaggatcacttgagacttggagtttgagaccagcctgggcaacataacaagaccgcgtctctacaaaatgtaaaaagtagtcaagtgtggtggcatgcacctttagtcccagatacttgggaggctgagacaggatcacttgagcccaggggttcaaggttacaatgagctatggttgtgccactgcacttcagcataggtaacaaagcaaaagcctgtatctatctgtctgtctgtctgtctgtctgtctacctacctaccttcatctatcaattagtttttataaacagaccaaagtccttatttggagatggtagaattatctaatagaaaactgctaatgcctacttgcctgggactttgaggagctactataggagcaattattttgtttactaaaactgaataccttgctatctctttgatacatgtttacaaagcctgggtaaaaatggtataaattacttttgaaccacctctacattctgagggtttcagcaggacaatgaagaggtgttctatgtatagaatttgcaatatcaaaaataagaaaatactcgtaagtgaggaaatgtgttgggttttttttttaagtgtagtaggacaatatttcacaaatcattctacaaagtgattgtcctgctatttctgcagtttcaaaataggtggtttttagagccattcacataaatttccattaatgaagtcaaaattatttggggaaaaacaggtaaggtaaagagttcactttcatattatttgaattaaacctcttttattttcttacaggctcagtctttaagtaataaagtagcagctttcaagtaaatgaagtgtctaaaataaatattgattcaactcttatttgaaaaatctatttgttcttgttttagatgattagaatagtattttaggcatttgttggtaccttttccatttggttgaacttttaacttagctttatgtaataactcatactttaaaaataataaatgcatcaaattctatcctaaacatatgaagacaatttaagattcagaatcctgtagtggatctctgtraaggacataatttctaatttgtcttttttgtaaatccatattttttatggcagatttaagtactcaaatagtagaaattagacactttaaaaagatatgaagatgacatcttttgtcctctgaaacagtgttttctaaacaggtaatatttccattaatgtaaaagttagagcttctgttccctgtttaatatccattgatggtaaaaagtgatactgaaacagtctgatcataccactattttaaatggtaagcattcattctaatacctgagatggagagaagtatggtagaaatgtctttaagtttcctcatacataaagctgtcaagtgaagaacctcggttagtcatcctgggccttaagaggttcgtcaactgccactgaaactcaaggggattgggggacctctgccaggccctgggtctggaacagagaatgtgacctgttttaattggtaaactgaaaacagagcaagtaactcagctgtgtcccagggtacccaaccgcattttctaggtaaatgactatagatttgaagaaaaggttaaacttttcctaaatctttgatcttcaattgtttaggttatcttcctgtattattttacatcccctcccttaccgtactgccctctaaattttccattttccacttccatttggtcatttagttcatgtaaatagttactggaactttttaatttgtaaaaaaaaaaaaaaaatcctaaatactcttaaatcaacaattacaaaccttcataagccattctgggtagatttttgttcttttggaaaaaattttttttttttttttttttaatagagacagggtttcaccattttgcccaggctggtcttgaactcctgggctcaagcaatcctcccgcctcagcctcccaaagttctgggattacaggtgtgaaccaccacgcccagcctcattctgaacagttttgaaattaatacctagtatttgtcatgtcttgtgctccacatttccacagtaataaactaaaatgctatattaaaataatgtcaacagtgtgtttttgtaactgaaataagatctgtatgcaggcgtggcggttcacgtctgtaatcccagcacttcgggaggtcaaggtgggtagatcacttgaggccaggagttcaagaccagcctgggcaacatggcaaaactccagctctactgaaaatacaagaattaactgggcatgatggtgtgcgcctgcaatcccagctacttgggaagctgaggcacgagaatcacttgaacccaggaggcggaggttgcagtgagccaagtttgcgccactgcactccagcctgagcaacagagcaaaaccctctctcaaaaaaaaaaaaaaaaacttctaaagtttagttttacaattctaccactacatggacaaaattatgcacttaggtaagataaattaatatttaacataaataagaaacccttactaattgcttgttttaatttttaaaatttcacattcatatcagcataataaaatatcatatataaactaaaagtctgaaaatagactgcagtaggtcagttactgaaaataaaacactgttgaaatgtggccaggcgctgtggctcacgcctgtaatcccagcactttgggaggctgaagtgagcggatctcttggggttaggagtttgagaccagactggccatcatggtgaaaccccgtctctactaaaaatacaaaaattagctgggcgtggtagtgcacgcctgtaattccagctacttgggaggctgaggcaggagaattgcttgaacccgggaggtggaggtggcagtgagccgagatcacgccactgcactccagcctgggcaacagaccaagactccatctcaaaaaaaaaaaaaagtgtgctaggtaaataggtaaatgtgagtattgctataaagttagtaatgtttaaaaaatagcaccacaatcatcataactattaatacatttagtttttatccatgatttgccaaaataaaaattggcacatccttgaaagggagatttctaaaggaacttaagaacttctaaaagtgtctctggtgattcatttaaatgatacttacttttcctgaccttaaaactctgatttgaacttgcactccattttgtagtgatgctacctatacatattacacatgtgtgaagcctttactacagaaccaccaaaaccaggccttgaggactgtggagacacgggagctgcatctgaaggcagtcctgcatgggaattagtacctacgcctgagaaacccctctctacccagattgctctcagaattgccttttctttcactaaaattttagctaaatattatcattcagtgccacgcggtggctcacgcctataatcccagcaccttgggaggccaaggcaggcagatcatttgatgccaggagttcaagaccagcctaacatggtaaaaccccatctgtactaaaaatacaaaaattagctgggcatggtggcacatgcctgtaatcccagctacttgggaagctgaggcatgagaattgcttgaacctgggaggcggagattgcagtgagccgatattgcatcactgcactccagcctgggtgacagacagagactctgtctcaaaaaaataaataaaattatcattcgggggggaaaaaatctttcctgagtggtatcaatttttggtagcttaatactaatttaaagttgtcagtttttgtttttgtttttgttttgtattagagtaatgaagttaattgtttctcttaacttttgaagcacctgaaattttgaagatggttcttagtggaccattttaacagactcactaaaataatggagaagactttcttcacatggttctaatatcagaataagttttctaaatagatatggaagatatatttgatagtgtgtactataactgcatacactgtcaagcaaatacagaactaagctgttaaatcatttgagattgagatttttttatttttccttatttttactgctgttaatggcagacagccagtatataaaaygtagaaagagtatcctctgaatgtgcttattagaaatattagtcaataaattaaatattctttaatagacttctgccataatgcatagagaagcatcttttgctaatgtacacttctaaaatctgtggtgggagtgtggtgggccagttaatgttgccaagcaagtgatgcttaatttgtttttcctaatttgttatcatataaccttaatgacgcggtactttgagggtagaggcgttttagtgcaaatcaaagtaggttggggattcacttaacacaaacagtaaatgtgaacttactgtccccacagacttcagtgccctgaacggttagagaaattaatgaaggagctccaccaggtgccttcacaactctgagtcatatcagaatctctccacagctctcctttcaaaaatgacaccgtgacatttcaggatgtgaaaaaacttactggaaagtgtgtaagaaaatataaaatactattgtacaatgtgataatgtatcatcagcttgttattttcagtgtgcttccttgtagcgccggactaccatttctgaattttggatttggtattttttttaaagaatcaaactcttaaaagaggaaatgcttataccaatagcctgtatgaagcaaaatttatgtgaaagctaaagatatgcatgcagttaaatatataaataaatctcaatgccatacaaaaagaacttttgataatctatgaactattttaaaaaagaaaaaacagcctcaaacttatgggataccgttaaacacaccaacatatatatgcatgtatggtaggaccagaaggaagggagaggagcagaaaattattcaaagaagtaacagctgaaacttcccaaatagaaaaacattatacatccaagccgggtgcagtggctcatgcctgtagtcccagcactttgggaggctgaggtgggcagatcagttcgggtcaggagttcaagaccagcctggccaacatggagaaaccccgtctctactaaaaatacaaaaagttagccaggagtggtggtgggtgcccataatcccagctactcaggaggctgaggcacaagaatcacttgaatccaggaggcggaggttgcaatgagccgagatcatgccactgcactccagtctgggccacagggcaagactccatctcaaaaaaagaaaaaaaaaaaaacctatacatccaagctgctcaatgaatgccaagtggtataaactgaaagacattcacacttcaacacatcatagtcaaactgttacaagccaaagagaaaatactggaaacagcaagagaaaaacaacttattaaatacaaaagaaccaaaatgaatcagcagtaatccctatcaaaatccttgctggttttacttcagaaattgacaagctgatacataaattcatatggaaatgctaaagatccagacaagcaaaatatatatatatatatatatgtatatatatatacgtatatatatgtatatatatatacgtatatatatgtatatatatacgtatatatatgtatatatatacgtatatatatatgtatatatatacgtatatatatatgtgtgtgtatatatatatgtgtgtgtgtgtatatatatatatatatatatatatatatatatatgtgtgtatatatatatattttttttgagacagtcttgccctgttgcccaggctggagtgcagtggtgcgatctcagctcactgcagcctctgcctcctgggttcaagcgattctcttgcctcagcctcccaagtagctaggattacagatgtgcaccaccatgcccagctaatttttgtatttttagtaaagatgggattttgccatgttggccaggctggtcttgaactcctcacctcaggtgatccacctggctcagctcccaaagtgctgggattccaggtgtgagccaccacgcctgacccaaaataatcttaaagaatagtcagaagacttaatacatcctgatttcaaaacttaccacaaagctacagtaatcaacatatttataaatactactatggagttgagcttcatgatatattaagttaaaaatgaaagaagatggagaaaaacgtatgtagtaacaaaaagctgtaaaccataaaaagtgtaaatggttacctataaaaggatggaggctataggggaaagggcacagggacagaagctggaccactttgaataattcctgttctctagaattgatgttggagccatgtgaatattttataaaactgtgaaacaaaagttaaatagttcttcagcatcgaaattaaaatgaataaacttaatcatgcactcactgttggtctgcacagagaaaaactactccaaataattttagaatacagtaatttgaatatccctaaactactaagctccagactcataatctctagctgtttgacatttcctcttgagtatcatttcaggtatcttgatttttcccctctatatgtaacatccctgcctccttccctcactgactcccacccgatcagtaaatttaccaacccagttaaatggaactaccatcccttcagttactcaaaggaaaaactctcgaagttattttttattcctccctttctctcactagacataatctatcagcagtcctgcacattttatctccgaagtctattttcagtttgtccaccttgtaaatgcaccagtgaggagtctagtacaattttggagagtcaggcagtaaactatagccctactttcacttctcaaacagtaatttggaaaacaaacctcagcctttagaatataaaccttgaactcatatgattaagcatattatcttcccatacacactacttttttttttttttttttttgagacagggtctcactgtgacccaggctggagtgcagtggcgcaatcatggctcactgcagccttgacctccctggctgaagcaatcctcccgcctcagcctcctgagtagctgggactacaggaatgctccaccatgccctgataatttttgtatttttttgtagagatggagttctgtcatgttgcccaggccgttctcaaactcctggattcaagcacttcacccaccttgggctcccaaagtgctgggattacaggcttcagccactgcatctggcctcacactagtattttttaaagtcattatagtatatacactgattaccactgtgcaaagtacatattacactaacaaaacagaaagagattctggaattatactggtggtttacgatttaatattcattaaattctttttctcctcaaagttactaaacccacccccaaaaactccttcactgaacagtgaaaataaagctgtcctatgcagccataaaaaacaaaatcatgtcctttgcagcaacatggatgcagctggagatcattattccaagctaattaatgcaggaacagaaaaccaaatacatgttctcactataagtgggagctaaacatgtgggtgcacatggacataaagatgggaacaaatgacactggagactactagagagggagggagtgagagcagcaagggctgaaaaactattaggtactttgctcagtacctgggtggcaggatcaatcctaccccaaacctcagcatcacacagtatacccatgtaatgaacctacacagtgtacccccgaatctaaaagttgaaaatttaaaacaacaaagctgacctggattagtaacaataagcagtttgcagtgaggactgtactgggtaatattgggaatcattaatttaaagatggatacatttcgctggactaaatcaaggcgtgtttctccttttttctggcgtgcacctgctgtgataatcactagattggagtttgcagtgaccaggtaatctgaggaaagattagaataaacaatcgattatgaaagaaaacatctggcatttaagtatacttcctgttcacttcaatcaccacactatgtttaccaaagagtgggttcccttaaatcttctagtatgcctagactactttttaatttcaggaaattagcactaagtttcccttgtacattttttttaataataaaaaaaaaaaaaaaaacgtaagtcatgtgcagtggctcacccctgtaatcccagcactttgggaggtcgaggtgggtccatcaaatgaggttaggagttcaggaccagactggccaacatggcaaaaccccatctctactaaaaatacaaaaattagccaggcacagtggcggatgcctgtagtcccagctacaagggagactgaggcaggagaatcacttgaacatggaggcagtgagccaagatcacaccacgacactccaacctgggtgacagagcgagactccgtttccaaaaacaaaaacctcctaaattgggtacagtagtgcactcctatagtcccagttacttggaggctgagaccaagaggatcacacacgagcccagaagtccaagtccagcctgcaccaacatagcaagacactgtctcaaaaacaaaccaaaacaaaacaaaacaaaaaaaaacaaaaaaaacacctcacctcctaaaataccttttgtattatttagatgaagaggtcaaaatatggattactctggcaagaatatttagagatagatgtggtgtgaacagacctttgaatagcaaattgttggttcattcgtttgttcaaataattatctcccaggtgccaagtgaataaagtacagtagtgaagagcttaggctttggaatcaaacagaactgagttcaaatccctactccatcacttttttttttttttttgagacagagtttcactcttgttgcccaggctagaatgcaatggcacgatcttggctcaccacaacctccacctcccaggttcaagcgattctcctgcctcagcctcctgagtagctggggttacaggcatgcaccaccacgcccggctaatttttatgtttttaatagagacagggtttctgtatgttagtcaggctggtctcgaactcccaacctcaggtgatccacctgccttggcctcccaaagttctgggattacaggcatgagccaccatgcctggtcctatcacttttaattaaccttagttcagaggtacatcatctctaaaatagagttgtgctcaggattaaattatataaagtgcttgggtcaatgtctcacacacaataggcagtcagttcattgtagctgtcatgataactgctgttactgctgctcacaaggaactcagtctggtgccgtgggaaaccttgcaaagtacaacccaaggaatctgaacacgttatgagagtacagagtagggagcaaccagccttatctataaaaactggggaggtcaaaagaaataaagatgattttcttagatacttgttcatgtatattagaatatttatagtatttaactatgacattaacctttgctggagacaatatttggcattttcataaaagggctgccatgttgaagatccattgtctcacccttcagtttgccttcatcaacatccacaaggacaagttcatcactcaaaccctgaaaaacattgttagtccaatgggtgtgagtgtatctcttgattaactggagaatgaaagaaaattcttatattggtgatctatgtctagcttgtgaattatcaaaatcaaaggaaacataataaatgatctcatcattttgtcatgatataaaagtctaaaccagaaaaaatacaaattacaaagaggagcatttcagctcatcatgaggaaaacaaaaacagaaactgcttagtaaatagaacaatctctgaaagtagtgaacaccccgattttcaatttcagctgaggctgcacagtgataaagtagtgcttctgctgaaggaatttctcaccagaccttgagcttcttgagactaggaagtcattcatccccagccatctggtgcttacttatcatccacctggcacagaggagctcagtaaaagttttttgaataaatggtatcttagtccattttctgttccttataacagaatacatgaaactgagtaccttataaagaaaaggaatttatttcttacagttatggaggctgagaagtccaaggtcagggggccgccatatggtgagggctttcttgctggaggagactctgcagagtcccaaggcagcacagggcatcacatggcaaggaggctgcgattgctaaattcaggtctgtcttcctcttcttataaagctaccattcccactcccctgataacccattcatccatagattaatccatggcagagccctcatgacccagtcaactcttaaaggccccacctctcaatactgccacattgaggattaaatttaaacgagttccagaggggacaaacattcaaaccacagcaaatggattaaaatatagggctccttccaactcaaaaatattttagttctataatcagacagttattacctacagaaa

SEQ ID NO: 96989 - DNA, 27778 bp, Homo sapiens
  misc_feature (1)...(27778): n = A,T,C or G
actctccagtccagacaccctcagactctgcgagtgccaccctgtaacagtgaggggaacacgaggggcctggcctcacctccagcctgcaggggagacaggtgtaaacccacatcccgtggtggggccacgagaactcaggtctggggggcactgcggggagatttggtgatgctgagctgattcgaatgaggtgagaaggagcccagcagctgtgtgggggcgtgtcgctggcagaggggaataaaggtgctgaggtgagggtgacagcatcgcccagggctgactggcactgggagctgtgggcttcactccctcttcctgggtgcacgcttgtgctccaaagccaacctctccctgcctctctagggagctgcagtccatggctgaccaggagcaggtgtcaccagccgccatcaagaagaccatcctggacaaggtgaagctggactcccctgcagggaccgctctgtcgccttctggccacaccaagctgctcccccgcagcctggccccagcgggcaaggattgacacgtcctgcctgaccaccatcctgccaccaccttctcttctcttgtcactagggggactagggggtccccaaagtggcccactttctgtggctctgatcagcgcaggggccagccagggacatagccagggaggggccacatcacttcccactggaaatctctgtggtctgcaagtgcttcccagcccagaacaggggtggattccccaacctcaacctcctttcttctctgctcccaaaccatgtcaggaccaccttcctctagagctcgggagcccggagggtcttcacccactcctactccagtatcagctggcacgggctccttcctgagagcaaaggtcaaggaccccctctgtgaaggctcagcagaggtgggatcccacgccccctcccggcccctccctgccctccattcagggagaaacctctccttcccgtgtgagaagggccagagggtccaggcatcccaagtccagcgtgaagggccacagcccctcttggctgccaagcacgcagatcccatggacatttggggaaagggctccttgggctgctggtgaacttctgtggccaccacctcctgctcctgacctccctgggagggtgctatcagttctgtcctggccctttcagttttataagttggtttccagcccccagtgtcctgacttctgtctgccacatgaggagggaggccctgcctgtgtgggagggtggttactgtgggtggaatagtggaggccttcaactgattagacaaggcccgcccacatcttggagggcatctgccttactgattaaaatgtcaatgtaatctaatgcaaaagtctacagattcaaatgttagtctcatgcaacccctccccacccctgccagaaacagaataatgtttgaccaaacactcaggcaccctgtagcccagtcaagtggacacatacaatcacccattccaggaggcccacaggattggaggagctgctgagggttgggttacaagggccaggggtgctctggttccttcaaccaacacatagttactgagtatggagacagcaagatgaggcccccttccctccagaggcagtgcacactgtgtgaggggagctgggctgggtagcagcagggtgtcagggtgtgcaggggggtcccaggtgcgccaggagtcagggtatgcagggggctccagggtgtgcaggggttaggagagctgagcaactttctggaacttatcccgggaactcatttccagagaccccataggctcactgcagaaccatgcttggtatatatggggcgtgtagagggcgcttggggaacagaatcctgcgtttcccccgagggagggaagacatgcaggggaacagggaggaaacgctgcggcagggcagatggcatgggtacatcctccaccgccactctccccctggcaagagtcctggccactccccataaaacgagtacccaccacacccaggcacaaaggggacggtaggtggggtgagtccctgctgtctggctgagatctggcagtgcaggagctaagcgggggacacagatggacggtgctgggccgggagtccctgcaggctcccctgaaggccccctcctgtatgggtggatgtgggcatcagggcgggtggggaatgcccttgtgtcagggctgtgagcaatagaataaccccctgccccagcaaagtgcctggcagtgctgggagaccctggcaactcctcccacctgggcagaggtgcccccagaagagattgtcccacaggccacacgcctgtcccaggaccaaagctgccccgaccattcccctcaaagccagtttccctgctagcgcccattctcaggtgctgacgcagagcaagacgaggggcgcggggctgccaaaggtgcttctggtccggggacacaagggaagccagcaggcgacgcgggtttcaagtgaggcagactggtcttgggctccagaggaagcacagggaggtgaggaggtgtgtggggggctgcagacgggctttgcaaggaggcgtttgcttcagcaggcgggccctaggagctttcccactgtgggttcctgattaagcagaggccagaggcaggtagagccagagtccacaggaggctcctgacgtgcgtgagaagtctggggaggtaggtgaggcaggctgtggggaggtggacacccaggaagccacagagcgtgaggacgggcccaccccaagtagcaacatgttttatgtgggcctcagcaggtcaaggagggagatggtgccgggggccaaggacccaaggatcctgccaagaagcgtcgaaacgctgccaggcagaggaaccctacagggggcccctgggggctggccagatggtgctttccctgctcctgtcaccagcagctctgacacctctcagtcctggaaagccccctccaaaaatgaagcggtttggagtgagtccccagcaggccaggtgggccctggaggaggagctgcccgcctctgcttggctcagcttctgcccccatttatttttcattttcctttttttttagagaggttctctgtcgcccaggctggagtgcagtggtatgatcacagctcactgcagcctgcaacccctgggcacaagcaatcctcccacgtcagcctcctgaatagctgggacaacaggtgtgcaccaccatgcccagctttttttttttttttttcttgtagcgatagggtctctatgttaccaatgctggtctcaaactcccgggctcaagcgattctcccactgcctcccaaagtgctgggattataggcttgagacactgcacccggcctgccgcagtttcttggttggaattgccctgactccagcttgccagctggggcccttgccctgcccaattctgccacgcctcttcagtgcccggctgacccctgtccatggtacttgtgcaggacaggctcagactctggaaccagtgggtcagcagcccctggccaggcagagatgggcaatgtccaccctgggagggccctgcctggagaccagggagagcagggctggactggacccgtctgggtgtggacgctagcacctccctcccggcagcatctggctgagatctgctgctctcaggaggaaccgatggggtcttaaggtcagtcccacagaagctgcagcctggggcgggaggatgccggggaagtgcctgcggggctcagtcccacagaaggtgcagcctggggcgggaggatgccggggaggtgcctgcggggctcagtcccacagaagctgcagcctggggcgggagggtgcccgggaggtgcctgcgggggccagtcccacagaaggtgcagcctggggcgggaggatgcccgggaggtgcctgcgggaggaggcatccagctgtgacgggaagtgagctcctggaggtgcagagaagtccaaacagggagccaggcctcaaggccgcacttaaagccggtcgtggagatgagtgtgcggagtgagagggatgcttggaaacctgtgggcctctctcgcagtatccctctcagtacagtagcctttcgcggttctggtggcctcatggtttggcccaagcatggctgcaccactgtgtccagggacaagtgtcctgggctctccgtggggagctggccaggagccgctggggaggtgaggagatcttcgtgcagagccagtgccagccctcactgaccacggaacaccttcagctctctaggaggacagggagacaggtcctaggggtttggcttgggctgtttccacgtggcacctcccctccctcgatactctttctacaagccaccgtatgctactctgcaggtgcctgggaccccacccaccccaagaagattctggggtgaggggcagcaaaggagcctgggcagctccctgagtgtcctccccagcccgtcctgcccatctctatgacagtgcccagggaggggaggactgaggctccttcccaggagaagacagcaccgcagtgaggacgattcataaatccgttccaaattcgcgcggaggtgcaaatgagagcgggctcgaccctgtgaggaggagttggggtgtgggagtgagtggggacagcctggtgagcgtctgcccgcggggtgggggctgccagccccagggccaatcacccctggctcctgacggcaccgtggctccagctcccgctgtgtggcacggagggcgggtcctgaggagactcgggggcccgccaggtccccgctgtgtggacctagccctcaccgcccagcaatgcacgacttcaccctcccgcggagcaggatgcccagcggctcagggcgccctcccctcgccagcccagtgtggtgtggtaggatgaggacgcgagcagggaggagaggcaggagacggagctgcactcctggcctcagggccccgtgtgctgttttgtacactaaggttgaggcctcggaagccacgccaggaccatatcatgcccctagagcctgtgagactcgggctgtgtccagagcagggggagcaggtccccgacgactaaggacaccaccgtaagaaccacacgcagccccacagcgcacacggcgacaacgtgctgtggggctcggaggagttcctggggtctggcagggacaggcggagggacgcttctgagccttacacctcacggcttcgggactttggggccggcctgttcatggacggagcccaggaggaccccacagcccgtccccgccccttcctccccgctcacctgctggcggggcggccacccttcccctcccaggattcacagctgcgaagggaagagggtggaggagaaagtccagacacgggatcccccgtttatcttcctcccgagtcctcgccccctaccgctgggcatctccaacaagcagcgaagtctcccccgggcggagctctgggtacacgtggcgcaggaagggcctgggcagctcggggtctgctgcgcgggcggggatcgcccctcgctgctgggagctgccaggccgtccccgccccgcgccgctccgggacccccgagttggaatcgcggggccccggcggcgccgtcctgacgcaagagcgcctctgcctggcagggcccaggccggcactcgagggggcgcacgcagagcctgccctaggctgagcactcgagctggaaaacgccgccggcgtccgcgagcttggacaggggccctggacggcgggcgcaggagccaggcgaggcaggctccggctgcaggacgccgggggctgggggtggagacctggcgctttggccgtgcgcccaggcccgcccgtgagaccccgccaggcgctagagcagccagtgttgccagggacgacggcgcgcgggttgcgcatgcgcagtttgccctcccgccgccgcgccttcccctttaagcgccggccggcgcgtcgccgcttcatgaatggagcccacgtgaccaaacatcatgtgacgtctgtggagcggcggcggcggcggcgagatcccgagcctggtccggcccggccttcccagtgcgctcggcccggcccgcacagcgcgcaggtcctccgagcgatggagtcggagccctcgcgccggtcactgctgcgcgcggactcggagagcgcgtagcccgaccgcgcccggcatcggacggacggaggaagctgtagtgagtgatgctccgcagcgggcacagtcggtgggccggagcggcgactgcggggggccgacgggagtcgtcagcacgcctcctgcaacactaggcgaccgattggagaacagacgggaacctgtcattctgcgctctgagcgcagcgtgctcgagggcgatgctacagttgcgcacannnnnnnnnnnnnnnnnnnnnnnnnnnnnnnnnnnnnnnnnnnnnnnnnnnnnnnnnnnnnnnnnnnnnnnnnnnnnnnnnnnnnnnnnnnnnnnnnnnnnnnnnnnnnnnnnnnnnnnnnnnnnnnnnnnnnnnnnnnnnnnnnnnnnnnnnnnnnnnnnnnnnnnnnnnnnnnnnnnnnnnnnnnnnnnnnnnnnnnnnnnnnnnnnnnnnnnnnnnnnnnnnnnnnnnnnnnnnnnnnnnnnnnnnnnnnnnnnnnnnnnnnnnnnnnnnnnnnnnnnnggaagaccctgcccctggctggggctcgggttccgtcagtcgcgtgccagagcccggagggagacttgctgagtcatcagcgtgaggtcactcggtgctcaagctgataccggaggggattcgagcgaggggcctcggggactaaaaggccgccagcgggaggtgggagggagccgtggggatgtgggagggggccaggcccggcgccttggggtgcctgtttaagtgagcgccgagcgatccagttgaaggcaggggtgcttgaagaggaagtgggggtggctcgctgcaggtgttctcccggggtcaaaggtgaagccccgggcggtccaccccttcccaggcggctcttttccggcagctggtcctggtcccaagtctggagcagttttccaaactgggaaatagttccctgagtgagggaggggaggagcttcggtgggccgagctagccaaaggggaagtcggctttccctgggactggcctggttggacagcccctggccagagatcgaggtcctgggagaaagaggggtgtgtgtaccaagccctgggtgacagtgggctgggcagggaggaagcaggggcagctctaccaggaaacggcaaaggggaggaagcagcccagcctctctccccagttggccctggagtctgggttgagactgtaggtggtgggagcttcagggtgcctagccttggggtgcagcagatgggctggtgtggatggcacagggtggcagaacgcagcacccagccaccctaaagttgtcgctacctgaagtggggtctcagcgttgtgtgaagttagcaaagggagtggccctgttgggtgtctggcctggcagcccaggacgcttagaaagtggcagcttgggagtgatgtggccagagccacctttccttgggtatgtggagattcacgaaggttgacttcctttgcccaggagttcatttcatggctgggttaggctactttgtggtttgccctcagggatgccccccgccccccgccacacacacacacacacacacacacacacaggtccattctcagtgagcaccccccacacatacacacagaacacaggtccactctcagtgagccccggggcttatagattccagatgtttcaatgttttagctgaccgttggcctggagtttgatgccctgggaaaattttggggtcctggagggacatttatgtacatctttttttttttttttttttgagacggagtctcactcttttgcccaggctggagtgcagtggcgcgatctcagctcactgcaagctctgcctcccaggttcacgccgttctcctgcctcagcctcccgagtagctgggactacaggcgcccaccacgacgcccggctatttttttgtatttttagtagagacggggtttcaccgtgttagccaggatggtctcgatctcctgacctcgtaatccacccacctcggcctcccaaagtgttgggattacaggtgtgagccaccgcgcggcccatttatgtacatcttctcagtcacttatgcatcagtggaaactaagttttaggttctgttcaaagagtgactttcaggagctgagagcttatggagcagaggccatgactgccggggagtttcggccgctgggctttgcagccaggtggggctgtctgtgttcaggcacgggagtttctactttagccaaaggagacggagctcccaaatctccctccctttcctggctctcagtgtgaatgggtggcctaggtaccctcgcaggttgcggagccgtgaccatctgtgcctcctgcgtgaggtgggcttattagcctctgggagcagagggtgcatgacaggccccagctctgcccagccttgagggctggaggagggcgggggcagcttctcctcagtccagctcctgggatccctgcatggtccctctcagcccaggtccagaggccaggccaggagcctggaacgcactggctgtgctcagggctgcccctcccccaccccccggcgcacctttgataggaggcgatggcttgcacttgtgctgagttcaggccttctgcggagggcaaaatctgtcgaggaggcacttttccgtgtgatctcttcaggaagtcaccactgtcattgtgcttagcagcaggggtgggggcgatgggggtgggagaagctggtgccagggcagtgtctctgcaccctgacttgcactcaaggctggggggcccctccatgcttggctgagggcctgtctcctggggcagtgttgtgccggacgtgtaggaaagggctcctgtgggccttctgacctccagctcaggtcttccccatcctttatctggaagaatccagtggctggagcctcgggaccttgcctctgagctggcttggctgtggggaggggtctctggcctcccctccctgctctgtgcttgcagcctcacctcctggtcccaggctgggtgaggtggagtcttgagcctggtgaggatgtgtgcatccgcctggccacacttcagctcccctgatgagagtaagaagccccccagcccataatttcctgaagtgatmctagctcctctggaggagtctcccatctgtctgcatcaaacctggaaagtgggggatggagcatgaggcgggggtccatgcccaagggtctggtgggagctgggctgagctgggaatcccagaaacatccttagcaagaaagtgagagcagagtgctggagggaccccgagtggggaagagttggttgttaagtccggccaccccagcacttttgtttttgctccctggccctgtgggcactcacccggggcagggaccagagagcaggctgcagctcggaggggctgactccgccagccttcacgttgggcaggcccggggtggctcactgtgggagcccttgtgaaataccctggatggggtggggcaggggctgcttcctgcaacccaaagccacaggatggttactccatcagtggaggaggccgactgggaggtctagaggggcctcgggccaggctcctcccagctgatggcctgccacctggaaggtgggggaactccctggtcagtcctgccaacagaccagagctagatggacggcccacccccagcttttcaaagttaggaggctgggagactcggggttccctgtagcctcctctctggccaggtcccccgtggggcccctgtgcacccagggagcagggggctttgtccgaggccggctcaggggaggtggctgtagaaggtaggaccctggaagatgcacacacagggtcactggctggccctcacctgctattggccaggctgggggctgcggctctcgtggggcgctgttggctggcgggccagggagtgcgggcgcggcggggaggcagaggcaatgtgctgagtcagcgtgactcgccaggaacagccgcgctctgggcagtgccggggttatttttaaagctcccggcttccttctaggcctgcctctcccgcgtcttattccttctaatctctccccygccccttgtcttgcgcctgccttcctaacagccttcagttccccttctcccgtcagaccttcctgacctcccacctggttctctaggggcagggtggacaggaagcagctcagcccagcctgggagaggccaagggctgcctcctatcaggtattgggggctgggcacctggacagcaggctggggcgggctgtgcggcaagggctcttgtgaactgggccgggggcggggggggggggggtgcggcgagggtggtctccagggtactgacctgctccgtgtcttgcagagagcgcctgctcgctgtgcccccgggttatgacgacccccaataaaggaaacaaggccttgaaggtgagtgggcagggacaggagcctgtgggctggggtcggggggcacagtgggcgtgcccgcttggcctgtgaccacctgcactgtgccccaggtgaagcgggagccgggtgagaatggcaccagcctgacggatgaggagctggtgaccatgtcggtgcgggagctgaaccagcacctgcggggcctgtccaaggaggagatcgtccagctgaagcagcgccggcgcacgctcaagaaccgcggctacgctgccagctgycgcgtgaagcgggtgacgcagaaggaggagctggagaagcagaaggcggagctgcagcaggaggtggagaagctggcctcagagaacgccagcatgaagctggagctcgacgcgctgcgctccaagtacgaggcgctgcagaccttcgcccggacggtggcccgcagccccgtggcgccagcccggggcccccttgccgccggcctggggcccctcgtcccaggcaaggtggccgccaccagcgtcatcacaatagtaaagtccaagacggatgcccgatcgtagggacgcgcgtctgmccaggcgggtctttgcggggccactaggcacatggcgaatttggctgccctgtccctctgtttccttctcttctctttcctccctctcttccccacccttctctcttccctgcaaagcacaacctgtaccccaggggcgccgggctgagcccctttgatctcgtcattgtcgtcrtgtgttttgtatgttgggattggtcagttcggcggtgacgtggggtcgccccaaccccttttgtaccagggccatgcaggcttggagtccagagttggtgctgtgggaacggactagagagagttgcgggagagagaaggagcaggcacgctgggcctcgcgtgtccccgagcagtgagggtcccagtgttccctccactcccgagtggccacaggctcgcgggctgggaaggattcactctctttagccccaggggagcagctcagcttagcccagcatgaagagatgggctctgctctgagagtagggcgggcttgaaggccctgatgggtggaccaccagcctgggcgcagtggtgctgggggcgtgcagctgggcccaggggctgtgcactcaggcctgacccgttgcactgaacaagaccaaatckctggttgtgcgcttaacgtgagggtgggtccagtgtgccctgcgatgggtcccgtgtcactgtttacatgacctatttgtgtggttatatagccctttatttaaaagagagaagttcsttttacaaagttattaaattaattatatgtttaaaagttaaagaaaaaagagytgcagagtatttataaaactgtcttttagaaaaaaaacaagcaagaagaccatttgaccatatgaatggaaaagggaagaaagtataatagaaaytttgctagttaaaaaaaaaaraaaaaaaaagaaaaaaaatccctttcttgtaaacttacggacacctctttgtggctgttggagtttagtttttatatacacagagttatcagacattatttataaaacttagtttaaaaaaaagacaaaaaaaaaaaagccaagccgtgagccgaccagaaggccgtcctctttgatatcttttgcaattgtaccgaaagtgacttactcctctgcccttcctgcttccgtctcttgccggtgccgtggtgtcgtccgtgcctggtgaggttttgtgcagcggtaaagtgctggtgcttctggtgacctttgacctgtgggtgtcacttcttgtgtctgttttcccgtgttcgttttttgggtttagttgtgcttttgcttctgctggcttgctggacctgggctggggtgccaagtggcgcctgctgcgtcagagctcaaggaatctgtgcccaccaccagctcctggtccgtaggaggtgagacatggggttctgtcatgcccccctccactgagccttggctacatctgtgtctagggcttgggctgatctagtggcggggtaggtgaaactggggtcccttggggcgccccacgctgcttccacacccaccacctctggccttgggtggtggcattacagggatgagggagtcactgtgggtggccacagggctatggccaagcgttccctggccgtcttcctctggcctcagctttgttcctataggctgcccgcgccgtgggctgcaggtctcgccgcccgcttgatccctgaggtgtttccatgctgcgggtggtgcttccaggcagagtgggtgggggcccacygggcaccgccctttcttccttgtccctgcctcactctgagagccttgggggtctccaccagtgcagacaagggctacagtctccagggccgggtcttgtccctcttctccgctggtccacgctggcagctcttggcttcgggcctgccttctgcctccctttgggatctgtgtcttccagggatcagctgcttggcttctgctggaggtgcctccctgtgggggcgcagcctgcctcctgctctcagttcctcgccagaggctgctgcccttcctggctgggctcaggaggctccttgtaggcatatgatggggagggggtgcccctacccacctccaagaggctacagccctgtgtctggccatgtgagccctggcctttcaccgggttgctggtttcttttctgtggggcccagacttctgtaaagcacacagatgtgggtaagatgaaaaactgtggcccaacagggcttaaccctatggatggtgggatttttatccaatagtttggcctggtgtgcccacaggatgggaacagggaggcaccatcaacacttgtcatgttaatgagcttttctttgctcgaggtgttcakagacaagtcctgtgtctacctgcgtcagcctgaaaatggaaatattggctgttgactcttgtcatttagtgacttcatccccctcccctcagtctgatcttgtctaagtagaatccaggcgttagttggaatcatatcataagtatccatgaagaaaacgtcatgatctgcctcggagtggggagaaacaggccctccttgtccttgtgcagcccccacttttgtcctggctgtgggtggccatccattttgagcacctctgccaggctgcagacctggaggcgaagggagtgtggaagaggagggtgtaagggtcgacgcgtgctgaatgggaggtgcaggtcctcggtgcgttggcagaagaggcttctggagtttcgaggccatacctcctttcaagagctttggatttggggcgacttccctgggtctaggggagtgttcctgtcccctgtcaggtcagccctgcggagccactccacccctcttccccttcccctggatttcctgacatagatggtgtgttcatgtgcaggtgtgagtgtgctgtccttctgatctctgttgatcccgctttcctactgagagggtggtggagagggtggtggtctcttctcacctcagtttttctgacacagcgaatcgagggctttggccaaggccaggtctctcaaacttgtccgccaagtaaaccatgatatatgtcttcccttccaccttaactttgccccaactcctcttttatcctaacatggacgctcagatttcagaggaatacccagcagggacaggtcagctctcaccaggagagtgaggcccctggctgctgctcggggtggcactggtgttgctggctcagctcttggtgcatgtttcagatatgtgtgtacacttctgactggtgatcagggccyggcccacggccctgagcggctgcagcctgctttgggacgatggtcaggtcccatgttgtccctgctgcctccctctggagtggccacttggccaaagygcccatccacatctggaaagtcggagccgcagcctgctgcacygtttccgctctgggatcttgtgagttacttttttaggctgtggtttggtgaaaggaaccaacacattaacgatttttcccccagaagccactgaataattctttttggtgtatttttgccttcctgttggctgtctggccttggagcaggtcgggagagtagagtacataatcagtgccacacagaggcagggcgtgtctgagagactaatgcctgtcctgcctctggcctgtgtcctgggtgtgtaccatacctgctgggccagtcccacacatttccaccctgcccctggagcagcagctttgataccatgggtgtcccttgagtctgagctagagtgtgtccccgataaactgtgagacctccctgttcttggtgaccccagttgggctttggcccctccagcaaccttgtgtcccagccctgcccttcttcccaccccctcaatctgctagtccctgaagcctttaaccaaacgggagtgggcacagaaagccttctcctggcaacaggacaagggctgcccgcgtgtccagccctgttgctctcctggcgctgagaggtgggtccaagcagagttgatcagtccctgcctgccctgcctaggtctagccaggggaggttgtgtgtgtgggagaagaccccgggatctgctggggtgggatggaggttattaaagatctaagtgaggaggggctggggtttggatgcggggtgaggcccgagcgctcacacttcgtgtagggcgggcaggggcctgacctcttgcagggcagtggccttggtgccctacccctgccctgcgcagtatttattgctaaattattgtccaggaggggcagcactgggcctggccccccgggtatttattgctgtacatagtgtatgtttgtgatatataaggttttctttattttgtatatgatcaataaaccttttaaagagactggcaggtgcttctttggggcgacgcggcgggcggagccggaaggggtgggtgggggcggggcccatcttgcgcatgcgccctgagcgcggcctgccgtgtgaggcggaagcggaagagcaggtctccaggggagcgatggcagccgggggtctgagccgctccgagcgcaaagcggcggagcgggtccggaggttgcgggaggagcagcagagggagcgcctccgccaggtacgccgccgccgctccccggcccggccatgcccggcccgcgccgccgctcaccgtccgcctgcccgcaggtgtcgcgcatcctgaggaaggcggcggcggagcgcagcgccgaggagggccggctgctggccgagagcgcggacctggtaacggagctgcagggccggagccggcggcgcgagggcctgaagcggcggcaggaggaggcgagttccgcgtgcggcgcgcgggcgcccccggtttcgggagcagctggggcgacgggcggtcccgggtggggcggcccggggcggtgaccaccctggcgtcttggcaggtgtgcgacgacccggaggagctgcgggggaaggtccgggagctggccagcgccgtccggaacgccaaatacttggtcgtctacacaggcgcgggaatcagcacggtagggagggaggcggaggcgtaccccaggacggagtatgagctccagtaatcgcgaaaaactcgcctttaaagcagctctaaggttttttctcttaaagaaacgaaatgaccaaaacttacctaaggtaaacgctttttaaacgcttggcctctgtgttacagccagttaaaaaaaacaaggagtagagatacgaatggggtgtagtagccgactgctcgcaggcacccccaggttatgtggacagagctaagcccaaagttgtgattttccactctgttctgtccatgtcgagggaagataagtagaaagtgacacagtaagagccagaatacaccaggtgaaggagagaattgcattgtgttttgagaagtttcactgacaagttatcctgggctgtgggacatcactagctttgaaagtgtagctggcacctcgtccatctaatttgatgggtgtgtgtggggtgttgggcacgcgtcggcctagcagatctgaacccaggtgatttctgttctcaggaagcttttaggtgacaaggatcaggcatgtgaacaaataaccatactgtaaagctggctgtgctgggtcgctagagcaaactcagacacacactctgcgctcttggagttgggaaacccacctgcgttggctttttgtgggaggtggccttgattgggccttgaaggatgggtgagatttacagaaggttggaatgaggcactccaagcaaagaacagcagaggctcagcagcaagaatgcaaaaagggagttcactactgactcaaatacccggagccctggggtttagtctcctccctccacaagtcacatgtaaaagtccagtcatgctgggcgcggtggctcatgcctataatcctagcactttgggaggccgaggtgggcggatcatgaggtcagtagttcaagaacaacctggccaacacggtgaaaccctgtctctactaaaaatacaaaaattagtcgggcatggtggygggcacctgcaatcccagctactcgagaggctgaggcaggagaatcacttgaaactggaaggcggaggttgcagtgagccgagatcatgccactgcattccagcctgggcgaaagagctaaactccgtctctcaaaaaaaaaaaaaaaaaaaaaagtccagtcatgtaattatgtaacagtcacgtgacctgttatggaacttccaatggcaactaaaagcacatgcagctagtggatttcatcggagtgtttgaggttcccgtcttgaatgtgactgtcggaactactgtccgggggggtggtgcatttttctgagtttaagcaggagtcgggagtccccaaaagggaacacaagacaccttgatcctggcatatcttgtgtgccctctgtgggcctcagtttgtttcacaggattgaaaacctgggaagttagatgctcatctcatctgaagaagttgttctgcctttgttaaggtggagcgggaatagtcagcactgggacatgagaatggacagtcgcctggacccacctagggattcaccatttgctaaatgtgtgagctgtgggctcggccctgggggcactttaggaacatgactagtcttcccctgcagtgtggaggacacatgtgccacagagcccagctttgtgctcggtgccagagaggcttccggaggcaggcagggctgcgtgcagcctggaaggatgagccaggccaggcgggaaacggaagtccaggtagaagggaggagccgaattggggtacactccatatgggctcaggcaggtcagcctgtggaatgaatagaggccaacatgcaggccagcccggaatgcggcaggagtgacagtggctttccgtttctgggaattctgccagtacctacagtggtgccttttgacttggcttaccttttttctcgacatgcaggcagcgtctatcccagactaccggggccctaatggagtgtggacactgcttcagaaagggagaagcgttaggtaagcgggccaggcayggcctcccacataggctgggcagcggcagcacgggcctgagctccagctctcctcaccttgccttcctttctgcctggcagtgctgccgacctgagcgaggccgagccaaccctcacccacatgagcatcacccgtctgcatgagcagaagctggtaagagccctgggtggctggtacacttgccagggaccaggcagagcaccttggtgcccagtgggcaactaactgcacccgccctctgtctgccagttgactcccatgatgagcacccaccaagcgggttaggccgcgggtttgatcctcctgtgcttgactctccaggacagaaggggagctccccctctgaaccatcccatccgcagccagcctcagcctcagagctgctggtggcctttcccctttgtgattcccttgcatttttctgtggacctcagaagccatcctagtcacaggggaggcttataggacatctctggggaccttctgctgaacaccctcaaccaatggggtgtagtggttgatctgcctaggtccccaggracctgaaatgtcatgacccaagagagcatggatctggggcagagtggcccttgccaaaccccgagccacttcccaaccttgccgggacggtgcaacctcttgccctcccagccactccaggtgcatcagggctggaggaaggacagcccctccccaccacaggccctcttgactcctggtggttggacctgttgtgtgttttactttctaaggctctctggggggacggagctgcccctggttttgggagccatcggcggggctcagaacagcctcgctgtggccgggtactgacctccccaccaccactggcagccatccctccccttgccacccgttctgccttccaggtgcagcatgtggtgtctcagaactgtgacgggctccacctgaggagtgggctgccgcgcacggccatctccgagctccacgggaacatgtacattgaagtgagcagtcctgcagggacccagggtctccatgggcaggcgggtcccactcactgtgccctcttgcctctaggtctgtacctcctgcgttcccaacagggagtacgtgcgggtgttcgatgtgacggagcgcactgccctccacagacaccagacaggccggacctgccacaagtgtgggacccagctgcgggacaccattgtgcactttggggagagggggacgttggggcagcctytgaactgggaagcggcgaccgaggctgccagcagagcagacaccatcctgtgtctagggtccagcctgaaggtacgtgccgatgacacaatgagtgaaccgagcccctgccygcccgagggtgtccagctctgcggcccagcactgtacagacttgtcccttgtgtgtgtgcggtgtctgtctgtctgcttccacaggttctaaagaagtacccacgcctctggtgcatgaccaagccccctagccggcggccgaagctttacatcgtgaacctgcaggtaactcgggtgctgagagccacgtccttagatctgggtcttagaacgcacagccagagacaccccacacccatgcaccagggcggtctgatagggcccccgtgggtgctcagggagcaccgactgagcccgtaggggccaaggctgacaggccaccgggaagggttgggctgctgttactctcactcggctttccctgtcctcagtggaccccgaaggatgactgggctgccctgaagctacatgggaagtgtgatgacgtcatgcggctcctcatggccgagctgggcttggagatccccgcctatagcaggtgagtgagccgctgcagcagcctgcttccccgcacctctgtgtgctgggccttgtctgtcttctctcgtgagctgagtgtggaggaagctctgaggtgtttgcagtggtgcctgaggcatgactgaagcgtggtggtctccagagggcctgacctcggtggttggcggagaccctgcgtgtgccactcctgccctggctgatgtggcacacacaatccccgcggggagagggattctgcccgcgtgctcctgctccaggcctccccgtggagctctccgagatgcctggtgggaagcatctggaggggacgagcactcggcagctctggtcagacagaatctgtgtgcttggttttgggagttggcgtactttgggaaagcttaaacaaactgtgccttaatacagaatttgtgataatttagacttggtgtatgtattgagtaaaaagtttacactctctttctctgtgaattttcagggtcttataggggaaatcaataacttcttttaatcaaagggttcaagaaattaaggatcccttcaccttctgggcctggcacttcttgtatgttatgtgtgtggtgttctgtgatgtgggctatcgtgtactgtattttttttttacattaacttagctcattttccttatcagtgcgtatctgtatcttaagttatgatctgtggttctgcatctccgtcagacacatgctttcttcacggggtcgtctgtaggccacgcctccctagtcagctgggaagrgggagagggtctggtccacctgccccagcggtacaagtggaaggtggggcccagagttgctagtgactcatccctggagacggaggcagccctggggccactgctgccccaccctgtgtgtgcacgccgctcagtggtggacaaggacacggagttttgaggagaccgagctagtgtgggtgccgacctttgagtcaccacctaagaggtgacctctcccacatccgttctgcagcttggtaacaatgaagctgccgccaaccagagccccgccgcagttgacacgggagggaaggggatgggaaggcagggaccgcagacagctttcccgagctggggcaggtgtgactgcgagaggctcccaggcccgcctgatgccgctttccctttttggcaggtggcaggatcccattttctcactggcgactcccctgcgtgctggtgaagaaggcagccacagtcggaagtcgctgtgcagaagcagagaggaggccccgcctggggaccggggtgcaccgcttagctcggcccccatcctagggggctggtttggcaggggctgcacaaaacgcacaaaaaggaagaaagtgacgtaatcacgtgctcgatgaagaacagttggcactttgcagatggccagtgtcacggtgarggctgggttgcccccacgggtctagggagaacgaactctttggggatgacattttcaccgtgacatttttagccatttgtccttgaggaagccccttgcactgctgcggttgtaccctgatacggcctggccatcgaggacacctgcccatccggcctctgtgtcaagaggtggcagccgcacctttctgtgagaacggaactcgggttatttcagccccggcctgcagagtggaagcgcccagcggcctttcctcgctcaccaggccagtctcagggcctcaccgtatttctactactacttaatgaaaaagtgtgaactttatagaatcctctctgtactggatgtgcggcagaggggtggctccgagcctcggctctatgcagacctttttatttctattaaacgtttctgcactggcttccggtgtccccgagtggtcggcgcgggctccccgggctcaggtctgccgcctggcagctcggtcgtggcttaaaactcccttggttggacaggggacaactgtagattattgtgccaaaaaataagaaaaaaaactcccctggttgggacagcgccccgtggaggttcccggaggtggcggcggtgggacggtccccacgccgcactgccccgccagccgagcgccaggtgtgggcggtgcggagaggccaggtgtgggtcggggggcggggctcggaaagcgcggcacacgccattggctgtgcgtttggagggggcgggactctgtcaggggctcacgccattggccgtgcgcggaggtgcggtggggcgcggccttcggggggtggggctcggggcggagggcgggaggcggggcgggggaagcgggggctgggctcgggccgagcgccgacccattggccgtgcgcagcgggtgaggcccgcgtgacggccgctgagcgtgcgctggcggggcgggcggcggcgctcggagtcgccgggagctgccaggctgctccgcgcgccgctgcggggccatgatccggaacgggcgcggggctgcaggcggcgcagagcagccgggcccggggggcaggcgcgccgtgagggtgtggtgcgatggctggtgagcgcggggnnnnnnnnnnnnnnnnnnnnnnnnnnnnnnnnnnnnnnnnnnnnnnnnnnnnnnnnnnnnnnnnnnnnnnnnnnnnnnnnnnnnnnnnnnnnnnnnnnnnnnnnnnnnnnnnnnnnnnnnnnnnnnnnnnnnnnnnnnnnnnnnnnnnnnnnnnnnnnnnnnnnnnnnnnnnnnnnnnnnnnnnnnnnnnnnnnnnnnnnnnnnnnnnnnnnnnnnnnnncagaggctccgcgccctgccgtgggcgaccccgtctacctctggcggaggccccgcccggtcacgccgacctctccggtgcagccaccgcgctgagatctggagccacggcctccctgcttctccgtaaccaccagcaaccagcttgcccggctccggtccaggggttcccctggcctccgggcgagcgtccctgtaggtgggcatcgggtgcgacctgcctgtccgggacccgcggtgaagcccgcgggctcccgggtcctcctccgcggggctagaatgcgatcggtcttccctggccagtcagagggcattgttttaagaaaagtttcgggttgtcaacaagtgaaaggaagacgaccgttactgataatttgctacctctgaccctttcacgtgcctgccggatggaatccaggaagcaagcgcctctatctgattagcccttcccaggagagcaagcagggccttgtcttctgtgtccgagtcacctctgggaaaaggaatgtggctttgtgtcagtggactttgaccttgccctgaccaggccccagccccattccagactgtgctcccctggcccagcctctgccccctcctcccctccagcctgtccagtgggtacatgggcccgccagattttacccagcatgtctgccgggctccgcgcactgtggcaggggtgctgggaggaagcagtggtgtgcagtggagcaactctgtgcactgtgtgggctgccagggtcacacctctccctggagaggcagggacagctttgtccacttgaggggatgggccgctgctgtaaagaagtggcgaagaagccagggcagcgaggcccagttggtggcagggctgtgtagctttgggcttgagagttcacgtgttagcagacctagatttgtgaatgaaaactctcgagccaggtggcaaggcagtggctgttcacccttagcgttaagcctgctgagcttgaggccgtaagggaggagagacaggattttcagggccagtgattcccagggttttattttgtggttggatttgttttgggttagccccagggactgtttgcttgtctcaaggtagtctaggatccaaccctaccccaagagttaacatcggcttattttaaagtgactgcccagggcagttgatatttggtgaggggataggacacgtggccctgcagctttcagtgggctccagtctgtcctgcacccaccagtcctctagacccagccaggccttgacatctctgcccctgccaccctttctagatctggcacaggggtcccaccgtcaggcccaggagccagtggggtggagagctgagcacctacatcctccgaatcccagtcccagggctcccagcagcagcttctcagagcgcttcctaaggagtcctcagaggagcaaagctctgcccctaacccacagggacacctggtccccacccttggcacagggaccacccactctctctgtctccacagctatgacatggtgcattacggccactccaaccagctgcgccaggcacgggccatgggtgactacctcatcgtaggcgtgcacaccgatggtaagcacagatggcctcgcccacccgcggccccccagccctcctgtgggttgcgactgttgactgaaagcctgcaggcctggggccaccttgccagggcacagctgtaggggagggcactgtaggctcacccagcccagccccagctgaggatggcctaatgcctttcccatcttgcatttcctgtcccagctaaagagaaggggcacctgctccccaccactgccagcgaggctcccaagccttcaggggctgagcacctgctcgtcagaaggaatctctgcctttgcctgagaccctcgcagggaagagagccacccagttggccagcactagtgggctaagggccagggtagagagacagcctgcccccaccggccctcttgtgtggctacagctgggtgctgggaaggggcctcctactggaggggccgggtgggctggggtccccagtctccccgttgtccttttcctagaggagatcgccaagcacaaggggcccccggtgttcactcaggaggagagatacaagatggtgcaggccatcaaatgggtggacgaggtggtgccagcggctccctacgtcactacactagagaccctggacaaatacaactgtgacttctgtgttcacggcagtgagtggcggggctgggacctgggggcctggggacatcaggtggctcaggatcagatctgctggtgggacatccgggaacagggggcctccgccctttgaggatctgagacatttccgggcccccacctagaaatgggcacgcggacactagggcaggccaggggccgagagggtcctgggctctgaaggttctggtggctttgggttaaggatccttgtccttgtgtgtcactgcttagatgacatcaccctgactgtagatggccgggacacctatgaggaagtaaagcaggctgggaggtacaggtgagtctccaccgcgggcctggccatccagggagctggacacggggctccctcctggctcgtgctttgctatttaccgggagcccgtgaggggagcgtccaggccctgggccatgttcctcacgcccaggactgggaactcgagggatggaggtgccattgtggggtggcctggaggcccttgccatttggtgctgcagacccatggccccagggctccaaaggcacagctttgtgaggtggcagctgttgagctcgggggacgtggctggcactgctggggagctggcactatatctgaattaccagacgtcagggacatgaggccagtggctcccgcatgagatgctgcagctgagaattcactcagctgcagatgctcagcgggcaggacgtgggtgtgagggaggcaggaagcagagctgctaccccagtgcccatcctctccctggcattgcacacctgggccccagcaagggtccttttctgtgctcctgccactcccttcagtcaataaaagcgtggaggccttccccatgttcccaacccaggttttctgttatggccttgcacaggaaggggaccctcagtctttggggcagccgtgggttctgccacagcagggctgctagtgtccctagtggtggtagcaggaggcagagccttgcgagtgtcccaggatgagaccccactcccactgtgtcccccagagaatgcaagcgcacgcaaggggtgtccaccacagacctcgtgggccgcatgctgctggtaaccaaagcccatcacagcagccaggtgagtcggcggcggaatccccgaggcccctgggtcgaggtctccaggggaaaggaggggcacctccctgccctctcagggtcctcctgcccactgctccccatccccagccggttctggggtggccacgccgggagggcaggcccctcagccctgctctgaccttctgtgcaggagatgtcctctgagtaccgggagtatgcagacagttttggcaaggtgagtgcggctgtgcagggagagctgagcacgcagctgcagggggctcccccggccacctgtcccagccatcccttggggaaaggccagcccagagcctcaccctcctccctctgtccctggcactgaccaggcactgactgccaggtttggctcactggtggatgctgggagggagggcaggcgggtggtggcaccggctggccggtcacggcagccactgcttggaggagcaaggatttgcctgtggacaggtggcctctaaccaagtggcctggccctctctcccattgtagccccctcacccgatacccgccggggacatactttcctcagaaggctgctcccaggtgaccagacagtggtctcagggtaccaggtccctcccaagggctgtgtgcacctgccacagggctccttgcctcctcctggtggtcgcttgctgggctgaagtggtgtctgctgcggtgcctgctgtggttgtggggtggcgccacagtcccacctgccacctggcctggcagtgtgtcccctgcccgagatgactggctggaaatgggattgctggcaggtgacagctgagggtttggtgacctggtgagggcagcacctgggaggcctcccccgccaacctgctccctctcttggcttgcagtgccctggtgggcggaacccctggaccggggtatcccagttcctgcagacatctcagaagatcatccagtttgcttctgggaaggagccccagccaggggagacagtcatctatgtggctggtgccttcgacctgttccgtatcctctgggcctctgctgctcccctacatgtgccacatggggtgggacccgggggcctcacttgactccttggggcccccagactgggctggctggtttgcaggggagcagctgtcagcagggaggatggcggggaggcccttgggcatgagctgtcagggagctgctccctgtcatccccatcccgactgcttcttaacctgggtgcagacatcgggcatgtggacttcctggagaaggtgcacaggctggcagagaggccctacatcatcgcgggcttacactttgaccaggtcactgccttcttgctccctgggcccctgggcagctgatgggccctcgaggggccctaagcgttgctgttaggtgcaggtggtctctgggaaggggccccaggtgaagtcacaggagaccctggggggtgatcgtaggcttctggggtccagggctgtcctgtctggggcatccccacaagggcgagcaacctccccgacttcttcccatgagggacagccgggaggggcacaccctgtccccccaaaaagtctccgggctgagctagccgcactctggccgcaggaggtcaatcactacaaggggaagaactaccccatcatgaatctgcatgaacggactctgagcgtgctggcctgccgggtgagtgggggccaggagccagcccaaggatggggagacattcccacaacatcccccctactaagggcctccctgagccagggcaggggggcttgggtc

SEQ ID NO: 96990 - DNA, 12396 bp, Homo sapiens
ggcggatcacctgaggtcaggagttcaagaccagctggccaacatggtgaaaccccgtcactactgaaaatacaaaaattagctgggcgtggtggcaggcacctgtaatcccagctactcaggaggctaaggcaggagaatcgcttgaacccgggaggcagaggttgcagtgagccaagatcgcaccattgcactccagcctgagcgacaagagcgaaactcctcaaaagaaaaaaaaagacaatggcagccattcccacccccaccccatggctgtaattccagataactgaagatacagacaactagtgtcccattacagcagaactgctcctaactcaggcagtaccaactaacaagaaagtgaggaaaacagttttaccaacgtctctgtaaggcaattaacaaggcagaaatttcagttctccatctgataaaaatatccggggatgtcacacagtaatctggtgagctccaagaccaaaattacatacccaggtctttgacaaaacgtttcatgtgcagatttaaaggatggatgacagaacctcctgcctcgtattcttgcccctgcaccatcatggtagccaggcggcccccgacctcttctctttcaaacaggtctatcttcacatctttcccaaatttctgccgcaggtaataggctgctgaagtgccaccaattccggctccaataatcgctatgagggaaaaaaacagaagattatattttccccttttaccagctctgtgagttgttttgtttttgaaagaccatcaatagcagaggttgttactcaaagctattaccaacaatttggtgggggaagagtgacacctgcagcgaaggtctaactccctgaatctggacagacactgttcccagacaaaagcagtagattaattaacatattgacattaactcgattttttttccagatgcccaaagattctcacaggtctttatggaggaaccaaggggcctgcacacccttccagatgcccaactcacgggcacattagaggtggacctttccagcacgcatttttaataaagtgacggccatttatgcctagctttgttgtgtctagattcaatgtagataggttaatgataccgaagaacacaactttaaaggggggcgggagggagacaggaagcaaagagccaaggctcctgacactggagctcttgacagtggaaagagaacagattctttctgcagctgtgttagtcctaggcggagaaactgtgcaagccaagggcctctgagagcaggccgacctcagcaaagcggagctgggggaaggcggttcagcctcccaagggaagcaggcagggtcaacttgtttgcactcctccctgtgctgtgcctgcgtgagcctgttaatctggccgggcgccccaggtcaagccagaacactggagtcttcacggtcagtgttcaacgggaagatagagaaacctaggcctccccggagccccacacctaagagacaggggctacaggtacgctaggcgcctgcctgcccgcccgcccctgtccccgtccacgcccattcctcaagtgggcacctctccacgcctgggaatgcacagtcctattccgaccagagctgaaagccgccctgaagtgtgaatgggggaaagcgcgacctgcgcagctggctcggcctgcaccgctggactgcgtcgcggctgtgggatctgggcgcactgcgcagcggccgcccggcgcggggcgcgctccagcaccttcccgcgccgcccccttctcgcctaccgattttatctggcggagcacgcagctcggcgccctcggggcatccgcagctgcacagcaacagccacaaccccagcagcgaggagacgagctccgcgacgacgcgccccatggcctccacaagctctgcagctggcctcaagagccccgcagtcctcccaccgctgcgcggctgcgcgctccgcccagccccgcccccaggccgcccagcccctgcgagccccgcccaggtcctgcgagccccgccccgacctcgccccgccggtcctctcaaccctgcaggagctccccactctgggccactcagtgccctaagcacatcctgccgcctcgaagcccaccctccttcagaagacatcgaaggcagaagctggccgggcgcggtggctcaagcctgtaatcccagcactttgggaggccgaggtgggtggatcatgaggtcaggagatcgagaccatcctggctaacacggtgaaaccccgtctctactaaaaatacaaaaatttagctcggcatagtggcgggcgcctgtagtcccagctactcgggaggctgaggcaggagaatggcgtgaacccgggaggcggagcttgcagtgagccgagattgcgccactgcactccagcctgggagacagagccagactccgtctcaaaaaaaaaaaaaaaaaaaaaaaaaggcagaagctgaggctcgcctcagctctcctcctccttccctatctatttgggtgaagcaccttagttcttcactagtaccctcttctgttccctccgtcgctcctctcaaagaatgcgcacagctaatcgctgccagaaacagaccaaagggacaacagtacttactgagtgatcaccctgttgcgagaactgtaaggttctccgtgaatgggtaaatggtgctaactgtaaagaaaaatgagggagactgaggatggggtggcccaaggtgaagggggtgtaatagtagtaacagacatgaataaaagtagtgtacctgtaaggacaccagaatgtgccaccccaaaatacgcctctttagcctaaggattatttcaagccgaagacaattgagaagatgtagatacgatgtagatacgtgggtggaaagttctccgccttccccatttgcctaaaagcaggacataaattttatttttttaacaatttttaaatatattgcattttattacataaaagtaaaattagtaaaataatataatttgatatactttataatttataatttctctcagtataatgtagaaaagtattactctgaacacttactttttttttttttttttgagacggagtctcgctctgttgcccagtctggagtgcagtggtgcgatctcagctcactgcaaactctacgtcccgggttcaagcaattcttctgcctcagcctgtagctgggactacaggcacccgccaccgtgcctggctaattttgtgtatttttagtagagacgaggtttcagtgtgtcagccaggatggtctcgatctcctgacctcatgatccacccgcctcggcctcacaaagtgctgggattacaggtgtgagccaccgcgcctggccatgaacacctaccttaaacattacttaatttaggctaactacaatgagcctcgctacttatatttttatcatgcatcttacattttaatgtccttactcttttatagaaaaggtcataaagaatgcccaactaataaagaatctctaatatctctgatacagcaacaactgatcacatactttcacatgtgaatacaatagaaataaagtaacagcataaagtaatttgaaagctgtattatattattattcacttttcaaaaaattgttttcaaggaaacaaatatactttcaatgtaattacaaagcttcaaaaaaactccttttaaagttatatacaaataatttaacaactttaattgtgaattcatttttatactcaacactcctatttagtgtaatgtctgaagtaaagcaggacataaattttaaaaggcaaaggtatccctcttcccacactgcctggaaggacaaaggttaatcactaaagacaattttacgcctgttaaataaaattcataggaagccattggtttggactgagctcctgcactagactaggcccaacagactaaaccaaaatggagtcactcaagtcactcatgttccacatcacaaggtcaaaactaagttgtcgatctgactttctaagaaatcaggagaaagaaaaataatagccaaattcccgacagaccagtttgaagtgacatgataaggaaataccctctgctttaaacttttcaaggaaagtaacctcgaaacaaccaatgcacttttctgtttctgctttcttcagccctttctgaaagccaacctcctccactcaactcataggaacactcattcgattttataaaatgaggtgttgcacaattctacaatcgcaactaaaagccaattatgctctttaaactaaattagttgtaattttgtcttttgacaaacctttatcagccaggaatctacatgacaaacttcattaatgagcctttttctatcgcgtatttgccttcccataatttgccacccctagagactcaaaatcattttccttctcttaacacttctctttttttttctttctttcttttttttttttttttgagacgaagtttcgctcttgttgcccaggctggagtgcaatggcgcagtctcacggcaacgtccgcctctcgggttcaagcaattctcctgcctcagcctcctgagtagctgggattatagggaagcgccaccacacccagctaattttgtatttttagtagagatggggtttctccgtgttggttaggctggtctcgaactcccgacctcaggtgatccgcccacctcggcctcccaaagtgctggaattacaggcgtgagtcactgtgcccagttctcttaacacttctctaaacatatactgttcttttttgaagatgctgtataatcctgaattcaaagctacctcttggagatttgctcatttccctggtctctcttttgaatacgtgacgtacatgtttttaaatttctgtttttctttttttctttctttcttttatttattttgagatggcttcgctctgtcacccaggctgaagtgcaatggcactatcacggctcactgcaacctctcgctcctgggctcaagcgatccacccacctcagccaccagagtagagtacctgggaccacaggcatccactaccatgcccagctaatttttacattttttgtagagatggttttttgccatattgcccaggctggtctggaactcctgggctcccaaagtgttgggattacaggcatgagccaccatgcctggtcctgtttgttttcttcttgttaatctgtcttttgttacaggggtctatcacaaccaaaacctcggaagggtagaggaaaactctttttttctccccaacataccatacaatagaacattatgcatgcattaaaaggaagccaggcatggtggctcacgcctgtaatcccagcactctgggagaccaaggcaggcagaatatctgaggtcaggagttcaagaccagcctggccaacgtggcaaaactctgcctctactaagaatacaaaaattagctgggcgtggtgatgcatgcctgtaatcccacctacttgggaggttgaggcaggagaatcacttcaacttgggaggccaaggttgcagtgagctgagattgcaccactgcactccaacctgacaggctgatctcaaaaaaaaaaaaaattacaaaaaaagaatgttggagcttggcgcagtggctcacacctgtaatcccagcactttgggaggccgaagcaggcagatcacctgaggtcaggaatttgagaccaggctggtcaacatggtgaaaccctgtctctactactaaaaatataaaaatcagccaggcgtggtagcgcacacctgtaatcccagctactcaggaacgctgagacaggacaattgcttgaacccaggaggcagaggctgcagtgagccaagattacgccactgcactccaacctgggcgacagagtgagactccgtctcaaaaaaaaaaaaaatgggtctataactaatgtcctagtattatcagttgagaaaagcttgtggttgcatgatgggtataaaatgatctcatgcctcttttcctttctctgccatygtggtgtgttcttgactccaccctcaccatgtcttctcacaagactttcaggattaagtgattcctgcccaagaaacaaaagcaaaatcgtcccattccccagtggattcggatgaaaactggaaataaaatcaggtacaactccaaaaggagacattggagaagaaccaagctgggtctataaggaattgtacatgagatggcacacatatttatgctgtctgaaggtcacgatcacgttaccatatcaagctgaaaatgtcacccctatctggagagttcgacgtgttttcctctccgaatctgttatgaacgcattggttggctgggttcagtaataaatatgtgaggcctttcatttaaaaaaaaaaagtctcatttctgtaattacaatacttcacccaaacaaacaaacaaaaataactagtacatgaacatgaagaacaatatagatgagaagaaaataggttggatacaaaataaagttaaacttggagaaagaggctgggctcagtggctcacacctgtaatcccagcactttgggaggctagggcaggcggacgatttgagcccagggttcgagaccagcctgagcaaaatggcgaaaccccgtttctacgaaaaaatacaaaaaaattagcctggcatggtggtgtgcacctgtagtcccagctactcaggaggctgaggcaggaggatcacctgagcctgggaggtagaggctgaggtgagcagtgattgtggtactgcattccagtctgggcacagagtgagactctgccccccaacctccaaaaaaaaaaaaaaaaaaaaaaaaggtacatgtaccaggatacaactgcaacattatttgtaatacaataggtttttgaaaagtagtaacctgaatatccatcaatgccagttatggtaatttattcaatttaccattcaatacattggggaactttcattttatggacgattttgcaactattaaaaaactattaggccaggactgggcgcagtggctcacacctgtaattccagcattttgggaggccgaggctggtgcatcacttgagcccagcaatttgagaccaatctgggcaacaaagtgagacctccgtctctacaaagaatacaaaaattagctgggcgtgggccgggcatggtggctcatgcctgtaatcccagcactttgggaggccgaggcaggcggatgacctgaggtcaggaattcgagaccagcctggccaatatggtgaaaccccatctctactaaaaatacaaaaattggccgggtgtggtggcaggcgcttgtaatcccagcaactcaggaggctgaggcaggagaattgcttgaacccgggaggtggaggttgcagtgagctgagatcgagccattgcactccagcctgggcaacaagagtgaaactctatctcaaaaaaaaaaaaaaaattagccaggcatggtggcacgtgcctgtagtcccagctactcaggaggctaaggtagcaggaacacctgagcctggaggcagaggctgcagtgagctgacatcattgccactgcactccagcctgggcaacagagcgagaccctgtctcaaaaaaaaaaaaaaaaaaaaaagcccggcgcagtggctcacacctgtaatcccagcattttgggaggccaaggtgggcggatcacttgaggttaggagtttgagaccagacagtccaacatggtgacaccccatctctactaaaaaatgcaaaaattagcggggcatgctggcccacgcctgtaatctcagctactaggcgggctgaggcaggaaaatcgcttgaacctgggaggcagaggttgcagtgagctgagatcaggcgggtggatcatttgaagtcaggagtttgagaccagcctggccatcatggtgaaatcccgtctctactaaaaataaaaaaaaattaggccgggcatggtggctcacgcctgtaatcccagcactttgggaggccgaggcaggcagatcatctgaggtcaggaattcaagaccagcctgaccaacacggagaaaccccatctctactaaaaatataaaattagccgggcatggtggcacatgcctgtaatcccacctactcgggaggctgaggcaggagaatcgcttgaacccgggaggtggaggtggcagtgagccgagatcatgccattgcactccagcctgggcaacaagagcgaaactctgtctcaaaaaaaaaaaactagccaggtgtggtggctcacacctgtaatcccaactactctggaggctgaggcacaagaaacgcttgagcccaggagacagagttcacagtgagccaagacactgtcactctgggtgacactctgtaaaaaaaaaacaaaaaacaaaaaaaaaaaccctaaaaatcccaagtgtatacatgtgcatctgtatagagtaaaatgtggaatattacagatgaatctattaatattacttacctcaaaaggaggaagaagatacatttttaatattttccttatgtatccatttcatttcatttgtaacactaagcacgttgtacttttgtaacttaaaaactactttaaaaaaagtacttgtgcaatatccatataatggagttttatttgggaataaaaaggaatgaagtaccgatacacgttacaacatagatgaccctgaaaagcataatgttaagtgaaataagtcagttacaagaaaccatatattacatgcttccatttatatgaaatgtctagaataggcaaatctataggggcagaaagactagtggctgggacatggaatgggatgagggacagggagtgtctgctaattgctacgggtttcctttttgaggtgaagaaaatgttataaaattgattgtggtgattgttgcacacacacctctgtgaataaactaaaaaccattaaactgaaaaacactttatatggatgtcccaaaaaggtgtttttaaaacaccatccccattaacatttgttttattcaccatcaaaagactagtacttgatatctttgaaaataatctgaagaatgtgtcagagactctaaagacaattccaaaaatgaaaaatccagaatgtatacagtctgaagaaactactttaaagaggacatcacgtttttgtttttttggtgttttgttttgtttttgaggagtcttgctctgtggcccaggggctcactgcaacctccgactcccgggttcaagtgattctcctcctacctcagcctcccgagtagccgggattacagacatgtgccgccacatctggctaatttttgtattttaaagtagagacggggtttctccatgttggccacgctggtcttgaactcctgagctctagtgatctgcctgcctcggtctcccaaagactgggattacaggcgtgagccgccccgctcagccgacatcacgtttttcgatgtgtaaattctcctatgtttaaaaaatatttctacaacttaaataaacttacatcatagatattttccagttcaacactacagatctgattaatagcttttcaataactgcaaaatagtccataaaatgaatgttccatctgggggcagcggctcacgtctgttatctcagcactttgggaggctaaggcaggcagatcacctgaggtcaggagttcaagaccagcctggccaacatggcaaaaccctgtctctactaaaatacaaaaattagttaggctaatttaggtggtggcgcacgtctgtaatcccagctactagggaggctgaggcaggagaatcgcttgaacctgggaggcagaggttgcagtgagccaagattgtgtcactgcactccagcctgggagacagagcgagactgtctcaaaaaaaaaaaagaaagaaagaaaaagaaaaagttccacatgtatttggtgtaaattgaataaattaccataagtggcattgatggatattcaggttactccatttttttctactgtaaacaatgctgcagttgtatcttggcacataaatctttataaattaattgttttatttctgtaggatagattcctagacataggattactttagtgacatatatatataataagcaatgtgaaatgcatacagagtatactgaatcacatttcagagctctaatttctctgcctcctaaagttggactgaagtttatgtatcttttgacttgtttacttttaagattcttgtgaccaatttgcattaaatagctggggttttttgtttgtttctttgtttgttttttgagacggatcctcgttctgttgcccaggctggagtgcaatggcaagatctcggctcactgcaatctccacctcccagattcaaggattctcctgcctcagcctcctgagtagttgggattacgggcccccaccaccacatccagctaatttttgtatttttagtagagacagggtttcgccatgttggtcaggctggtctcgaactcctgatctcaggtgatccgcccgcctcagccatccaaagtgctggaataacaggcgtgagccactgcccccggcctaaacagctatttcttaaatgcttttcaatgtgcaatcaatacacggaagaaatgcaaatataaataaaaatctggcatctggaaatatcctccccgcgctgaaaaatctggctagcaccaacgacgcaaattcttaataaaatccttacttttttaagtaaaactttttttcttttttcttatttcttaagtaaacattttaaattgaaattttttttctgtacagagaaagttgaaacatccattcctatgtttgggatgagaaaagataaattatttatgttattggaaaacagaagattacagactgtcaataaacttttacttttaaatgaataaataatacatgacaattcttttcacatgagagaacgtctgcttctatttcctcctaaaatactgtggcggctgggcatgtcaacagcgccgctggtgtagtggtatcatgcaagattcccattcttgcgacccgggttcgattcccgggcggcgcataggcgttttgcttctcgctcgctaaaaaccagatagcttgaagagtctttatatatctttccaaaagaggaaagatttaggctttttactgtccctgaaggtttccactccctcataattcgcggtcgaaacactcgaatccgcagccagaagacaaaaaagttcacgcaaatcgtgaagtagttaatccttgcgcctgcgcagtctgaggcgtccctcgcgtcgggtggaagagcggctgcgcaacaagtgaacctatggattaaggtgtagccgggcggcccggaggttgagagtgcaagattattctgcgcctgcgcggcccgggtaactttgctggctgctcctaggctcccggctcgccgccatcttgtattggggtttcattgttcccgctgggccgggcggtttagtgtaattgccgccggaggaggaggcggagtaacctctggtcagccgagaaaccccactatcctgtagccataaccgcttaaacgatttgggaggtagtgaagggcagggagctggacctggaggcgccgccgcgacagcagcagccatggaggacgagatgcccaagactctgtgagtctggggcagcgatgagggaggcgggatggtggtcgtcccggagggaaggcctcggccctgcgccgctcccagcctattgttctccgtggacaccgcgatatcgtggtttttgtttccttagcatgcacctggatgcttacaaccaagacccaatctgtgaggacgaggtgaagggagacggggctcaaccctctcaattaatcccttcactttagcaacaccattgcatgacctttgctctcgccacgggccctctgtggtcttagacctggagaaaagactttaattcagacctctttttagaactcgtcgaaccttccttttgtcctatgctttctttccttttcccgcttctccccctttttgattaacctcttcttatctttacagccgtctccctttaattttacttttgatttcctactgaaattcttcctttcattttcttctcggtgataagattttttttcctcctcgagggtgcttgtactcattttcagtgcagtaaactttattcttgcagttgccaattggaaaaaagccaagcatttttctttaacctctggctttccttctgtagcacccaccgaccaaaaagcctaaccagacaccccaaggatttggaaatctcacccagaaggaatatatcaattgaggggaaatggatttaatattatttttatagtcgtttactactgttgtgattgacatggtgttgaacgagcgggctg

SEQ ID NO: 96991 - DNA, 12279 bp, Homo sapiens
aggagaggcgctctgctttttagagtttccagtttttctgttctgttttttccccatctttgtggttttatctacttttggtctttgatgatggtgatgtacagatgggtttttggtgtggatgtcctttctgtttgttagttttccttctaacagacaggaccctcagctgcaggtctgttggaataccctgctgtgtgaggtgtcggtgtgcccctgctggggggtgcctcccagttaggctgctcaggggtcagtggtcagggacccacttgaggaggcagtctgcccgttctcagatctgcagctgcgagctgggagaaccactgctctcttcaaagctgtcagacagggacatttaagtctgtagaagttacttctgtctttttgtttgtctgttccctgcccccagaggtggagcctacagaggcaggcaggcctccttgagctgtggtgggctccacccagttcgagcttcccggctgctttgtttacctaagcaagcctgggtaatggcgggcgcccctcccccagcctcgctgctgccttgcagtttgatctcagactgctgtgctagcaatcagcgagactccctgggcgtatgaccctcccagccaggtgcgggatataatctcatggtgcgccgttttttaagcccattggaaaagcgcagtattcgggtgggagtgacccgattttccaggtgcgtccgtcacccctttctttgactcggaaagggaactccatgaccccttgtgcttcccaagtgaggcaatgcctcgccctgcttcggctcgcacacggtgcgcgcacccactgacctacacccactgtctggcactccctagtgagatgaacccggtacctcagatggaaatgcagaaatcactgtcttctgcgtcgctcacgctgggagctgtagacgggagctgttcctattcggccgtcttggctcctccctcgcatgttgtcatttttaatgggggtttggggaaggagtctgaataggttccatggaagagatgacacttgaatttggaaacatgaatcatattttcccaggtatgccggagaggaagggcattccaggtagacagacttgaaacagcccagtacaacctagggattgccaaaagttggtaggctagagcagggtttcctggcctctgtgctgctgtcactttgggctgcgtaatactctgtgatggaaatactctgtgatggaggctctcctgtgggttttaagatgtttagcagcatccttggtctctaccctctaaatgctaatagagggtagatgcaccccttctgtagctgacaaccaacatgtctttggactttgttatctgttccctgagcagcaaaatcaccctcagttgagaaccagtaggtgagagaatggggtcggagttgggggcccagggaaagaaaaatctgataaagtcggcaggagcaaaccaagaagggccttgggagccaggccctggagtgtgtcctggagagatgggggtggccagagtggggtctcccttgaaagcagtgaaggatccccaaggagacagtgaacagggggatgggtgaggttggctgtccctcccccccaccccgacagaccctcgtttgggtttcatgatacaaaggatttaaggcagtttctggaacctgactttgaaagttgagaagtttctgtgtgtaaccactcctaccatgacccctagtgccatggagagattcttgagagttgatgtgaccccacttggagttttttaggaactgccccgacacttgccagttgtgacccccatgggcatgcagaagccaactcacaggccaggccacggcctcctgactgcctagcacgtcccccacagagccacacttcatgggctgtctgctttgtacttgagtttatttcacaaaaccacggagaaagatactgaaatggagctctttccagcctccaagcaaggaggccccagcagccagtctccagccccttgagccctttttgttaggcccacacccaaaagaggagaaccagtgtgtgcgcgaaggtacatggcaaggcacttttgaaaacatcccagtttaccgtggtgaaattgaacttactctgaaacagatgaaaagggacatgcaaaattgctgagcacatggaggtgttagtaggtgaaaatcatgtcctgggtataacccagcttctccaggttagggtgagccgccgtctggatcagtggtggcgggccacacaccaggatgagcgtggacttcgctggaggaggaaggtgctccttgatcatgtcggcagtaacgaagcctgagctgtacttccagcctgaaatgaaggagatgcaggagcaagctgagcgatgccaggtggagttcctgatcccaggccgcctgcacacccaccctcagccagggaggaggtgacaagctgctctacaaaggcttagaagtctgtactactgctccctgcaaaaagcctcagaactagtaaacagccctctgcagcaatcaccccaggtcccaggctcactgcagggaccctgaagccctgctgctgtctgtcagctgtcagcattgacgaggaaggagaacacaacgaggtataccgaggtgtgtgaatcagtacagccagctggagttgtccggcagggtgtggcctggtgttagtggaactgcgcagaattgctcagtagggtagcgccctctgccgaccagggacctgtatgacaagcaggtacagccgggagcagtgtgagaggcgcgcctgtggggtgctctgtgcacagtggttgctgggatgctgtctgggctgcagcagctgtctgggggctcagcatgtccaggtgaggtgggtggtaaggggtgtggtggccgtaagcagaagggtgagtggtgaaggggtcagtgcccatattagatgtgtatgtgatggctgtgtggaatgggtgggtgttcacagtggacaggggcagtgtcccttttgatgttcagtgcagcgtgaggtgctgctgatgtattagacacctgctctcgattgcccttaaaagcaggccatcccaaatcctttctccctcaatttctcacatttcccatctggagccagagccccaggcttaacccccacatctggtcctacaaaactaaaacaaaacaaagagacagagaccagtcctcaaagtggtcaagggttggtgctgacccatggtgagtgagggcactggatgtcgtaccaatgggaggcctgtccagggtgtaccacaggtcgaactggtctgggtgagtcctggcaatttcttcaagctcttttctgaccaagatatcctcctctgtctagaaaagaagcaacactgaaaaagcccctccagggccatcctcttgttccctggactgactacaccggtcagcatactcctggccaaagctgccaccactccagctggagtgctcgctgccaactcccacggcaaacaagagttctgctgctgctcctgaagctcaaaccctttgttttgtggatgaagttcctccatgtggatgaagaacctccatgggatgtaggttcccatggagctgcagtgaccgcctccaactagaaggaccttagccaagcgctggccaggatggcttcactcggagctccagccctgcctcctacatctacactgagctctagcacagcaaacctaactggaacaagctcagtgcaggcccaggatcttctggaagaaatgtaatgggctcagaaagtcctgtgatagaacagcactggatatgtgaaggagaggaaaacagtctggagccccatttgggggaaagggaaccaaagccaaaaataacctgtcacagcctcaaagataactgcacagaagacctggatcttaaaactcctcatgattctcatcccagtcattccacttctgggattctgttttagaaaataatctaaaagtaatcaagcgtaggcacaattattcatcaccatattatttagaactgaaaacagcctgaatgtggaagttagtaaattatagtgcaacttgataaaaactatgatgaaaatatttataaagcatcttaaagagaagaaaatgcctgttgtggtaatgctgagtgaaaaaaaaaaaagcatatataaattacaaatatataacatatatagaaaaaagatttaaaaagtaagtaaatatttatattctgtattttctgaagtgtccactgaggacatctgtgattttacacttagcaaaaatacagcagtacatcttaaggaaaaaaggaatgcttagtgcttagggctggctgaggagacacaaaagagttaaatacatgcaaaaagcaggcctggactcagcttctccagctgccagcagccctgttgatcccactaagccctcccacagatgcaggcacccaagcagcatgagctcagtcaatgcaggagaaatgaaaacaagagcccagctcagcaaacattccatcctaccactgcaagctcagcaggaactgacctggttggcaaagatgagggacatcctggtcctgtcactggggtccttggtgatgtggcgaatgagctgcaacatgggtgtgatgcctggaacacagtgagcgagcagccagctttctccctgtctctgaagcccacagtccctgacctgcagcaagcttcataccttcccccagcccaagttatccttttctcacttctgtccccaaaactcaaagcaggaaacagcccttcattttggttttcctttctaatgcaacagtaagtcaggtagtctttctcattttcatatggcaagatggaaagaacactctaagttcttcagtgtcctcattcatcaaacaatgacgggtaaatgtgatcgttttaagaatgcctattacagtgcctggcacattgtatgtctccttcaaagactgctctctttcttcaggcagtcattttcaagggatggggagagtcaggcttgaactggatctaggagcccctgggacagcatgggtgggcctgcccagcttgcccccaagcctgacctgaaaggtccccacaaggctcctgagcagccaccatattggttaggggaagcagggtacacagggtcagtttcaagacctgtcactggttcatcgttcccaccttctacagctggaggcgaaatctctcatgttgtcccttcgaggatcaaatgactcccaagtcagaatgggtctcggggctcactctctggatggagcccctagaagcctcttacctgtgcccccagcaatcattcccaggtgatcggccagtgtttttttaggctcactcgtctggtctggtctgattccaagattccctggaaacacagagaatgcttatgacctctgcagttcttgcctaaagagactgcaaaagatcactgacattccttaggactcccaggaggcacgtccagctaagggactgtctgcaccattttaagctggagaagcaggccagggcagtctcctcagctagccctggtgctccagtgcacaaagtgggaatagagcctgggcttggtcggggaatcgccgggccttctgttctgaggaaaaagaggggcaagctgaagttaacacagagactcaaagagcattctcactcacggaggtgaaccagtgagtaaacaatggctatgtgagtaaccaaggagcatggactccctccatccatttttcagtattagcaggcaccatttatgtatcaggcattgtgctggagattttgatacaatgacgaggaaacaccaagtcattcccctaccttacaaaagctgacaacctcatgaagtgggtgtgtgaatgtgtaacaagtgtgatcattatgcattgtgtgtgaatgaatgaagactaaggacaaccccatgtgactcaaatctgaggagtgtacgagaacaatggaaccattgcaggaatcttcctcccagctgggagcccaagtattaacccctccagtacctggcccatggtaaaacaagcgtccccttggccctcgaaaaaagatggtctccccgattttcatgttctccaaatactgagtcatcttcccaccttcaggatattgggggtgtacatttttgaagtagatctgaaaagcaaggcagcactgctttcacattcccagacacaatgccacagccmcgtacaackagaaaatgcatttactgctggaagctttgcagagaaagtgttctcctctctgaattgytgtacgcaatccctgaagatgaagctgccacaaggttaactgtagcttcactgctggaaagccctgcctagggcatatgtgccctcagagaaaaagcactgcccctccaccccaccaccctcagtaggcttggaagcacgagctagccagatatggtgggcactatttacctttataattaggtccacaaagcctctgtcatcatcactggagacaggggtgtaagccctgaccaccaattcattatcgatttttgccaagagctggacatagttacctatagaaaaggcatcaagcactgagtcaaagcatatttagcttaaataaggcccaggaataaaggactgagcttcagtgaagggagcaaatactgggggcacaatgttaagaggggtgggaagaagagagcagggaaggagcccaaatatgggatgcccggatcctaggcctgccctgcctccctgtgctaccctaggcaagtcacttcacctctctgggttttggtctcttcatctgtaaaatgggggtgatatgtctgcccacctgtgatcttagtgtaactgctttttggagcaggaaaagatcattaaagttggagagtgagtattaaaaattacagaaaggggtcagacatggtagctcacgcctgtaatcccagcccagaggcgggtggattgcttgagctcaggagttcgagaccagcctgggcaagatggcgaaaccccatctctacaaaaaaatacaaaaaattagccaggtgtggtggtgcacacccacagtctcagctacttgggaggctgaggtgggagcatcacctgagcccaggaggtcgaggctgcagtgagctgagactgtgccactgcattccagcctggacgacagaatgagaccctgtctcaaaaaaaaaaaaaaaattaggaatatttgtctattcaagaaaaatatgtggccttcacaaactcctttcttcctaaactggatgtatcactgagatctgtgaataaattacaactactccatctgtatcctggtactaggcacagagcaggcctgggctcacagatactacagggccctaggatttgggtacccatggagcaaatgaaacaacaatatcatgtcttcctggcctatggccttgtgaggagtagcagtgaagtttttaaccatgtaactctgcccttcctgggtagaattcaataaaccaggtgtggccagagacctatggatcatgactacatcccactgtcagatgacacactgggcagctacgacctgttggatccaaaatgtgagactcaaattactaaggcaattagtggcagggacaggagtgcaatcaagagatactaagagctagaggcaagagaaagttttgtaaccctaacccttgactaacttcctgtatgtatgtagtcagtttactccctcagtttctactcgctcagaaactgagtggactacatacgggaaattagtcaagagacaaggaagatggaacagagagatggatagaaaccaagacctaaggtgcagggaggaggaggaggcaggaggagaaaaaagcaggcagagtaggcactagaggggctggtccctgaagctgattcaaggggatgagccaagtctttgaggtgccaacactctgggctcagaacaggctcaatgactctggtcatggtccctctgggcaccagggatagccaggagtaagtgagacacctagcttccttctgagaacctgaaactggaaacctggaaaggctctttcatatgcagccacctaggcctggcctgagggtgtccccagggcaaatggggctccctggctggtccttcaagccccatctctaacttgcttcacttccactgggctgggacgaagcagcgaactctgaggcctcatattagactctcccagaggcctctacattaccttgtcccactaactttgcacggcctaggccaaggctgaggagatagtgggtcaaggcagtttctaagcaattctctatctcaaagtttttcattcttttaggcttcctgccaacaggacctgcctgacaggccgagcagggagctgagagacggcacgcacaacactgagctctcgtgcatagagatggagtgagggaacagcaaggaggctcaggggcccagcgagctggctagagtgtaatctcaccacctgatagagctgaggtcaaggttttggcctgtgcatataagacaaataggccacggagtaggatccaccaggcaggcaagcagcactagcagattatacaaagctgctctgaatccctgattctagcagttttctactgcactaagactgactcagctatctagtggtgttacagattagaaatgggataactcaactctaggactcctagggctggaatctgcaactcgtagggctggtccctccttatgtgggtctgaggcccctgcagagaatctaagtgaccttgggggcagggcacacctgactcattcctgcctacccgcacattctgggcctttccccgaccactggttcctcccatccctcccaggtgcacaatactttgtagtttctgaattttcatatccatcagtcactctactttcacaacaacccaagtgaggtagacaggcaggcctgggaaatcccatttcatagactgaggctcagagagattgaaggacttcccttaagttccccagcaaggagccttccatgagattttaggccttttggctctaggttcagttcttttcaatgctcactgaggtaccactctcgtgtcagcccaattggaataatgaagaaattttctgtcccacatccatccccctatctatctccctgagctcacaggctcaggaggagcaagagggcatcttccacacctcaggacgtgggaaacctgtgtttctgttaagagaggagggcctagcccccagaggccccagtcctggtgatgacccaagcccggctcacctacaggaagccctaagacatggtccggcgaaggcagtccaaagcggaacctccgggtgttgtggctgattttctgataaaacaaaacataggcaggttctgtcagctttctagaagccttgctgggcagctgagatgcctgggaaaggaggtccgtttggcgctattccagcacacacacacacacacacacacacagggcggcggggagtgaactggaggccatgagatgactgtctggatgccctgccatcccagccatcatccacttactgccttccacccacagggctgacccattacctctttctcaatcaagggcagcgggtacttggcttcagggtcctgtaaggtgattggctctctcctcctggagttcatgctcttcaggaccaacacgagcacagtgaccccagtgacggtgatggtcaggagcagggacgggtcctggcagacacaatgtgaacagagcacctcaggtcttgcccgccctggacagggcagctctcaggcgcagaacaccctccccacaccaaaggcacaggagctgagctctgcctgcaggaaataggcaaagagaacagtagtgacacagaaggcggctgggagagcctgtggtggaccagagggtagggaggggtcagctgcaggtcacacaggaaggatgtttcaggcccctggagcaggcagcacacatggcctggggtgctcaggtcactaggcccctcctggctacagccaaacgttcatacactggaagtcccttccttgaggtgaagggggaggacgtcacccctaacacacaatccggaatgaggggcccagtccctaaagacagaactagggtgcgtagctctaagaggtgccccgtgacttagggcctggggactccccaacagtctcctggacagggcgaagggggcctgggcactcaactgccagagactcgggagcctccccgcatctgtccctaccctacaaggccgccctgctcctctcccaactcaagcccgacagggaaagttgcctctcctcccgccgggtcactggagtctcagccttccggaatccgagccggcccgccccgctccccgcccttcgcggtcccgcccacgacctctccccacgcctcccgctccggcccccaacctcccggtcggacgttcgttcccggctctggccggcctccgcgcctctggcctctttccttccggccgtcccgacggagatatttcttcaatactccataaatacaccccgccgcggaacccacccggagtgagacgcccaacacgtcgtcgaactggggttggccgggggccgctccccgccgcgggcccgcagactcgtggcgtcgccccgcagctccgcctggccgacggggaaccggccgagacccggacacgcacgcccgggaggacaaaagcgcgggcggaccccgcaggctgggaccccggcggctggcccgctccccgagaagggccgtggtcggggggctctcactcacgagccgctggctctgggtcagccctgcccccagggcagcgctccatcatgaggctggcggggcgctgagccgtggcgtcctcgctcctgcgctgcccctctgcatcctggccccttccctgcacacgcagagctgccacactgagcgcccctcagcttacttaagctcggcaaggctggagaaggccgtctgggtgaccgggcggagggggatgctggggaaggaagaattcaggcagctgcaaagagcgcgcgaatatattcattcgacatacctcatgggcgcctaccctgggcctggtccggggcgggtgtttgcggggtggggccgaagcaggggcgtcgccgagttgaagacgtgtactccgagcgctcctgcgttcattcattcgctgggtggagagaggaaggacaagagccccgcgccgatcggaggggagcagaatagtaggcacagttagagggtcttcacggtgcgtttcggaaccttggctgcccggctcgcccttgattacaggcaaaggcaaattcttgcctcaggacctgtgtgaaacagagaagcccagaagcagatccccacctgtttgactctgctagggctgctgtaacaaagtgccgcagactgagcggcttaaacaacaaaaatttattgtctcgcaggtctgggggctggaagtccaaaatcaaggtgtgggcagagtgggttccttctgagggctgtgagggaaggatctgttccatgcctctcctaggtttgtaggagaggggctaggagaaggggcatcttcttcctatgtctccacattttcatccctctgtgtgtgtccctgtgtccaaatttccccttttatgaagacaccagtcatattcaattagggtccatcctaatgaccttgttttaacttgattacctatgtaaaggctctaccttcaaataaggtcatatccttaggtactggggcttagggcttcaacataagaatcagggtgaaaacaataacccataacactttaccaacccttctccccaagacacacaccaccacaggctcaaaaattcttgctgtgtgaatgaataaacaaacttaattttctctctttgacttaatcaaatgcctttacttttgatttacctgcaggtgcttggttattataggcagatattttaatttttgacaatgcgataagtgtaaaatgatgtatcaggaatccaatttgcattacctaataactgctaataagtttgagcacctttcatatatttatttcccatggagtttccttttcagaaaaaaaaaaatgcctgctcataaattttgctcatttttctgttgtctttttcttactgatttttaggggttttatatgttttagatatcccttctttgccagttacatgaattagtaatgttttctcgtaatttgtaacttattctttcttttttctttctttcttttctgtcccacctttttgtggtgtagtctgatgaatagaaatttgaattgcagtataaccaaatataccaatcttcaatttttt

SEQ ID NO: 96992 - DNA, 14449 bp, Homo sapiens
agcctctcaaagtgctgagattacaggtataagccacagtacctggccaaatttaaattttgaatttaagttttgaatgaagagggggttgaaatcttatttttttttcttttttttttttttttttgagacagggtttctctctggtgcccaggctaaaatgtagtggcacagtaatagctcactgcagcctcagtctcctgggttcaagcaatcctcctgccttcatccccctgagtagctgagaccacaggcacttaccaccatgcctcactaatttttgtattgtttatagagatggggatctcattatgttgcccaggctggtctcgaactcctgagctcaagcaatctgcctgccttggcctcctagagtgctaggattacagatgtgagccactgcgcccctcaaaatctttttcaattcaaagattctatggttgtaaagttttgttttttttgtttttgttttgagatggagtctcattctgttgcccaggctggagttcagtggcacaatctcggctcactgtaacctctgcttcctgggttcaagctatcctcctgcctcagccccactagtaactgggattacaggtgtgtgccaccatgcccagctgatttttgtatttttagtagagatggggttttgccatgttggccaggctggtcttaaactcctgacctcaggtgatccacccgcctcggcctcccaaagtgctgggattacaggtgtgagccaccccgcccagccagttgtaaagttctatagcagtggaattctagagtttttcaggcctatgacatctctaagatacgtggttcttacatcaatagatactaagattctaggctactaaaatgtcaagattgtttgggtctcatggttcatatttctttccaagactttggccaggcacagtggctcatgtctgtaatctcagaactttgggaggccgaggtgggcagatcacgtaaggtcaggagtttgagaccagaaacatggtgaaaccctgtctctactaaaaatacaaaaaattagccgggcgtagtggcagacacctgtagtctcagctcctcaggaggctgagacaggagaatcacttgaaactgggaggaggaggaggttgcagtgagccgagattacgcgctgcactccagcctgggcaacagagcgagagaactgtctcaaaaaaaaaaaaaaaaaaacaaaaacaaaaaaagaaaaaaaagttcataatgtgaagaccgaacgtttctgtgaccgtagatcctgttgtgtccggaattggtgagttcttggtctcactgacttcaagaatgaagccacggaccctcgcggtgagtgttgcagttcctaaaggcggggtgtccggagtttgctcgttctgatgttccgatgtgttcggagtttcttccttctggtaggttcgcgctctcgctagctcaggaatgaagctacagaccttcgcggtgttacagctcttaaggcgccgcgcgtctggagttgttcatcctgccagtgggctcgtaatctcactggcttcaggagtgaagctgcaaatcttcgcggttgagtgttacagctcataaaggcactgtgaccccaaagagtgagcagcagcaagacttactggaaagagagaaagaacaaagcttccacactgtggaaggggacccgagcgagttaccactgctggctcccgcagcctgcttttattctcttatctggccccacccacatcctgctgattggtagagtccagtggtctgttttgacagggcgctgattggtgcgtttacaatccctgagctagacacaaagcttctccacatcctcaccagattagctagatacagagtgtccacacaaaggttctccaagtccccaccagagtagctagatacaaagtgtcgattggtgcattcacaaaccctgagctagacacagagtgctgattggtgtgtttacaaaccttgtgctagatacagagtgccgattggtgtatttacaatccctgagctagacataaaggttctccacgtctccaccagactcaggagcccagctggcttcacccggtggatcccgcacgggggctgcaggtggagctgcctgccagtcccgcgccgtacgcccgcactcctcagcccttgggtggttgatgggattgggcgccctggagcagggggcggcgctcgtcggggaggttcgggccgcacaggagcccacggagtgggggaggctcaggcatggcgggctgtaggtcccgagccctgccccgcggggaggcagctaaggcctggcgagagaaatcgagcgcagcgccggtgggccggcctgctgggggacccagcacaccctccgcagccgctggcccgggtgctaagcccctcattgcccagggccggcagggccggccaggctctccgagtgcggggcccgccgagcccacacccacctggaattcgcgctggcccgcaagcaccgcgcgcagccccggttcccgcctgcgcctctccctccacacctccccgcaagctgagggagcccgctctggccttggccagcccagaaaggggctcctcaagtgccgccaaagtgggagcccaggcagaggaggcgccgagagcgagcgagggctctgaggactgccagcacgctgtcacctctcactgtttgtctgtagggttgatggttctgtgtcgctggcctcaacctcaggacaggacatgaccagtgtcccccctggatagcagccaggggccgtgccaggtgtggagactgaagatgtggccagcaggaccctgctcagtggagctgcctagaagcaccagagtgccccagggccaggatggaaccatcaaagccggccagagggccctgtgcccagggtaggtgccttctccctatgagccgcctaagggcaagccctgcctcctggtctgctccctgccctcccccagacaggctcccaagttaactggcaccagccagtccatgaggggcccttgtagagagcggggcccagagaagtctgtagggactaggcaatccaggaaagcttcctggaggagtagggtgtttggaatcgcgtgctatttgttcactttgtcgtgtgcgctctaacggcctgtgttctccatcacagtttatcttattccctgctgcactcagcacagtgcctggcgcgcagtgggaaccgaatgaccccctcctattccttatgtcagttgccttttgtctgtttctttcatcgtaagcaggaatctgtccggttcgcggctgcttcccaggcgcccagaccagcgaccagcaccgcgtaggcgctcggcacagaccgagaacggaggccccacgcgggggcgccctgcggcgaggcgggtcccggccgcgcccggcggagccggggaactacaagtcccatggtgcatcgcggcgccagcgcgcagacgcagccgccctcggcgtcctctgtagcgggcgacctaggccgcgggacccggacggaggtagaggccagggcagcgcgtccgggagcggagtccgcgcccgccgccgccatgccggacagctgggacaaggatgtgtaccctgagcccccgcgccgcacgccggtgcagcccaatcccatcgtctacatgatgaaagcgttcgacctcatcgtggaccgacccgtgaccctcgtgagaggtacgaagccccagcccggggctccctcgccggcctctggggacccctggatcccacaccctgcctggatcctccaatgcctccggggtcccgtctgcctgagaccgccccccgctgcaccccggggacaactccccacccccggagacctccgagctccgtcgcctcctttggcctcccactgcaccccggacctcacctcccaggatcccttactctcccctgcaccccgggatgccccgcttcttcccaggactcttccctccctgccgcacccagcgcccactgccccaggaccccgcactgctctccgccccccgccgccccgggcacccctccactgcaccgctggcctcaggcctctctcaaatgtctctctgccagatgaccaagtgtcggggtgatggccgagatgcccaaattcaccatctctggaacgaaccgggaaaatgcccagttcagtttttgttgttttttttttttcctgagacagtctcactctgttgcccaggctggagtgcagtggcgcgatctcggctcactgcaacctctgccccaccccgggttcaagcgattctcctgcctcagcctccccagtactaggattacaggcgcaccaccaccacgcccagctaatttttatatttttagtagacacggggtttcaccatgttggccaggctggtctcgaactcctgacctcaggtgatcctcccaccttggcccccaggtgctgggattacaggcctgagccaccgtgtccagcctggttcagttctttttgaacacttggggtgcatagcatgctctggtggttcttccgtaagagggtgaagtctccaaatcaaacccccaaagatctggaaaccgtgcaacagcggacccagctccctctcttttgtagcagttgtagagcatgtctgtcctatgtgtctggatgttcgagctctccttttagctcgttcatttcccagtgaggaagctgaggccgtaaggtggtaagttctgcttgctggaggctccctgttggagcctctttgcgcacccagcagggtccctgtgcagctgggggaggtgcactggcagagctgcgtcccagtccttgccatctgtgagaagcagctgcctgtaggcttgtgtgggggacagagtaaggtaatgcatgtggaactctgaggatgatgcctggtactcgggagctctccatcagctgtagcctaggccttcacaggcctgcctggctggccacatcccttagagagacgaattgctgttttctaaacgctggaacactcaggaagttctcctctctcccctccaaagggcttatgagaaataagaaagctaaaagcctgtccaaaccgatgaggcgtttgagtctgtggctttgtctttgcagaatttatagagcggcagcacgcaaagaacaggtattactactaccaccggcagtaccgccgcgtgccagacatcactgagtgcaaggaggaggacatcatgtgcatgtatgaagccgaaatgcagtggaagagggactagtacgtgagccatgctgggagtgtggagatctgcaccgtgtgctgctgggacactagtccctgggatgccacagggtggcatgcccagattttaggggtgacatgggaggagccagaccccagggctcttgctttcaattgttctcacagggtacaggaaaaggattccttgtgattagcctctcttgctccttttctccaccagcaaagtcgaccaagaaattatcaacattatgcaggatcggctcaaagcctgtcagcagagggaaggacagaactaccagcagaactgtatcaaggaagtggagcagttcacccaggtggccaaggcctaccaggaccgctgtgcgtgccccacccacccccaaccccccaccatcctcctgaggcctgggggccagaaccattgcaaatcttccctcccctcccttgtgctcacttgactttgccccctttgcatgtagcagaggcctcggttcccagcttgtttccattgcttccccagatcaggacctgggggcctacagttctgccaggaagtgcctggccaaacagaggcagaggatgctgcaagagagaaaagctgcaaaagaggccgccgctgccacctcctgaggcagctgtgggtgcccctgctgtgtggctctgtatgactgttgctgaaatataaagccctgcaacctgcctgtgtgtctggtgtgatctattggccccacgccccagattcaaaccaccactaaccatgcaggacacgggaaaaaaacagtaacacgcttaattcactttatttttcttgtataaaaaccctatgttgtagccacagctggagcctgagtccgctgcacggagactctggtgtgggtcttgacgaggtggtcagtgaactcctgatagggagacttggtgaatacagtctccttccagaggtcgggggtcaggtagctgtaggtcttagaaatggcatcaaaggtggccttggctgcaaaacaaaagaaccccaggagggtcagtggtgtgcttgaggcaagtcccccaacccaaaaattgtcgcactcctaggaacagagaggccattctgggcgggtctgtcgtgcattaggagagcctttctctgcctccctgaaaacacgccaagcacacactggacccgtgtggttaagcggagctgagagaccatggctatgccccatgtgtggaccacctaccgaagttgcccagggtggcagtgcagccccgggctgaggtgtagcagtcatcgataccagccatcatgagcagcttcttaggcacaggtgcggagacgatgccagtgcccctgggtgcagggatgaggcgtaccagcacagagccgcagcggcctgtcacctggtgagggaaggagtcaggagacgggggcccgagggagcctgccccacggcaggcccatcacctgccaccagcctaccttgcaagggacagtgtggggcttgccgatcttgttcccccagtagcctctgcgcacggggacgatggagagcttggccaggatgatggccccacggatggcggtggccacctccttggagcacttaacacccagaccgacgtggccattgtagtccccgatagcaacaaatgcctgcgaaaagatgtgtgtgaggcagctggtggccctacacccaatcactgcccaccgcccagggcctgttgcacccctcaaggaaagagaggccacagtaaggcccatccgaggtcctgaggagatcttttctctctctccccgttacgaaagtcacacgggtgaagccaagtgcaactatgcagagccgagagagtcccggcaagcccagcgcagccccctccaggacagccgggtaccttgaacctggtgcgctggccggcacgggtctgcttctgcactggcataatcttcaaaacctcatccttgagagaggcccccaggaagaaatcaatgatctctgattcctgaaacaaacaagaaaattgtagggagagcattaaaaaaaaacttaataccattaygmtattcaagaaccaaagtcacggccgggggcggtggctcaagcctgtaatcccagcactttgggagactgaggtgggcggatcacaaggtcaggagtccgataccagcctggccacrtggtgaaaccscacctctattaaagacacaaaaaattagccgggcatggtggagtgcgcctgtaaccccagctattcaggaggctgaggcaggagaatcgcttgaacctgggaggtggaggttgcagtgagccgagatcacgccagcctaggcgatagggcgaaactgtgtaaccgcccaccccgcccaaaaaaaaccgaagaagtcatgaaccccctcacctggcttccccccgatctgtccccttcgtttcgtttttggaagcttgtatgtaaggttaccctatttctgcatctcaatcgtttcttcctatttgccctttttctcttgtttggtgagatgtggctttccactcagatttccttttgctttgtccagctttggcctagccatgaccaccgtaccttgctagggcgaacgctcacatgacaaatatgccattagcctttccccactgcacccgctggatgcagatgacagctgtcccgtacacgcggactatgacagtttgctaacccttacagtgtcctcccacaacctgaacttcatcatcctctcggatggcatgaaccaagcgctgcttctctttcagttctttsgaaatgaattcgctgcgaatgtgggaagatgcgctgaaatgccttttgtggctctggcttcgctcaggtatccatccaacctctaagtggaatcctctcctcagccagcccgcaacacaacctcaacctctcacgcgagacgctgggccctttaatgcgagtcaatggcagatgctaatcctccaaccccagcccaaatgactccggggtcgcacttgctcaacgccccaacgaccgacgcgtaccttaatrggcagrgagaagagatagatctcctccagggacttgatcttcatgtccttgaccaagcggcccaacttggtgacgggcatccactaaagggagaaaaggcgccagtgaccaggaccgctctccggcgccgcccaggggccsgaccccgagcgtggctgatacctacctccttatcctcggccttgcctccgcgagctccgcggcctcggccccggccccgtccacggccgcgaccccggccccggatgccactgccgaaacctccgcggaagccaccgcggttccccatcccagggccaccagggcccccgggcccccccgctgcaccggcgtcatccgccatttgctgggaaaagcgacaagaaggaactagtcagtgtggcctacgcatctggcagccccccgcgagacccagacaagggctcccgcccaggagcgcggactcgggagcctagacccgacccgatgtccgcggattcccgccgcccacgcagaggcccgctgcagcgaccaacaggactcacgtgttttgtcggaaaagaagaacgagacctactgggaagcagcttttatagcacgccaagcgccgcgagatctccgcagccccgccccaagcgggagcgggccgagctcctataagacaacctgtgattggctccgcggtgccccgtcctcaccgggctctgagtgctctttcccgtccggccccagccgcggcccgggaatctacgtcacccgaaaagcgactataaacgccggcgcctccgtccccagccgcggctcgggaatccacccgaagagtggctataaacgtccgcgcctccattgcgctctcctcttcacttaggtaggtcctgccgcgttgaccactggcgtctcgctggtggtcttcgagaccggcgttggttgaaaatcgcccccggctttggccgtggccgcgggtgagattcggcgcccagagcccccgggggcctcagctcaccgcgcgctgccccatgtgcggcggtgaaacccaggccccgacaggcgctgccgcctcccccccgggtgcggtcgctcgcgaggtctggcccctgactcctgaccccgactgcagacccctaaccttgttctttctccgcaggacactggtcctcccacgcctgacaccgacgtcgccaggaccgcggggttgggggaacttggctgtcccacgtctttcaaataaagctgttttgtctaactcactgcatgcgggtgttcttggggccccgactcgcctatcagcctggcaagtgcatatgttcacgctgtggcggggagaaccctagcgagatgcctcctcttctttcctggctttggacacaagggtaggatatgggaggttggcaggtgatgtgtaaggtccgacgcctcttaagtggaggagccagactacgaacagtcttgtggccatgcgcatctcaagtgaactacactggcaggtaaaatgccttggtccaaagggctccaggtggagccagcagagcactagcaaggatgggaagctcagaggcttccagtggcttccttgtgagaccaggtgagattctaaaggatttgaccaactaggcctagatgaactcagcgcccccgtggtgctaggctggagtggatcagacacctggtttgggaggctgggccccctgctctggggcggcaggttacccgggagtttagttgtcactgccgtggagctagcacctgagtatcagatcctaagtgaagacccccagtgagtcaatgcctaaaacccctaagccttaggatctccagccacctgggccgcagtattggagagaagagggtggcaatccctgtgatcccactgaagccctggcctgggggagacagctccatgaagcttggttctgacccagtgcttctggggaaacgctgtcagccactctcaagccccaggcgcttcatagacctatctcaggtcaagagctgctctcttttatttttattttattttatttatttttttgagacggagtctcgctgtcacccaggctggagtgcagtgacaccatctcagcttactacaacttccgcctcccgggttcaagcaattctgcctcagcctcccaagtagctgggactacaagcaactgccaccacacttggctaattttcttgtatttttagtagcgatggggtttcaccatgttggccaggctggttcgaactcctgaccttaagtgatctgcctgcctcggcctcccaaagtgttaggcttacaggcatgagccactgcagctagccgtatggctttttttttttttaagaggtggggtctcactgagttgcccaggctggtctcctgggctcaagtgatcctcctgccttggcctcccaaactgctgggattacaggtgtgagccaccgcgcctggctacctgtgatccttcagagaagggggcaagggctgggctgtacggggtctctgggtcctgaaccagggttgtgactggcttgagctggacaatgctattgtgatgtcagcccacacccactgtgaaatgcaggctcctgagctctgggggcctgtggagctgctgtctagacgcagatcatggtgagcctggggccctcttgcttccagccctgagatgtgtgcccaactccagaaacctgcccagttgtccagggatcgaccccactccactcggaaagggtgggcaatgggttgcagacccccatatggtacaaggaaaccttctggaaggctctggctaggtctaattccaggctaaggcccccgtctccagccagagattagtagtcctggggtggggggccctaacccccacagctgccccctcaaagtgggcgctgagccaacccctttacttgaagttctgtggcccacctccctgccaaaagcttgctgggctctcttgctcggtatgtggaccagggactggatcactgtcccagccaggtgctgacacctggcctttgcagggtggcgggtatgatctcaacctcttcgccagccctcctgacagcaacttcgtgtgctccgtctgccatggggttctcaagaggccagcaaggttgccatgcagccacatcttctgcaaaaagtgcatcctccggtggctagccaggtgccagcgggtacccaaggggctgggagggcaggagtgagactgggggccattgctgtggcccagaacagaggggaaagtcagccaaaagactcagccaccaaatctccctaaactaaaatgtgtgtaccctcactcagtagtgtctgcagaccccggccccaccctcagagctgagagcgccctgtaatatgccctaatgcctcatccagctaatgaagggaccacctgggtcaccgagtgagggcttgaccagggctcccttcccactcccaacactcacccctactcatgcctccttccagacaaaagacctgtccgtgctgtaggaaagaggtgaaaaggaaaaaggttgtccacatgaataaactccggaaaaccattggccgcctggaagtcaaggtagctcaaagtacccactcccctgaccctcaacccttctcacccttgtaggggtggggcagggctaggagagaaggcaggagaatcccatcttcagagagaaacaagtgcagccttgggacgaccagacatagctgagtttggatcgtggctctactgcttagttgctgtgtgactttaggcaagtcacctaacttttccaagcccctgggttagaaaatggagattttagaggacttttaaaatggagattacagaggatttttagaggatcaagtgcccagtgtgcctgccactactctctagtcccctagttttacagatgggtaaaccgaggttaaaaaggaaagcctggcatccataccactcaccagaccaacccaactgtgtaccttccagttccccaagactcaggcctcaccctctcccctggaacttctagcttcttcccacgtctaggcatttgccccagtgttctctccaccaactcaccagagtcagaaaagcgtgggaggctcccggttccctggttcctggcgaatggaaagccaggggtgggggattccgtgggtgtcctgcccggtttcttcacacgttctccttcaccctcagtgcaagaacgccgacgctggctgcatagtgacatgccccctggcccatcgcaaggggcaccaggactcatgcccctttgagctaacggcctgccccaacgagggctgcacctcgcaggtgccgcgtgggaccctggcagagcaccggcagcattgccagcaagggtcccagcagcgctgccccctgggctgcggggccaccctggacccggccgagcgtgctcgccacaactgctaccgggagctgcacaacgcctggagcgtgcgccaggagcgccgtcggcccctgctgctgtccctcctgcggcgtgtgcgctggctggaccaagccaccagtgtcgttcgtagagagctggcggagctcagcaacttcctggaggaagacaccgctctgctggagggtgccccacaggaggaggccgaggctgccccagaaggcaacgttggggctgaggtggtgggggagcccagggccaacataccttgtaaataggtaaataaaagcagacccccggcctgcctgcctctgtgcctgcggccctcacaactgtcaccggtgcatccctgctgccctctccaggcatttgcctgctctctttcatcttttctttttcaaaggaaggaggccgggcgtgggtggctcacgcctgtaatcccagcactttgggaggctgaggtgggtggatcacctgaggtcaggagttcgagaccaacctgaccaacatggcgacaccccgtctctactaaaaatacaaaaattagctgggcgtggtggcaggcgcctgtagtcccagctactcgggaggctgaggcaggagaatggtgtgaacccgggaggtggaggttgcagtgagccaagatcacaccacttcactccagcctgggcgacaagagtgagactccgtctcataaaaataaatcaataaataggccaggcgcggtggctcacgcctataatcccagcactttgggaggccgaggcaggcggatcacaaggtcaggagatcaagaccatcctggctaacacagtgaaatcccgtctttactaaaaaatacaaaaaattagtcaggcatggtggcgggcgcctgtagccccagctactcgcgaggctgaggtaggagaatggcctgaacccgggaggcggagcttccagtgagcggaaaccgtgccactgcactccagcctgggcgacagagcaagattccgtctcaaaaaacgaggccgggcgcgggggctcacgcctgtaatcccagcactttgggaggccgaggtgggccgatcacgaggtcaggagattgagaccatcctggataacacagtgaaaccccgtctctactaaaaaatacaaaaaattagccagacgtggtggcaggcgcctgtagtcccagctactcgggaggctgaggcaggagaatggtgtgaacccgggaggcggagcttgcagtgagccgagatcacgccactgcattccagcctgggcaacagacccagactgtctcaaaaaataaataaataaaaataaataaataaggggaatacaagaatggctactccatagacagaatacctttttcttcttttttgagactgggtcttgctctggcacccaggctggagtgcagtcacgtgattacggctcactgcagcctcaacctccctgggctcaagcaatcctcccacctcagcctcctgagtagctgggactacaggcacgcaccacgactgccggctaatttttgtgtttattttagagatggggtttcactgtgttatccagactggtctcaaacttctgggctcaagtgatcctcctgcctccaaagtgttgggatcacaggtgtgagccaccatgatggcctactttctttccctcaaatatctctcctctcagagattttccctgatcatacttctcagttctccttctcagttactttcgttttttcatttttttcttttctattttttgagatagggtctctgttgcccaggctggagtgcagaggcccaatcacagctcactagaaactcagcttcccaggctcaagcagccctctcacctcagcctccagagtagc

SEQ ID NO: 96993 - DNA, 24177 bp, Homo sapiens
ctgggtgacagagtgagactctgtctcaaaaacaacaaaaaaaattttatggacactgaaatttgagtttcacataattttcacatgtcacaaaatactaaccttcttttgattttcaactattcaaaaatgtaaaaaccagcccggcacagtggctgaagcctgtaatcccagcactttgagaggccaaggtgggcggatcacctgaggtcaggagttttagaccagcctggccaacatggcaaaaccccgtctctactaaaaatacaaaaattagccgggtgtgggggcaggtacctgtaatcccagctacttgggaaggctgaggccggagaatcacttgaacctgggaggcggaggttgcagtgagccaagatcatgctactgcgctccagccaggacgacagagtgagactcctctcaaaaaaagtaaaaactattcatagcttcagggccttgagaagccagatttgccaaccctgatacaaatgactgaaggctgtgctgccatttcctgtgctgtaagacagtatttaatatagtgccatggaaatttttttatttttattttatttatttattttttttgagatggagtctccctcttgctcaggctggagtgcagtggtgcgatctcagctcactgcaacctccacctcctgggttcgtgccattctcctgcctcagcctcctgcgtcgtggaaatattcttcataatatagttgagtgaaaatgacacgttaagtcgctgggcgcggtggctcacacctgcaatcccggcactttgggaggccaaggagggtggatcacctgaggtcaggagttcgagatcagcctgaccaacatggtgaaaccccttctctactaaaaatacaaaaattagccgggcatggtaatgctcctgtaatcccagctactcaggaggctgaggcaggagaagtgcttgaacttgggaggcggaggttgcagtgagccaaggtcacgccactgtagtccagcctgggtggcagagacagactccatctcaaaaataaataaataaataatacaaaattagccaggatgtgtgtgcacgcctgtagtcccagctactcaggaggctgaggtgagaggatcacctgagcccagggattcaaggctgcagtgagtcgtgatcactagtgcactccagtatgggcgacagagaatatcctgtctctttaaaaacaaaacaaaacaaaaaaaaattagggccgggcgtggtggctcatgcctggaatcccagcacttggggaggccgagatgggtggatcacctgaggtcaggagttcgggaccagcctggccaacatgaggaaatcccatctctactaaaaatacaaaattagccgggtgtggtggcacacggttgtaatcccagctactcaagaggctgaggcaggagaatcacttgaactcgggaggcggaggttgcagtgagccaagatcccaccattgcactccagcctgggcgacagagcaagactccgtctcaaaaaaaaaaaataaaaaataagttgggaatcaccccactgcccctgaaagtgggatttcagtggcacgtcccattctctttagaccatgctcgacagctgaccaaggccatgatgcgaaaggccacggccagccgcctggtcacgcagcgcgatgcggacgtgcagaacttcgtcagcttcatctccaaagactccatccagaagtccctgcagatgtacttagagaggctcaaagaagaaaaaggctaacgattgggctgccacaggcttacggccacacgtgcccctgtgggtcccagggaggtcttaaacaaggtatttttcaacttaaaagtactgccagcgtttcattttgctgatgttacgtagaagttcctgttcctcatagcccagtggcccaaggcccagccacacacaaacacacatgggtgcctgtgcccgtcaggcaaggggagttggagggcagccttttgacttgggattgtgactggcaggggatgccattctggacctggtgaggttgccacggagtgtctctgttcccaaggcagaatcgtaagtcaagtccctggtcatccattctggcctttggactgcctgctcttaggtgtaaggccaggtggtcttggcccccatgacccacacagaactccccagggaaaagccctttggtcactgcccttactcatcaggatgaagagcgcacagtgaatcagagcaactgggggatcctgagccagcgggagtgggactctggaggcagctgtgctgccagggatccaaatgtcccttaagaaggattttgcaagaaccaaactcatccaaacccttgaaacaaaggtttttcctcccatgcgattcagaccaagttaccacatcttgctaagatgtgatgtttcaaaaaccagaaacctcatcgggccccagtcagtgacccagtggacccgtgggcctgccttttccctatcctaatgtgtccttgcccaggcacagggcagcagccttgaagggctgagccacggcgagctgggcggttctttgcacgggaccttagtcccaagccacctgcctgggcagggaggagtccagcccgcccactgctctcaggctctccaaaagctccagggctgctgactagctggggctggcctccccttgcagtgctgggtaagaccgggctcttgagacagacaagtgcctgggggcccctgcagggccctggaatgggggctgcggggtgggcctggggagagctgttctgagagccccgagggcccaggaggctggtgtgttggcgccatccctgtcccagctgtgctcacagtacaggctcctgggagcgtttgtagtttccacagaggatgagcaaggagcatccctgagctgccttctggggccagcaggctccgggggcagccacgtcccaccaggacatggggtgggcagcccaggccatggctgcccctaaggagctgaggctgggtcctaaggaaggacagaggcctgggagccaagctgtggggcccgaccgggagcagctcatttattgagcagacatctgccgggcagtgccccctgcacccctcatggggctcacaacaccccatgaggtcgctggatgcagcccgtcccacagatggggaacggaggtacagagcagcacatcacgtgtccatggcccctggtccacgcccagccgactctgccttggggcctcactgaagggtggctgccaccctgaaggggccactgttgggccattcctcagagccagggtctgcaggtggcatgccccagccaggcctcgagtcatcggtggaacttgagggtcacctccactggaaagtggtcgctgatggcaagagcctgtggggacagagtgagcctcaggggaaaagtgcaccccacccacagggatgggaggggccggtgaggcctgggtgcccacccctgctgctgcctgcggtggggcaggggcaggggccggggcagagggtgtcaccattggccctttgagggaaaggcaaggtaccctgcctgcccagagctccacatggggtgggccgggctctccagggtccttggaaacgagccctggtgcagggaggaagctgaggtggccctgccttgggcgctggaccctccctgctgcctgcgtgcgcccgggcggtggggacccaagaccagcaccgccccacggcccactcgcctgagtctggtccaggccgaattcctcctggaagtcgtgcacggtggccgactggggcttcaggctccggcgcaggcgggcgccacaggccacaatgcggtcgtaggcgcagtctgagttgcccaccgtggtgtcggcgctgtcagggatgagccacttgaagacctcactgctcctcagacggatggcggcccagtcctgcgcccgcacatagctgcagtcggcgttgaagtcgcccaggaacagcatgtcctgcgggcgccgcggagccgtgtctgagccgccgcaggagccgtcgaggtcccgccctcatgaaccagacccccggggcgcgcctgcagggaccccgggaccgaggggtgggcttacgtcggtgccccacttgtcgatcacgtccaggtacacgtcgtagagcgcgtcgatctccgccacggcttgatgcggcgccgcgtgcagcgggatcagcaccaggttctgtgctgctgcgggaaggggtgggggcgtcagagctcggcgggaggggaggggcggggcccgctcaccggtgccgggggccgagaacttgaccacgaagggctcgcggctgaagacgtcctcggggtctgggtacaggtaggtgtccacgaccgacaccgcgtctttcctaggagatggggaggacccgctgagcccccgacctgcggccccgcgcgcccctccctgcggcccgcccctcacctgtacacgaacaggtacatctccttgtactggtcccggcccaggggctggctgctcacaaagctgtactcgtgctcggacacgctgcggagacaggggcccgctcagggtcggggcgccgcgccggggcgagatcccggcggggggtcgcgacgaggggccctgcccaccacacctgttgatctgctccatgagcgcggacacggcgctgaggtctgggtctcgcacctcctgcaccagcgcgaggtcatagccagccaggatctggggaggagcggcgggtgcgggggtcagcgcggtcagcacccctaaacgccgccccgccccggcccgggccccaccttcgcgatgatgctgccgcaagcggggtccgacactttgctgtcaccgaagctctgaatgttgaaggctccgatgcgaagcgcggcggtcccggcggcttccagcgcccagagtgcggccagcagagcccggggcccgcccatggcgcggagcgagaggctgggagggacagacgctgccgcctacgcagacccgctgtcagacccaccgacccaccccttccctccgcggccgccccttgacggccagtgcgacgcggaatccgcccctgcgttctgcaggctcccagggcactgctgggctctcagggaccgctgccttctcactgcgcgggaagctgcagccggaatggagggtccggcccatccagccccagctcagggcagccgagagactcaccttggatgtgggtgcagaggcccgaggctcagagatcctagggggatggggatcccgggtccaggctgcgggcgtgtccgacacaggactgcactgactccctctggcagtagctctggcaccaaggcaggggccggtatttgaggtcctgggccagggaggggccgggctgcactgggtcccgccccctcgactcagctgggtgcctgatgaactcctggctttcattcccatggagacccccagggtaaggggtgggagacctgcctgagccggttctggtgccccagacctgtcccaaaaccgtcccagaagcccctgccagccccctaggagggaggtagacggtcagccacatcccggtgcggctgtgttcttgtcctcgcccctagaaattaggtcgcctagactctgcctccctgagcagaatcccttcagggaaagcaaggcagcgcaggtaggaccagccacactccctacccagcatctcctgctgctgctccacctgctcaccctgcggtggaggccgaggctcccagatctccctgtccccgtccctggtcctcccacccacccacaggcctcaggcagcgcagctgggggcacagctccagctgggcagggcaggaggctgttggtcaacatgccaatgacacccacacagcaccaaggcgccgccagggctggcagaagcccctgggtggggcggccaggcacgtgagtctaggagtggcctgggaggcaggtgctgctgcgggggcctgggcaaaggtggtggcaccagccgcggaggctgccactgccacaacatcacaagctgcaggttctcatgttttattgtaaagcaacaagaaactcttatgtacactgtccgtcttggggcgcctccatcctgtgccatcttctctaccaggccaggcaggcatgggtggggcgctcaragtcctctgccctgtccctgcccggccaggaccccgcagacctcatgctagacgatgaccgtctgcacctccagctggccctccggcgaggcgatgaccagctcgcctgcatgctccaggatctcgatgtcctctgwtgacaccatggtcacagtggcctgttcagtgccacttgtccctgcccgggcggcaagcacagtgccctcgctgatggccgaggccagcgtcatggccacctgctctgtcaggctctcgggggtggcratggtgatggtgtcggcggcagccgcctctgggcccagcgccgtctcctcgtccatggtgacgttctgcacgatgatctggtggccggcgctagcstggtgcacgatctgctgcaccaccttcatgatgtggctgtccacctgcagggccacggctcagcaagagcggctgtgccagggagcctccccgcccccgcctgccctacccctcacctctgtctgggtgccctcgatgatctccgtggcctcactggtctccgcatcgtccgcagtggcctgggcagatgggcagaaggacagaggtcagccttggctgcccctgggtcccagcacggccccagggccccacacccacctcgatgatatactcctgggtgtcagctaccacggacgagaactccaccaacactgtgtgcgggtcttccgtgaggacggtggtggctgccgcggggctgtcctcagacaccagcaactcctccacctccagcaggcagccccctgtgggtggggactcggtcagggctaggcaagccccggccccctcccctccccctcccacctccaccggcccagacctttggtgcgcaggtgcckgttcagcgtgccgtgctcggcgaagccacggccgcacttgtagcacttgaacggcttctcgcctgtgtggtgtcgcacgtgccgcaccagtgagcccttctctcggaagccacggctgcagaactggcacacgtgcggcttctcctccaggtgtgtcctgaagtgcacctgctgtgcgttctgtggagacacctgtcagtgccagcctggccttggccacaacagactacagctctcccctcccgcctstggcccaagggaggggctgggtcaagactgagcatggtggaggcagggaagggggtgcacctgggccacggccagggagcaggatggggggatcaggcgccagggtcctgcggccagagacccaccttagtcttgtagcgcttgccacacttgggacaagggtagggccgctcgtctgagtggacgcgccggtggccacgcacatgggcaatggtcttgtagagcttcccgcagtcgccacagcggaagcggcgctcacgcacgtgcacctcctggtgcttcttgagcaggtaggccttggggaaggccttgccacactgcgcgcaggcgaacggcctcggccctgcagccacacacagcatcaggccaagcccatcacccgcgggcccgccaggccgcctgccacctgcccacagatcccctggctccctgctgtctatggacccaccctggacacccagaagcaccccggccacctatagcccatccactgccatgggccacacacccacccatcacctaccggtgtggcccctcttgtgggcctccagggtggctgctgtcgggaaggtctcactgcactgaggacatgggtgggtcctgggcaccgctgaggcctcgctggccacctgctggggaaccacaggaaggtctccagcacccggggcaggctgtgccctggcagtaccaagaacacaaccatgggccccaccctggcaggctcccttgtggccccagggaaggcagtaaacagatcaatggacaaagtcactgcagaaagccacttcagggaggcgaaggccagcgtggggacagcccctgggatccagccctgggaggagcccrcaggtggtgctggcacctactgtctccagcggctgcacttccagtaccggcagctgcggggctgccactgccaggggctggggactggacccggcagcaggagctggctccagggcaccctcctccccagcagcgcgctcaaggacgatgccggagttctgcatggcctggtgcagcaggttctcacggctgcsctcgctggagcaggggagctcctgggagacggggggctgcaggggaggcagagagaggaggctggccaggcagcctggcatccagcacccaccccatggggcagacgcacgccaggagccttgtgcaaaycctcagacccccatggcgctcccactggccctgctctccctgtgggaagcccagccctcgcctgcctggctcagacccctggagccagtgcccagaacaaagactggcaccgagcaggcagaagacagagcagccctccggggccccccgtcgcccccacctctggggccagggctttcatgcccagggacagctcctgcatctggacgtggacttcgtggatgacggtgcccttggcatctgtcaccaggtgaatcacgggtgaagtctctataggctcgcctgtcaccgatgatgtggctgtccccaagccggcagctccagctccagaaccttcaaggtggagtgagggagtgaagatccctcacacaccccagtggcggctgcgtccacagccagcccccaggaccaggcagctgcccgcaccatgctgacctgcacgtgcgtcctctttgctgacaaccacgtccttgctcacactgaagcggattttctctgtgcagggggtgagagacttgaggtgccgggtcagtgcacccgactcccggaagctctttccacacttggagcacttgtaggggcgctcatctgcagagagaacctagtcagccccgggcagccccagcaggctggcgacaaggtgacaaggcgaaggcaggcaggggcccccgcctcatcccccaaagctggggaatgcgaggctggggcaccccagggccaaccatcggggtgctaccgggctccagcccgaggtgcggccagctcacccgtgtgccgccggtggtgccggatgagtgagcccttggtgcggaaggaggccccacagagcttgcactcgtggtccttgcggctgctgtgagtgaccatgtgggccttgaggatgctgccctgtgggggagggcgtggcagctcagggccctcctgggggaacaggagggggcctgccacccacacactggctccccgcacrccggctcaccgtcttgaaggtcttgtggcacagcgcacacacatagcggccatccttgttcaccagtagcttcacctgggcctgctcaccctcccctgcgagccccagcccctgctggygggggctgcccggggcctcggccatctcaccgtctcccagctccgcctcagcagccacgatgacctctttgatgtgcccaccacctaggagaagcatctgggcctaagccccaggacctgcccctgtccagagaccccagagactgctggctccaggggaggggacctgctgctctgagccacaccctggacccaacctgcactgagccctcaacacacaggtccgagcaacagccaaggtcccattcacctctccaggtcagagtgagaggtggagagacacctcccgactctgtcaggctgcccagagatgctccagggcccctaaatgtgtccacagggagacccaccatggagcacagatgccccatccccaaagccaggaggacgtgcgaatcctggtgacaaggtccttgggtgaagagayagccgcctgtcctgctcgctgccactgctcctgccactgctcccaccaacatagggaggatgtgcgtccggggccactcttccatcggaggagatgggctgggccactgcagcagggcaggcaggcctggccagagccccgtcccaaggcaggcttggcctgggagagtgaacgctctccagacacccgggacagcctgaggcgaggaagctgggcttttgcacttctggaggatgctgggaaaaatctgacaatgtgcaaagctaggttgtaaacacagttcaggttttctgctcataaagatgacaagtgggaaacagctgtgaagccactgcttagaaaccacctcagtccggctggcgtcttgttttgacaagctgttctcttgaaacacgacaaaagcgtggtgactcagaaacaattaagagcctctcctgcccgagcccttacacgctcgatgccccaggagtgatcttccaaaggacaraggcctctgatggggagracctgggggaacatggctgctgcgaggccagaggagacgcgaactttttccgcgaagcggcaggagggcctggaggtgggttccaactgcccacacagctgaccgcacccctgcacccgcaaagacaggacctggcacgccccagcccttggccaccagcaggcaggaccctstgccatctccactagaggccaacaggagagctagcagccctggactaagcccaccgggcctgctgactggccaagggcacacacagagtacccaggatgcccgcaaaggggaaaatcccaggggtgccagagtggcagrggtgccaagaggggctgctgaagcacagggaggggtgctgagcctagggctggaggctgctagagtttaggtgggtggaaaggggcctggctggccagagacccagcccagagaccccgccagaacctaaggagttcatgctcccaggtgacgccaccatcccagaaaccaaacgccaggtcaaggccagagcccgccccacctcccacatgaacattccgagctctgagtggcattgatgagtgtcttggtcgcaggaatgccagggaaaggcagcacggaggtgagacaggtgccctggctgcctcctggagagcagcctgctcacaggtgcccttcccaggccccgggttggcctccgccacggctcctccaccccctcttcctgctgcagccagtccccagggctgcccaaggccaggttccgcctggtgcccaaacctacttcctgtccagctgcccactccccgcctgcctcagccccggtccagcaggctccccaggcagcagccatgccccgccccacctcccacagcatcaggtccctagacagctccttccctcgcgtctgcacacctagccactcgcccctgccgcacccccaaccccagcagcccctagctccctcaacctgcccaggccctggctgcctctgaatgcccccctgcacaagcatctgtccccgatgagagcytgcccatccagacctcgcaacagcccctcccacagcacatyagggagagagacatcttcacttaaaaagtagccatcaaagagtcctggcattgcacgctcataaaagccccatgaggaccagtgtagcaatcaccactcccacaccagagggagcactggggagggcaggccacggccagcagcaagtccgagcccagctagagaggcgggagagtcccgtccaccctgtacccaccctccagagccgctgctgggcgagtgggccattctggtgggtgcctggtggatgttgctgcctacgggcagggagcaggaaccagggggtggcagggaagtggggaagattctgggagggacacggcagagaccacccgggaaagctgacgggagagagcacagcccaatgactccctggtgcctgggtgtgcccccggccactgtggacacctgaggaaggcccagtgcccaacgcttcctcctcctgcaggctgtgcccgcagaaaggctgccacgaggccgcggcccctcccagccaggccctggtctcgggagagacgagcatacaggcagcaggggccccatcctctggccccaaccacgaaggtctatcaggccagcgattcatggaagtcggcttaccaacaaggtcagatgcgtggctgatgtctgctgccagagaggccgcctccaccacgatgtgggccacagtgatgggctcctctgggcctggtgctgccggcaccacctgccaaagggggaagaaaacaggggagtcgtctgtatgctccagagttagttctcagagaagaggcctgggctctgccagtgtaaagctgtggaggtgtgacttgtggtgctcaggcctgggtccacgtccttgggacggctggggtgggggctctcctcttccccaacacgaccaccggtcccagtccaatcccttcmyccccgggccagggtcagcgccgtcactctcacacctctggccacgtgggctggacctggagcacagggcgcctgcagggagggagcagcaactctggcaggaagctgggccagtctgcaggaacaatggcacagtcccagcccgccacatccggcagagcggtgtgaggagagggccctggaggtgtgggccagaggccttcctggaggagggggcacctctgggaggagcaggtaaagagcacaggctcagagtggggtgtccagggtccagcatcatctgggccacggcccactggtggccagaggccactgaccactttctgagcctgctctcctgaccgtgcaatgcggatgacaagcgcccgctgcggcgtgtgcggggttcacaggcctgtgtatccagcccaagctgggcgtggggctcagcaaaggtggccatttgctgatgagatggcgggaccccccagggccacacttcacgtgtgaagtccctagggactgtgtgcacaggacagaagataagccaaagagacagaagctgccatggtaccccagagccaaaggagaccctccagctccaagaaagaagagatcccggcccccaacagcacgggcttcgaccagaggctgccaagaaggctgggccaccgcaggccctccaggacgccccagagcaccacaggctcacacacccggaccctcccacaccgcagccaggtgcctgccctctgcccgcccacgtggcccccggaaccggctgcacaggtccatcctgaagcgcggccacctcccccacctgtcaggtgaacccgggaggggatgggggagtgggtgagggctcacctcctggcccagcaaygctgtggtggcaggggtggcaggcagggcctccggaggggcccgctggcaggccttctgaatcttgtgctgaacaaaatcctccaaggcggtgaactctgcctggcagcggccgcatctgtgyacatcgtcctcatctgcaacgagcctgctgtcagcagggcctgggaaggcggaggctgggcagccagggctccgtctggcttttcctccagccctagaacagattcccccaggaggccatcagaagcagagctacttccccaggctgctgagaacacactcgggcccaaamcaaggtcatcccaaggtacagcccctatcctctgcaggtctgcaggggccagacccaccctcaggaggtcagcacccagcagagggtggccctgacagcacgcttaggctgcagggacctgctaaggctgccatgctcaaaacccacctcagcgactgacaggcgagaggcccagagaggggctgggaggcagagggactcctccatgctaatttggggacagtaaaggaccaggatttaagactgctggggccgggcatggtggctcacacttgtaatctcagcactttaaggggccaaggtgggaggatagcttgagcccaggagttcaagacgagcctggtcaacatagcaagacccatctctaccaaaaaaaaaaaaaaaaaagtttttaaaacattgttaaacatttaggctgggtgtggtggctcacacctgtaatcccaacactttgggaggctgagacaggtgtatcacctgaggtcaggagttcgagaccagcctgaccaatatggtgaaatcccatctctactaaaaatacaaaattagggcggtggctcatgcttgtaatcccagcactttgggaggctgaagcgggcggatcatgaggtcaggagattgagaccatcctggctaacaccgtgaaaccccgtctctactaaaaatgcaaaaaacttagccaggcatggtggcaggtgcctatagtcccagctactcgggaggctgaggcaggagaatggcatgaacccggcaggcagagcttgcagtgagccgagatcacaccactgcactccagcctgggcgaaagagcgagactccgtttcaaaaaaaacaatattagccaggcttggtggcgcatgcctgtaatcccagctattcgagaggctgaggcaggagaatcacttcaacctgggaggcgaaggttgcagtaagccaagatctccccattgcactccagccggggcaacagagagagactccatctcaaaaaacaaaaccaaaaaacaaacatttagccaagcgtggaagtgtggcggcatgcacctgtagtcccagctattcaggaggattgattgagcccaggggtggaggctgcagtaagccatgatcacaccactgcacttcagccagggcaacagggcaagaccctgccttaaaagaaacaaaaacaaaacaaacaaacaaaaactgcgggagtttgagcgtgccctggagcatgtgagtggccatctcctcatctgtaaaatgggctggggcccaggagactgatgcccactggctctggctgagaggcaaatgcagggagctgacccacaaccactctgctcactgacttgggactttactggttcccaaggttgagcccgtcaccattgctgtgccggaccccggtcgtgcagaagagaccaccccctcactgtgtgccaagcacctcactggggacgtcaccaaatcttgccagcaccctgtggaaatggagagaactattcccatcctaggaaaatgacctgaagttcaaggtcaccaaacggctgagtgtcagggacagtrcctgtttacacaaagggataggagctgtttcttctgcttccataaaagcctgccagctctgaccattcaccttcagtccctcggcaggatcaaacccaggcctgatgcccgaaggagctgggcaaatgtttactgttgaatttgagggcggagaaagggccaaaccacagctatgactcgcctgcaggggccacccaacagagtcgtcctctcctgatggctcccagtcacaaaccaagctctaaggtgcccaccaccctcttccccttcccaccctactcctgtgtctcactcggctccagggcattgccactgaagaaccccctaccccagaaggggacacacccagcccatttcacaccagacaaggccacaagcaggcccagcaacctctaaagggactcctcgccatgagggcactgcccttctccaagctggaacgagaaggggcaaggaaaaaaggcagagactatgaatcctatggggacaaagacaagaccaccctcaacccaatcattaacaacctcccttcctgtctgacccaatctgcatcttttttttttttctttcaaggcggagtctcgctttgttgcccaggctggagtgcagtggggcgatctcagctcactgcaagctctgcctcctgggctcatgccattctcctgcctcagcctcctgagaagctgtgactacaggcgcctgccaccacggccagctaattttttgtatttttagtaagacagggtttcacctgttagccagggtggtctcgatctcctgacctcgggatccgcccrtctcagcctcccaaagtgctgggattacaggcgcgagccattgcgcccagccttttttttttttttttttttttcctaaacagagactgggaggagccgggcacggtggcgcacgactgtattcccagcactttgggaggctgaggcgggcagatcacctgaggtcrggagttcaagaccrgcctggccaacatggagaaatccagtctctactaaaaatgcaaaattagccgggtgtgatgccgcgtgccgtaatcccagctactcaggaggccgagtcaggagaatagcttgaacccgggaggcggaggttgcggtgagccgagatcgcaccattgcactccagcctgggcaacaagagagaaacgccgtctcaaaaaaaaaaaaaaagaaaatagagacggggtcttactatgttgcccaggctggtctggaactccttgggctcaagtgatcctctcacctcagcctcccaaagtgttggggttacaggtatgagccacagtgcccagccatctgcagcctcataggacaagctcagagggtacagacccaagctccatctccaaaagctctcagtgcccccaggaatgagcccttagtgcatccccaacactgctctcggcacatgacacacaatcttttttctttttttgagacagtcttgctctgtcacccaggctggagagcagtggtgcgatctcggcttactgcgacctccgtctcctgggctcaagcaattctcctacctcaccttcccaagtagctgggattacagacgcgcaccaccacgcccagctaatttttgtatttttagtagagaaggggtttcaccatgttggccaggctggtctcgaactcctgacctcaggtgatccacccaccttggcctcccaaagtgctgggattacaggcgtgagccactgcgcctggccacaatctttattttaattcccatgatgcttctatgaggcagcagagcccggaagttaaaggggctgtgaaggccttcacagtgctgagatccaatccaacccttgctacttaactacctgggtgaccctggtcattttcttttcttttgagacggagtccggctctgccgcccaggctggagtgcagtggcgcggtctcggctcaccgcaagctccacctcccgagttcacgccattctccgcctcagcctccccactacaggcgcccgccaccacgcccggctaattttgtttttttgtatttttagtagagacgggtttcaccatgttggccaggatggtctccatctcctgacctcgtgacccgcccgtctcgacctcccaaagtgctgggattacaggcgtgagccaccgcacccagcccacccggtcactttcaggtctccaaccttcgattttcctcatccccaaaatgagaataacaataacatccacctgtcaggactggtttgagaatgaaaaaacctaaagcaggataagggcttgttacattactggcagaagccgccgccccattctgtaggggaaatagaggttcacagaggtagggtcacctacccaggatcaaagarctagaaagcggcaagtgtgggactggaaggggccacaggctggctgcagtgcaccagccctcttgcactaggctctgctgcctccctacggacaggcccagagcccagatcctggagaaaccgaggccccaccctcttggaaccaccaacagggccctagacgcccatcaggtgcaggaggaaggggcccagaggaggggagggccaggctcaggcatcggaggcagagaagggccgggacgccggcgtctgcgaatgtctacaccgggcgcccgggggctcagcaacccgcgagcacttgtggacgcacaccagagaggggggatgacaggcgccccgcaggagaggcccgtgagggtcgcagcaaacctgggggtttcgtggagggctgtgagggtcccgcgagatccgcgaggtgtctgggtctgggagggtcggtcgagcccgcagctcgggccatccgggcctctgccagcccgggatgaactgcccgcaccccggccgcaccctccgggtcggcccggttaccttcctcgctgaagggcgccgggaggccgaggaagccgctgggggccaaggccgccgccaccgccgcaactgcaccctcgcccgcttcccgcccggcttcggcctgggcttctgccgtatgagcggccgtcacccgcactgccatcgcgccctccatgtcgcaacgcgccgcaggaagatggcggatttacgaccatgtcgtcataacaacgggccgcgccgaggccagcgtgagggaacggcaagaggagggcggggcagaaccggagcggattgacggacaggcggggagccgggcctggatagcggtgtggccttaaagggcagaggcggggccgggcgcgctgagagcgaagatggggcgggactgtggggagggcgtggttacggtggagcagattgccagccagggggcggggcggcagaaggacctatgttcgaggctgcactcggatttgagagccagagaacgcgaggggcgagcggactggcggctgctaggcagccgcgccccagcgcttccgtacctaaggacaggtcgccccgcccgcggctgctgctgggaagccgccacagctccaaccaggggtgtggtgcctgctgcccactgaccgcctagggtgttagagcctcccaagatggttacccgggtcacgggaaaagaacacgggtcggggatggctcatgggtagctctgcgaagctgttttattcttttatatacttttaatttttttttctttcttttttgagacggagtctctttctatcgcccaggctggagtgcagtggcgcgatctcggctcactgcaagctctgcctcccgggttcacgccattctcctgcctcagcctcctgagtagctgggactacaggtgtccgccaccacgccaggctaattttttgtatttttagtagagacggggtttcaccgtgatagccaggatggtctcgatctcctgacctcgtgatccgcccgcctcggcctcccaaagtgctgggattacaggcgtgagccaccgtgcccagccactttttaaattttttaaaatttatttgcattatgtattttaaatagagacagggtcttgctgtttagactaggctggtctcaaactcctagcctcaaaccattttcccatttcggcctcccaaagtgctaggatgacaggcgtgagccacgactcccagccacgttgaatttttggttttggagatgggggttgtttttggtttttgtttgtttggggtgtttgtttttgagacagagtctcactctatcacctaggctggagtgcaatggcgcgatctcactgcagcctccgcctcctgggttcaaatgattgtcctgcctcagcctcccgagtagctgggactacaggagtgcaccaccatggccagctaatttttgtatttttagtagagacagggtttcaccatgttggcctagatggtctcaagctcttgacctcacgatctgcccgcctcggcctcccaaagtgctgggattacaagcatgagccaccgcgcccggcctgtttttgttttttgagatggagtctcgctctgtcacctaggctagaatgcaacggcacgatcttggttcactgcaatctccgcctcccaggttcaagcgattctcctgcctcagcctcctgagtagctgggactacaggcaactgccaccacacccggctaatttttttatatttttaggagagacggagtttcaccatgttggccatgctggttttgaactcctgacctcaggtgatccgtcccccttggcctcccaaagtgctgggatgacaggcatgagccaccgagcctggccagatttttttttgaaacagcaccttgctctgtcgcccaggctggagtgcagtgccgtgatctcagctcactgcagcctctacctcaaccacccaagtagctgggactacaggtgcccatcactagctaatttttgtatattttgtagagatgggtttttgccatgttgcctaggctgctatagaactcctgagttcaagcgatctgcctgcctcagccctcttacatacttttaaaaaattgtgggccaggcacagtggctcactcccgtaatcccagcactttgggaggctgaggtgggtggatcacctgacatcaggagttcaagaccaaccaggccaacatggcaaaattacgtctttactaaaaatacaaaaattatctgggtgtggtggtgcacgcgtgtaatcctagctactcaggaggctgaggcaggagaatcgtttgaacctgggaggcagaggtttcagtgagccgagatcgtgccactgtactccggcctgggcaacagagcaagattccgtctcaaaaaaaactgtggtaagtgcacataaaatttactattagcgacattcacagtgttgtgcaactatcacagctatgtgggtccagaacctttccggcaccctgaaaggaaacctgtgcctttgaagcagtgattccccatccgcccctccctgccagccctgggtagacgccagtctaccttctgcctccatgataaatttacctgttgtgaacatgtcctacaatatgtgactttcattgtttgttttttgagggtctcactctgtcatccaagctggagtgcagtggcatgatctcggctcactgccacctccgcctcccgggttcacgccattctcctgcctcagcctccggagtagctgggacgacagatgcccgccaccatgcctggctaatttttttgcatttttagtagagatggggtttcaccatgttagccaggatggtcttgatttcttgacctcgtgatacgtccgccttggcctcccaaagtgctgcgattacaggcgtgagccactgcgcctggccctgttttgtttgctttgagatagggtctcactctgtcacccaggctggagtgcattggtgtgatcctagcagcctccacctccaggctcaggtaaggtgatcggcagtcaggttggggtaacaatgggcccgctttctgcaagtaggttgctcaccactgcaaggttttgagcagagggaatgatggtgggtgttgcagaaacatccctctaactgctgcacagaaaaagggactttaggccgggcccagtgactcacgcctgtaatcccaacactttgggaggctgaggcgggcagatcacctgaggtcaggagttcaagacagcctgaccaatatggtgaaagcccgtctctagtaaaaatacaaaaattagccgggtgtggtgacggctgcctgtagtcccagctactcgggaggctgagacaggagaatggcctgaacccgggaagcggaggttgcagtgagccgagatctcgccactgcactccagcctgggtgacagatcgagactctgtctcaaaaaaaaaaaaaaaaaggggattttagggcctaagcagaagcaggaaggggctcagaaagccactgagagccagaatgggtggtctctgagtggggcaaacagaacgaagagcaggttggagcttttggagcttgagggttctggggagctgctggggaggaggaccaggagacaggtgggtgaggtgaagccatggaggaggtgagtgcagagccccaaaagacctccattcatggtgtgctgaggagtaactgagaagccggtatccaggggatttaggggtatggatgggatgattgtcccctctaaactcatgctgaaactttatccccaatgtaacagcattaagaggtgaggccttcagccgccccatccgggagggaggtgggggggtcagccccccgcccagccagccgccccgtccgggaggtgaggggcgcctctgcccggccacccctactgggaagtgaggaacccctctgcccggccaccaccccgtctgggaggtgtgcccaacagctcattgagaacgggccaggatgacaatggcggctttgtagaataggaaggcgggaaaggtggggaaaagattgagaaatcggatggttgccgtgtctgtgtagaaagaggtagacatgggagacttttcattttgttctgtactaagaaaaattcttctgccttgggatcctgttgatctgtgaccttacccccaaccctgtgctctctgaaacatgtgctgtgtccactcagggttgaatggattaagggcggtgcaagatgtgctttgttaaacagatgcttgaaggcagcatgctccttaagagtcatcaccactccctaatctcaagtacccagggacacaaacactgcggaaggctgcagggtcctctgcctaggaaaaccagagacctttgttcacttgtttatctgctgaccttccctccactattgtcctatgaccctgccaaatccccctctgtgagaaacacccaagaatgatcaataaaaataaaaataaaaataaaaataaaaataaaaaaagaggtgaggcctttaagaggcaaagggggccgggagcggtggctcacgcctgtaatcccagcactctgggaggccgaggcagacggatcatctgaggtcagaagtttgagaccagcctggccaacacagcagaaacccccatctctattaaaaatacaaaagttgggccgggcacggtggctcatgcctgtaatcccagcactttgggaggccgaggcggggggattaaaaggtcaggagttcaagaccatcctgaccaacatggtgaaaccccgtctctactaaaaatacaaaaattagccaggcctggtggcatgtgcctgtaatcccagctactcaggaggctgaggcaggagaatcgcttgaacctaggaggtggaggttgcagtgagtcgagatcatgccattgcactccagcctgggcaacagagcgagactctgtctcaaaaaaaaaaaaaaaaaaaaaaaaagttgccgggcgcggtggctcacgcctgtaatcccagcactttgggaggccaaggagggcggatcacgaggtcagggtattgagaccatcctggctaacatggtgaaaccctgtctctactaaaaaaaaaaaaaaaaaatcagccgggtgtggtggcacacgcctgtagtcccagctactcgggagggcgagacaggagaatcgcttcaacccggaggcggaggttgcagtgagccgagatcgcgccactgcactccagcttgggcaacagagcgagactcggtctcaaaacgaacaaaaaaaaaatacaaaagttagccaggtgtggtggcacacacctataatcccagctactagggaggctgaggcaggagaattgcttgaacctggtggggcggaggttgcagtcagctgagatggcaccactgcccgccagcctgggtaacaaagtgagaccgtatctcaaaaagaaaagggcatcctgatcaggtgacctcaggccctgctttgcccagagcccaggccactggcaagcatgggagtggatagacccttggaaggcagagaggccaggcacaggcagcaagactagaccctccctttctccaaacggcctcctttcccatgcaggcctcagcctggctcaacagaataatgcctgtggacattccacagccagacccaaacaggaactacaaaatcctttttttttttttttttgagatcgagtctcactctgtcacccaggctggagtgcagtggtgcaaccttggctcactgcaacctccgcctcctgggttcaagcaattctgcctcagcctcccaagcgtgtgctaccacgcccggctaattttgtatttttagtagagatggggtttctccatgttagtaaggctggtctctaactcctgacctcaggttatctgccctcctcggcctcccaaagtgctgggattacaggcgtgagccactgcgcctagcgggctacttatattttctattgcaatgtaaattgatgcaactctgttaaggtgaaatagtgtctgttctcgtgccactgaaagccatccccaggtcggcttgcagtacaagatccttacttggggagacactggggccatcccctcacagatagagactgaatgcctcctgtgtggggggcacccaaaggggtcctctagccccagatgcagggccacatcaccctgttcccaaagtcagtcctctcctataaagcgcactttcctcccagcctccgccaggaccttccccacaagtgaccatg

SEQ ID NO: 96994 - DNA, 14691 bp, Homo sapiens
ccatcatgatggaaggcaaaggagaagcaaaggcacatcttacacggtggcaggccagagcgcctgtgcaaggacactcccctttaaaaaaccatcagatctcatgagacttacttattcactatcacaagaacaacatggcaaaaactcatcatgattcaattacttcccaccaggtccctcccacaacacgtggggattctgggagctacaattcaaggtgagatttgggtggggacacggccaaaccatatcactagctaagcttttcccagcacttagtatatgccaggtgtcatttgtaaatactttatatgagtcagcacacttaagcctcacaaagtgagaaggaaggcattagtactttacccattttattgatgaagaaactgaggtacaaggcatggaggtcagaagtcacacacctggtatgttggacgtggggctgcaaaaccagacagcatgactgcagtacctgggctcttgtatgaagtgcttcacaaagtgactggcacataggaggggcccagcaaggcagcactgttatgagagctagtttgacctcccaccccacctcacccgggtccaagcttcatgctttcagagtgattgttctgtggtcagttcatgcacccttaggcttctaggaagcagaaatccaacttacgcagagtacaaggtggacgctcggcagctgagatctggacttcccaaacagacctgggtacaggtcactgtcactctccaacccaggagtcagcaaaatttttctgtaaagggctagatatattttcagcttgttgggtaaaatacagtctgtctcaaatactcagctctggtagcacaaaagcagccacagacaatatgcaaataaatgggcacagccatgttccaataaaactttatttacaaacacaagtggtgggccacatttggcccaaggactgcagtttgccaaccctcttgtctcaataccctgtttttttgccttcatgacacttatcactgcctgaaataaccttatttatctacttatttctttgttgttgttctccctccactggatcttaaccttcctatctggtttgctccaccacctagaatagatcctggtacctaataggtacttaatatgtctttatcaaatgagacagtgccttgcagatcatgggtgtttagtaaatatgtgttgactgaatgcctggcacaatgtaggtgcttaaaaatatatattggctgaatcagtgtctgcactatcaaagatgcgctataaacatgtgttgaatgaataaaggcatgcaccgtgccctgtacaaagtgggctctgtccttacgggctcagttttctcagctgtgaaatgggactgctaaaagaacttcctcatgagattgtcatgtgaattaaatgaggcgatgcatggcacccagtgcagcaccaggcacagggtaagtatgaataggcatcctattggtggctcttctgatcctgaaattgttccctttggctttcagaggaggcactgaagctgcacaatgggcccctccgcaatgcctacatggagcagagcttccagagcctaaaccccgtcctcagcctgcccatcaaccccgcccaggtggaacaggcacggaggaacgcagcctccacgggcacagcgctggagggatggctggactcgttggtgggcgggatgtggactgccatggacatctgtgccacgggccccacagcctgcccggtcatgcagacctgcagccagacggcctggagctccttcagccctgaccccaagtcggagctgggggcagtcaaacctgatggccggctcaggtagcactgggcacgaggagtgggccacagcaggatctcaacgggaaagcagccagaggggttgtggggcctgaaccccggcctcccaccctgggggaggccctctgtgaatgggtctctcctggccatagaatgatggaaagggaaggtcagcaggtcaaagcaggatcagccaacaacctgcctttggcaagctgcgggtgggatggctcagtccctgcactgtgactgtctcacctcttctggttgatcctcaagtcctacaggttccttgtcttccccttccagtgacccacccctgaccccagacgtgtgattttcagacttttctttcgagcagcagaacttcgtttacggagcacagtcataagtggaggttcagggtgctgacgaaatccaagctgctctggttgaagctgacaagtgcgaggttccctcccaaagctcagccctctgggcggtccccttgcccagggtatctcctacggtacctcttcagaacccaagggctctgcaaatgccagtttgacaagcactgcccagaccaaccatgggttcaaactccagccctgccctttggttcatttttctgcttctcttggctgggggactctggtgccagccttgaaagtcatggtcgtgggccctttcccatggaggctgcagccttaggagagctctgagcctctcagcagccctccttgggttgaactattctccttagtaactaggtaagtgggaaagccttttgatgtggcatggccaaggtccagccacaagtgcaactgccacctgtccaggggtctgggcctccttccctcaaggctgccacacaaagtagcagaaataggatgatgtttgtgagcaccagactcaagaccatgaccttctttgatccttgaaaatgggaactttgacagccatgaccatgaaactcacaaggcaacgcgatgaaactcacaaagcaatgcttggagcaaaactcctgagctagacagcacagcagcacccatcccctgccagagcccttccgttctgaggtcagacacacaaaaccttcgtcaattgcacaccggtgctgttgggagtgaccaaaccacatgaaccagacttttcccgtccaggaaatagcatttcagatttggtttttaatttcatgcccttcggccacaggctcaacgggacatgcaacataaaaatgggaaggttatttaaacaacaaaaaacagtatgatttaagtgttgagttaccagaaacccaaaaggtttccttgccacgagccccctggagtgtcatccctgttcaccaggagagctcttcgcaggaggcctcccttgctcctgtaatcccacctcccctgaatgatgggattcccttggaaaaaggtctcacccctggtagccatctgcccttcccatggagagccagtcctgacacttctctccagcgtgggtttgaaggggctgcccttcgctttgtgtgacttgtcctaatcctagccagatgtgttgccccatcccaagcctcgcaaggcagggtgtcctgttggcaatggaggacgtagagaagggacactttagatatttattatttacatgttttagtcgatgactaattagtaggtgctgtttttgcagcttgtcaattatgttaccttactaactgaagctgcctttattcacaaaaggccccttttcccatcttttcccaccccctggtgtctctctctctctcggtttctctttctctgcgtctaccccccatcctcctcatcctcagagtaaagcaggggcatcgaacaccacgcaaagaaagctccaacccgcatcttccactggctttgagtggggtgccttggggaccgttggagccttgttttttcccttatgcagagtgtcagcctcactctccctcggattccaagagtattggaattcctgagcctcccatcctccccctactcaccccccgtcacaggcacaaggaggtgacaggcagaaaacgtggagggtgagtggggaatgtgctagctgcagagagtttgtggggaatgtgctagctgcagagagtttgggccattcctgcttgctccgtggttgccttcccatggcccatctaattatgggcattcatgcgaccttaacagagggaaacaggctcctttgagagagatccatcttaggaggagggtcgtcagatccaggcagcagagtccgggagatagccattctcaacagcgattccagggatctcagggtacttttctcagaaagcccctatgatctcttttacagactctatggtggccacgcgctgggtgccacatcctctttctgcccccggcctctgcctctggccagggtttccctggggctgccgaagccactttgggagcttccctttcaccctccttgctgggccaccagtgctttgtgttcgcagcgttatttgcagtggctttggggactcagcagtggcaagtccctgtgcataatgtgaacctgcagacttcaagatggggcccctcctgcacccactaacatgtctgcctttttttgtttttatcctggaacaagtggagaaatggcagagctggctgactctggggacccttccctttttcccatggcttcatttcttcctcaccacaactaattcggggagctgagaagtcacacagggtattcctctcccttctctgatgttattaattaatagaccagagaataaggttgcagatattacatttgttgtgtttttgtgttttgtttttttttttaaggaaaatcccaaacaaagcccagcatgatttgagaaaagaggatgttttcccagggaaaataatttttttaacctgcctgagaatgatttatttatttgttggaggccgttggtcagacagcctggagcttgggctgtggaagatttcaaaagcatagggctgtggtctctggaaacctattacagcctgcagctgtgagctgagccagtgacgaggtccctggaaactcaggaaggctgacaggtgggccttggggtattggtttgtggagaaggaagcattctttaggctgcggcactccttatagtttcccacccaccgagtgacattcaggcagaaattgagctcaggagacagccagccttcccacatcccacttcacttcccggtccacacgtaaagcagtgtgtctccaaggaggcagtgagcaattcccaaggtccccgtgttgtgagaagcgcgctgctttctccctttgcaggggaaaaaaaaggctttcctggtgagatcatgagtccttccggcttcatttctcattgtgggtttaacttctaaaacgcaaatggagtttagagaggatgagcagaaccacaggacctgcccccatctctcactcactgcaattgcttctactctgggcacaagtagggtgtctgaagaccatgtttccctctggttctctagtttgcagataacacagaagacactggctagaaccttaagctttctgccaaaaagatgcagagagcagggcagtagctactggcagtggggtgtgaataaagagtcctttcacaaccaagttcactgaggatttggagcaccagcttcccagcagtatcgaggggtggagaggtgtacattcaggtggaggggtacatctaggggtggagaggtgtacattctagaaacagctgttaacacactccactttaaagacagcaagctagacctgcaggatcaaagccacacactgtggtaggggttacaaatgtttatggggcccagaatactagcatagatgcgtgaaatggttggtgtgaggcaaaagggcatggtgggggcaaggatggggactgtggtcttactggcatgcacgtgacctacccagaatgagcagctgctactcagccccaacctgtcattgtttgtaaaaatgtaagcacagtgtagtggaatcttccaatttggaagggaagccggaaatccagatttaatggaaaaaatctgatttttcaacgtcgggttttttgtttgtttgtttttgttttttttaacagatagtgggcaaagaaaaattccactgttccacgtgtacactgccagcaacctctgctctctggagaggtggtttaaagtgagattatgcattgccctggtagaagaggaaaaaagccagcatcaggtcagggcaaaaataacagcccatgttgaactcggaatggggacctcttgctaagtcattccactcctcaagagaccattccacagaggggggatggatcattcagctctcctggtcccaagattgtgctgaagggaagaaggaatagaatctggagatctggactgctgccccttagatatgcagaggtccacatctgcctggggctacagcttgtgggactccatcaaaccaggccgaaatggcaaagacagtctaggaggaggaggaggtagggtgtgaaacagccaggctctctccaaatcccaagtgttgacacagccatcttgtcccatccctggaagcctctttggaaaccacatagagctgtgctggctcacgggatgtcctgtttgcttctgcctcagttaccttactttgcccatgggtctaccacaggcgctacctcattgtgtctgctgagaagtttacctgggaggggggaacaaagttgtccaaatctgcttgagctgaatgtatgatctatgcaaattctctctctcctctctctcttcctctctggctctcttagaagtttttttgttttgttttgttttgttttgtgtttaccttgcaaacaagatactgtataggaccctcttaagatggaggagggctttcttgcgccacctgtgtctacccctcacgttgtctttggctctggtcttaccaggygtatgcagggagaaagtgacctctcttccctctccacttggctgggaatattccaactgcctctgcctacagataccaccagaaagcgggttctgcaccttgtcatccccctccctaacrtcatctactccatccctcatgttcctccaacttgcttctcccatccctccttcaaaaacaaaacaaaacaaaacaaaagccttaggtttctcctttttgaaatgtggccttaacattatttttgggaagctgaccatccatcctttccctcccatctccaccaacatcagagaagacagcatcgtgaagcttctgtggcagcctcctaaggaaggggctgccaatctgtagttggcagatgctataggaattgcttacaaatgtcgtctttaagaaaaatgttcttatatttttcctatgggcaaaatgaaggcttgggtgctcatctaaagctcagccaactcctgaagcactctctcagagcatactgctgctgtaatgggctggcttaattatcggcagagtgcttgaaaaggctttgcagacctcccctgcccccaagactgggtgactttatatgtacttcattcaagggtaaatcaggagacgttctccatttatctcttcgtccttcctgcctggaaagtgatagcactaaatattcccagcagatgggtagtgttctcaaaggaatcaccctttccctaccttcagactctattctttacccttccattgctccagtgctgatggaggccaaagacaaccccagggttttcataggaaattcactggaattgtgcgcaattgtctttgtagtccttttgccttttttttttttaaatattatgttgtcaatagcatttgtttgggtatttgttttagaggcctcactctaagttattaccgtccccttcattgttttcaaagacatgtggtgatatagtttttaaaaataactattttgttatagatcataatatgcataaaactgtacagaaatattttgtaatgtgttgattttaaaaaaagaatctgtaaataaagttttaaaaaaagaattcaaatggcacacgctgaaatatgtagatattttgctatttatttaaaggagtattttaagagatattgaactatctgaaattgaccagtaatcaaasttccaatcatctgaatgcttttccttgaggtagaatgtgagtctcagaaatgactgcattacstgcccttttttgcaccttttctgtctttttattttgcagaacaacaacaacaacaaaattgtgccttagctgtatttttttgtctaggggagtttgtttctgtctgacaaagcaacattttttgcagaaaacagtggatgtattaaatactgtatcataccaaaaacactgcaggtgtatatagatgctttctgtcatactgtgttttcagatgcagaattttaaaattaaaaaaacactgcctttatggaacagtgactatatgtggcttcttttcagcaacattgtgcatctttacacaatctcatattctcttctgtcatctgcatggtgaagataggatgactatataatttatcatccaaactgggatacttttgagagttaaaggaagcaccacgtggatgggatgctgagactgcaggcataaatggcctatcctgggaaaacctgggtgtgtggacacatttccctcataaaaactgctgtcatcttctaactggattatagcaacaacctcctataagtacctcctggttgaggcagaagtatatgatttttaaacccgtactgagtagagaataacaagaagggactgccatggaaagttgcagtttcctatacccaactggttggttggttggcaaacgtgttttcctttcctctttaccacagagactacatttcccagactgccttgctcttagctgtgaccatgtgaccaggccaatggaacagctagactgcatcttccagactgccttgctcttagccatggccatgtgactgactcaggccaatggaatgtaggtagaataggtacatggcacctctagccctggtccctaaaacctcccactggagtctctcctctctcaatctttccctatttgccagctcagatgttttgaatcaccttgattttgtacattcatccacttggcctattcaggtggtctttttggaaactttgcacagcctctaccttaaaggaaggcagagccacagtttggaaggtaactgagcccctgcatagccacataaaagaatgcttgaccagagtcacccctattgactatgacatgaaaagaaataaatatgtattttgttatgcccctgagactttcaattacagcaggctagccttaccttaattaatccaatcagaaatggaaattcaaatgtttctttgggaaaatccacattttggttccttcactcagtcggtaaagtagagagccagacaggtgaagggatttgcctgaagctacccatggtcatcagggtcaagtctagaaccaaagtttcccatcttccaatgagactttcataagtcactgggaagaccagttcctccacccctgaggttagctcactattatgtatatatgtggtttctgagggctatgcccaggggttgggagcctagatgcctgggttgtaaagatgcttctaattcacccttcaaaatccttaaaggaagacaggcactgagacacagataggattttagcagctagaacaaaataggctagatatctccccattagacacacagaggggcaaatatatggagagctgtgtcagcttcagcctccttgagcttggctcaggagagatggtgactgactccatatttagacagatggatggacccaagattcatttgtcaaaacctctttccagcctgatcttacagccaacttccctttcctctgcccggagataattcctcaaaaaatgagttcagttgcaagggaagaataaatttctaaaatctgcgtaggagtaaggatcacagttatcttattcactgtggtacctccagtatttagcacagtgagtccagcgtatgggcactcagtgaatattcagtgaacggacaagtgaatgagaccatatatcttaattaattaacaatatgggcatggggccatttgtccaagattctgtctttaaaaccatcatttgatggatagtatttgtcaaaatatgggtcattgtaaagtaagctgtgattttttaccttcaataatgaggtttctgggcctactgaagggtcagttggaatttctttcctgcttatttactgggtttaagttcattaaattcgtgattttaagagttttttttttcttctttaaggggaatgctttttcaagcagtgtaccttaaacctccacatatatatatattttaaaaaaaaaaaagacttaaaaatgggtgattaggaggggtgccctgggtgaagtgagagtagaaagctttgtctcagcaagtgcacccacccccaccagcccgcctctttcatggctccatgggatacgtagatgaccatgctttgaagtcacaccacaccgatgttgaaaacatctaggctttttgtacggttggctttgaggccttgctgccaaggtgctgaaagttgagttctaggctgggtctctgagcatgagaccaaaccaagaataattcagtccacctggtgttggcaagttgtaagggtggaaacttagagctggggcaaaaaggaggtatggctggcctgacatgttttggagactcttgatcctgtgcattcatagttagttcatttgttccactgctctgcctggaaacatcatcagccctaaccctgacagggagtactggcctgagaaccaagaggcccaggcccttcacagctttggttgtgccactgatttgctgtgtgatcatggcgagtctctcttccatgatgagtctcagccccctcaactgccaaataaatgggagaatggggcctattgatacctggggtccattcaagttcagacgtgtaagtgtacagtccaattgccacccagcaccaaatacagaacatgttaaggtgccagctccatgcaagaaaatgttcccaagatgtgattgttgatgttcacatctatgttagtcaaggttctttcactttcaagtaacagtaacccaattcacagacgtgtaatcagaaggggaatgtattaagttatgaaacgttagaagacaacaattaaaacgcaaattacaagaactaggacagcactcaggggactcaagaactgaaactggagccccaatactcacagccctctcttcctccatttttgctggcctttgtttgatattatctcctacagacagctaattccacatggtaaataaagaaggccccagaagttcttgctgcttgtcctttgaactccataacacaaaaatatcaacgtcctttgtcctcactgccaaaagggctggctctaactctggacctatcactcagatcaggcaaacaaggcactacgattggctgaacctggatggtatgctgacccctgcgaccagggcattggacggtaaactgtgattggcagccccatccccattacatgataggagtagaagagaaatggatccccggcgggagaggatggtgtcgaacagacaaaaacaacagatgtccattcactgccacagccaactgcaggcccaggtggcttctccgcttgccagtccaattcgtttctgctcctcaagtgcccaaattttctcctcccagttcctctatacctccctaaggagaaggactctgggcctatcttaagcaaatcattttaaataaatatcacatggatggtgcagatgatttcaccctcacttaattagctgtggagtgtttatgcttatggaacatgatggattgctccttgtagcctgggcacaggacactttaaaaaggcccttgtaacagccctttgctaatgatggtggatgattttaacttgctgcaggaagcaaggcctgcgtacctgccatgaagagcggcatctctctccacgtttctggagcatcagtattccaggctccacactgcgctctccactgccccgtccccttagcaggcccacagaatgctcgtgctagccagcgcatccatgatacggtgtttgtggcttgctgagtcgatgcgttaagcttctaaacatggagctgatgagaatagcaatggctaaccctgtgttagaaagcactggtaacggacgggctattaggcatcagagcagattaggtgagactccagaaaaacaccgggaatattttccaaattacacatccagactgatccacctactgccaattttcaattgcctctgaccaaaataagaacccctcccccaacttaagggtcagataatcctgtgtccaaacatttgtttttttatcatagattagctaagtcagatttgagacaaattccctaatctctctgggcctcagattccatatatatatatatacacacacatatatatatacacacatatatatgtatatacatatatatacacacacatatatatgtatatacatatatacacacatatatgtatatacacatatatacacacatatatgtatatacacatatgtatacacatatatgtatatacacatatgtatacacatatatgtgtatacatatatatatacacatatatatacacatatatatatatatatacacacacacacgtataggggataataattacctataaagctgctgggagaattttaaaaagacaaagcctgtgaaatagatagcctagtatctgcatacagaaagagctcagtaaatatcagttattttcgccttctcactccaaaggtgaaagttccttgaaggcaaggacagtgtctatattctcggcacacattacatgccttgacaatgtaagatgttgtgccagtgtttgatgaatgaatgaatgagcgtgtgaactggactgctgctacatccataatttcctcaggggcgttccatttagtctggcctccacatttgctattgcagactggatatcttcctgaagactccatttgcgacaaagtggcatcaccttgacttcagagatttaaatgagattttttcaaaacaccccaaactgtgggagacacagtattgccccccaatctctttggagggtcttggggagtcaacttcagctacaaccctgggtctcatttccactgaattggttcattttacagatcacccctttattctgcaagttcttttttttttttctcctttctgcactgtatgacctctccctaataagtaccctggtccctttattcctcaaaatacaattgtagagctatgtagaaagcagattccatcaaggcattcagataaaggattgcataagatttcaaatgatttagaatattacatacccccattctcagaagttttagaaatctctcaatggccacctgcctgggcaatttccagcttccagacacgtttccatctccctctctttattccctgcctgttctgtctgctctcctgcacctcccaagacactctgttatctcttttcaccttgctgactcttcgcagaccagcccccctcatgacttcacattccacacctaaaaaatactggaaagctaagttctctcgtaagttccaagcttctatgttcttacctgagaggagatctggtgccagctatgatgacaattactacaaaacactctccctctccactccaattactcggatttaatacaatccctggcttccatgcagtgtctgagcattttggctctattccctaggtggtgcttttaaaaatttttttgtaaaacctctggggcctccttcaccagcaagaaattattttagcatcactggcctcagtctcattctatcatcagcatctgctaatttaatcaagaatgagttgtgagcagggaggttgcaggtatccaaagatgaaactggatgaattccaggagcaagaatttctcagaactaagaacattgacattgcaaggttgggtccaataaagtacacttcttcctgccaatttcatttttcaaccttgactattcatggtttggatcagcagatagtaatatcacctttgtcatcaaggagcctaggatttattaatctaatatgggtatcggcccaaacttggcttcaaagaaacaggagaagagcaaacagggacattagaaatatagagccctgggttttggtgcggtcgcatgagatgcatcaggcgcttgatgtccctgagtcccggtgcctcagctgcccagtgcccacgttcataagaaggcaacaaattcttctcctctacagaaggattttgcaaacaatttggcaagttccaaatgattctgattgcaaatacctgaaggactgggcaagggaagaattcagaagaaacaaaactgccaccgaagaggatacaatccggttgatgattactcaaggcaatatgcagctcaaggagttagaaaaaacacttgctttagcaaaatcttaactatagcattattctgaaggattttcaaagtctccatgtattttgtttcatttaggattgacagtggacaacacaaagcccagtcttactatttgtatgtacagtatttggtgatagagagcaaaggaaaacacatcaaaacagttgccttaacactgaaaaacataccctgcattttgaaaatgtttatggatgtctcagcagttttttaaagaagaaaaaaccactaacaaatggccagtagatgctggacacaatcattagggaagtgtaaatcaaaactactatgaggccgggcacagtggctcacgcttgtggtctcagtactttgggaggccaaggtaggtggatcacttgaggtcaggagttcaa

SEQ ID NO: 96995 - DNA, 48931 bp, Homo sapiens
ggcccagtgggggagggcagggggagagcaggctgcacagggagccgactgcattaggagacgtggagggggccttctctccaagtcctgtcctgctaccaggcagcatccatggggccatcagcacagctcaccagcccccaaggtgggaaaccttccacccacagccatggtgccccccacaatgagttcccggccccagccccttcacaccacccacgccctctagaaccactgttttcaggtgtttgggggctgtcttagtcagtttgggttgttattttaaaagtgccacagacaggccgggcacggtggctcatgcctgtaatcccagcactttcggaggccaaggcgggtggatcacctgaggtcaggagttcaagaccagcctggctaatatggtgaaactccgcctctactaaaaatacaaaaaattagccgggcgtggtggtgggtacccgtaatcccggctagtcgggagcctgaggcaggagaatcgcttgaacctgggaggtggaggttgcagtgagccgagatcgcgtcattgcactccagcctgagtgaccgagggagattctatctcaaaaaattaaaaaataaaagtgccacagtctgggcggcttgcacagtaggcatgcactgtctcacagttctggaggctggaatgtccaggaacaaggcctggctgggttcagtttctgctgaggcctctcttcctggcttgtggacagccactttcttgctgtgtcctcacatgacctttcctttgagtgctaattctttcacgtctcttctttcttctttctttttaaatttttttatatttttagaggcaaggtctcactcggtcatccaggttggaatgcagtggtgtgatcacagttcactgtaaactcaaactcctgggctcaaggaatcttcctgcctcatccttccatcgtgcagggattacaggggtgagccaccacacctatctcttcttataagggcactaatcccattcacaagggccccaccctcatgacttaatcacctccaagaggccctgttcttaataccatcaccttgggcatttgggcttcaacatatacatttagcctggacacagacattcagtccacagcagggtctttacctcaaaccgtacctgggtcttctctcttcaaacctgggttttccccactgccacctgttgtgccccatctcgggtgtggcttcctgcactggaggtctgtgccctcccatcctcacctctccccaaactgaggccaggcctcctgcccctgggccttggcccttgctgttccctcagtgccgcagtctagcctgcctgtgttctgccttgggaccaagggaccaccaggccccacatccctctagaaggttctgtaacaggacctctgtgtctgtttccacaggagccttctgatggagcgtgatgccttgaagcccaactcgcccctgaccgagcggctcatccgcaaggcagctaccgtccacctcatgcagtgagccagcctggccgcctccaccctgcagaacctcagtggtggcgtcactgcgtccagtcagctgctccaccgggttagggtcaggagacggccagagcctgtttgttagggctgttagagggtgatcttcagttttacaggaagtgggtcacgggttaattttaaatgtgattccgaatctcctttcagtcctcgagaagggccaatgagcatttttcagcagtcacagccagtgtgagtgctgctctttccacctgccttgcaaattctgtttcccaggggaatgtgtctactgcctggtggttcaaaggttggaaggcagggcagaggtgggggctgattctgctgggacaggtcttccagaggcagcctccccccactgcctgtccccgtccccaccaggctgcccttgggatggaccttttcattcttttctttatattctagacagtctctgttgtctcattgtgttgctgtcccatttttcaggtgagggtaccggggtaggggagtggcctgcccagggtcacactatgagaggcccccacctgctgcctttggacgcagccccctgctgctgcatccaccacccttcttacagatcagcgcgcacatggggtccttctgctgtctctggggcgagtcttggagccccctggggggctctgttggtgctgatttggacccgtttctctttttaaactgcacatcataacagggcttcatgtcgagcatgattttaatcataaatgcacttctgaggtgcaaggattgagctcagagctgctctgttgtggcaaaacccaaagtgctgtgatgtgtggctgtgacaagcctggagcgggtcctgtgagcgccgcctctgtctcctgcttccccactgaacgcctgctgaatgtgccgctgactcagctgtgctgctttcagccctcctgtgaggggcggtcccagtgcacagatgtttttcaagttcctcagtttgtactgaaattagggattcatcagggcaggaagcaggcaggcctctcagaagggagaggaggcctccaaatctattgagtccccacagtttgctcaagcccaggcaaatttctgtgattaaaatgaattcatcagttcctccaagtctttgagcatctgtggtgcaggcctggggctgggtcctggggagatggcttctccttgaacttaaggtaggtggggcaggccaggcgcagtggctcacgcctgtaatcccaccactttgggaggctgaggtgggtggatcccctgatgtcaggagttcgagatcagcctggccaacatggtgaaaccctgtgtctactgaaaatacaaaaattagctgagcatggtggcacacgtctgtaatcccagctactcgggaggctgaggcaggagaatcacttgaacctgggaggcagtgattgcagtgagccaagatcgtgccattgcactgcagtctgggcaacagagcgagactcccatctcaagggaaaaaaaaaaaaaagtaggtggggcatctagtcaagaaaatgggaggtcgggcgcagtggctcacgtctgtaatcccagcactttgggaggctgaggcaggtagatcacgaggtcaggagatcaagaccatcctggctaacacggtgaaaccccatctctattaaaaatacaaaaaattagccgggcatggtggtgggcgcctgtagtcccagctactcgggaggctgaggcaggagaatggcgtgaacccgggaggcagagcttgcagtgagcggagatcgcgccactgcactccagcctgggcgacaaagcaagactccgtctcaaaaaaaaaaaaaaagaaagaaagaaaaggggtaattatagtagtatttccagagaggcgccttctctacccaagaactagggacacatcctaaggggagcctccttcccctctcctggttccaagcaagaagacatgacttggctgtgcaattgggaaccctggtccctcctccaggaagccttctacccgccaacccccactgcaggctggtgagggtgctgcctctgtgcccctcagcccttggcacttgcccttgctcttgcacccctgccatgacctctccaggtcagggacagcatctgtccccagcatcacctggcacatggcctgcactgagtagctgtcagtgaaagttggtgaatgaaggcataaataaatgaagtcaaactctgtattaggccttcttgcattgctatgaagaaatacctgacgctaggtaatttataaagaggtttaattggctcacagttctgcaggcttttcaggaagtatggtgctggcatctgcttctggtgcaacctcaggaagcttaagatcatgacataaggtgatggggagccagtatatcacatagtgagagcaggagtaagagagaaggggaggtcttagactcttaaataaccagatcttgtgtgaactaagcaagaactcatcaccaaggggatggtgctgaaccattcataagggatctgccctcacgacccaattacttcccaccaggccccacttccaacattgggatcacatttcaacatgagattttgaggggacacacatccaaactacagcaaatcctattgggggcagaaatgaatctgccatacataggccacacctactatgtgctgacatgatacagggagaggagtatcaggaatgactgttggggatccctctgccattctcccatgagcagacatccccaggatgagctgaggggaatgcaatgagcaggccaaactctttccaagctgtttgaccacacccacctaccccagcactctcagcccctgcctggtgccctgtgctgagctgggtgaggctggggagactggtgagtgagggctgccctgccctttttgagcccccagtcttctggtgaaggaacatagcaacatggagtgattggtatggatgatgcaaaaccagggacatgggacccagaagtgcccgagccagcctggaaggcctctgccctgggccccgggtggctgtttgctgcacagctctccccacagcctgccccaaataaacagcttatcttcgtccctgaaaatggtgctctcgagttccatccttttcagagcgggtcctcccagactcctcttcctgcatcctcctccatcccgcttagtgacactttgccgtgggtggagcccctcatttgatcctcaagcccccgaggtgggtattatacctcgttcgcaggcaaaggctcaagcgaggtcagtcttaagttgctgcccactgacccgtctaccagtcctgtccttgcgtctccatggctcaggtcagggttatcctatctgcttcccacctctctccaacacatgcactccccaaggcaggctccatcaccgggccccagcccctggctctctcctccaacgcagctccccagccggcctgtaaaaccgaggacaggctcccgccacgccctcggcggtcctcaggccttggcggttggggaagcccgccaagggcgacggttcccctccagccccacaggctgtgcagctccggcaatgagtctccctcaggtctctgggtcagccggcgccccagtgcgtgcctcgggggcagggatcccggcttttcactactgttagtaacagctcgcgcgcgctgcttcacagcaggtgggtgagcctacttttagtcttcccatcgacacccttagatggcagttttaactttctccctacacacaaggagctgctatacatggttccggcttgacgcggatacctagtgacacttggcggccaggccgggcagacttccgggtgggtgatccctggcgctgtgcggagccattcgctgcgctgaagcagtgcgcatgcgcactggacgcttcttaccagcgtcctgactacaatacccaggacgcacccagcccgccgcctctcggagcccttttcaaaccgaccaatcggcaacccgcgtctcccggcgccgcgtttaaatccgtgccggaggcgcgtcctgcatcgtctgccgctttgggtaaggtggggtcagggtcgggggcgaggcttgcccggtgggcccggtgcggcgcggtgcccgccgttttcgggacggggaggggccgcgccccgccaggagccgggcctgggctcgagcaggggtcactgaggcccctcgcgccgtggtcggggatgccgggaggtctagggctgccccccaggcaaacagagcccccaacactctggcccagaagccgagaattccgttatctcgtctgatggcgttcgggctgactcccggcctggcggcactcgggccctggggtcccctgggatgcgatcatttcagagcggcccccgcgccgcctctcccagacctggccgcggccttcagctctctctgcctctgtgagccgagggctgaaggaagccggagccctgggccctgacacgtactcactttctggccccgttccaccctgcagtgacttctgacagctctctccatggaaggaggcggcggccgckatgagccttcagcctgccgggcaggggacgtgaacatggatgaccctaagaaggaaggcaagtccttgctgctgcggcgctgttgttgttcaggatgttcagtagagatggagggtgatttaatgtttccctgagaaattctttctcaagtgctcgacttgtactstgcacctgtgaaacacatgacatctgccttcgttttctggttttctttcacctcctccccattttaagtttcatcacagccaggattctcatccgttttatttaccgcagtgctcccatgccctgaacagcacctaacactttgtgggctctcaaatatttattgtattgaattcgatgttttcttttttgtttgtcgctggtttctgtttgctaagacttatttaggatctttgagaccatgttaatgagtaagcctggccccaaacccctttcttcttgtgtctttgactggtttgggtatcaaggtgagggtacagcttcacagaatgagttacaggccacaccctctttttctctcaaagcgtttttatttatttatttatttatttattgacggagtctcgctctctcacccaggctggagtgcaaaggcgtgatctgtactcactgcaacctctctctcctgagttgaagggattctcctgcctcagcctccctagtaactgggattacaggcacccgctgccacacctggctcatttttgtatttttaacagagacggggttttgccatgttgcccaggctggtctcgaactcctgagctcaggcaatctgcctgcctcggcctcccaaagtgctaggattataggtgtgagccacctcacccagcctcacaaagcattttgacatcccttgggtagttttctcacactacccaaggatcctttctttttgagaccaagtctcactctgtctcccaggctggagtgcagtggcatgatcttggctcactgcaacctctgcctttcgggttcaagcgattctcctgcctcagcctcccgagtagctgggattacaggcacccgccaccacacctggctgatttttgtatttttagtagagatggggttttaccatgttggccaggctggtctcaaactcctgacctcaggtgatccacctgcctaggcctcccaaagtactgggattacaggtgtgaaccaccgcgcctggccccaagcatcctcaatgcctccattttgcaggaactgtcctggagactttacaaatcaatgttgcatcttcatatctagcaaggcgcttgcctctgcacccctctcctccttcctgtcatgtccttcctttcaaatatgtcctttccacgtgcatactgcaccccctgctccttcttgaggccttccccacttccgttgacctgacttcatttccttacttttcccctgtccactactggatcatgcgcatccacatacagataatgttcccttgtctcacttgtcgccacgtctcctccgttgcctctccattgctgtgtttctccttccaagccaaactttgagagctttctcacttgttatgccatttttttccgcctctcaatccctcccattccggcttctgtccttaccactccattcaagctgctttcatcagtcgttgacgacttccacattgctgaatctcttttcacttttctatcgccagtcagcttttcagtaacattcgtccttctggaaacttcccttgcttggagtccaagacgctcttggttttttcctcctgcctctctggctggtgtatcttttctctgtcgggggctccccctctgctgtcttctgaggctgatttccccaagacctgctctgggaccgctttgtgctttcgccctcagggcggtcagcattccaatagctgtgcagcgtatctgctctctgcggcacccacgttttgtcttgagcgcagcctctcctccgagctctgggcttgtatattcacctgcctatttggcgtcttcacatgcacgtctcatctcaaacttggcataccccctctgcatctgcataccctgttctttttgtctttctcatcacccattttatttctccatttcacccagctgtgcaagctgagaacctcctacattcatgccatcaccagctaacgtcttctccaccttcagaagatatcctgaatccatctacagactctccatctccatccacatgctgctgtctgggtctcagccacgctgtctcaccggcttctacttcccgttggctaatatgtgcatttgtaatgtcaggggatattatctgcttcctttcggatacactttctacacagtaacgtcaccttttaaaaacacaagttagattataaagctcttttcttttcttttttctttttcttttttttttttgagacagagtctcactgttggccaggctggagtgcagtggcgtgatctcggcttactgcaacctccgcctcttgggttcaagcaattctcctgcctcagcctcctgagtatctgggactacaggcgcccgccaccacgcccagctaatttttttttttttttttttttttttagtagagatggggtttcactgtgttagccaggatggtctcaatctcctgacctcgtgatctgcccgcctgggcctccggaagtgctgggattacaggcatgagccactgtgctcagccttttttttctttttgagatggagtctcgttctgtcaccaggctggagtgcagtggcgacatcttggctcactgcaacctccgtctcctgggttcaagtgattcccctgcctcagcctcctgagtagctgggattaaaggcatgagccaccgtgcccagctaagttttgtattttcagtagagacggggtttcaccatgttggtcaggacggtctcgaactcgacctcaagtgatccgcctgcctcagcctaccactgtgctgggattacaggcatgagctaccacgccaggcctaaaattcttttcttaaagcccggtaatagtttcctatcccactttggagaaaataaaagctccttgccatggcttgcaaaccctctgtgatctgacccaacttgtgttttcacctcttccagccactctgacttctgacccgttcctctcacacacgctttgatattttctcagaggtgttcccacctctacatgtctctcaccgcactgcctgaggcaccctccagggtgggctgcatgtaccccaagcctgcctggcacctagcgaaggatgtggtctgttgtgggtgctcatgtgtttgcaggatgagcaagtcagccagcccgggacccctcggagccagtcacagagcctggagcagaagactgcttccctgagttctggtcctggattctttttccacgccagaccattagaagtttctgaaattgacttcctaatttagaggtgtaaaaagtgaaatgtctgcctctctatatctctaagtcacctacttgcccttccaagggccatcgatgtcatcagtctcttgggtatccttccagacataatttgtgcaggtgcaagccaacacgcatagagtgttgcatccccctttccatatagcatggagagccctgtcctgaatcttgtttttcaggcttaatttatcttgatgaatattgtgtatcaacacatgaagagcattactagcttttgtacctatatagggttccaccttggggatatgtcattcatctcatctgctgtgggtgaacatttagtttgtgcctagagtcttgctgttaccaatgatgctgcagtaaataactgtggacaccgtgtaactgcacaacacattgctttccacacctgtgagtgtctgtaggatacacttgcagaagtagacttgctgggtcgaagagggtgtgtgtttcttacttcgataggtactgccaggccctctagagagctgtgataatttacaccttccccagcagtgtagaaattgtctctttccccacaaccttgcctatagttcatacatctttgagttttgccagtcatataggcgaaaactgcattctcagagcaagtttatttttaattactttttttttttttttttaagacagagtttcccttttgtcccctaggctggagtgcaatggtgcgatctcggctcactgcaaactccccctctcaggttccagcaattctcctgcctcagcctcccaagtagctgggattacaggcacctgccaccaggcctggctaattttttgtatttttagtaaagatgaggtttcaccatgttggccaggctggtctcgaactcctgacctcaggtgatccacccgcctcgaccttccaaagtgctgggattataggtgggagccacagcgcccagcctcattactcttatttttgagtgaggctgaacttcttgccatctatttaagaatgtttcggccaggtgcggtggcttgcgcctgtcatcccaacactttgggaggccagggtgggcggatcacctgagatcgggagttccagaccagcctgaccaacatgcagaaaccccgtctctactaaaaatacaaaattagccagacatgctggttcatactgatcccagctacttgggaggctagggcaggagaatcgcttgaacccaggaggcagaggttgcggtgagccaagatcgcgccattgcactccagcctgagcaacaagagtgaaactccgtctcaaaaaaagtaaataaagaaaaataaaaaagaatgttttgttttattttctgtgaactttatctgtttgtatcctttttctatctttattagattattaattttttattactttatagatatgcttcatgaattagccctttatgaactgagttgcaaatattcttttccccatttcttgtttaacttattgtgatttttgccacacagagatgttaaaattttaatgtttgaaggtcaatcttttattttttatttatttattttctgagacatgttcttgttctgttgcctgggcctgagtgtagtggcgagattgtggctcactgcagctttgacctcccaggctcatgcgatcctccttcctaagcctccctggtagctgagactaccacgcctagctaatttttgtattttttgtacagacaaggtctccctatgttgtctaggctggtctcaaactcctaggctcaagcgttcctcccacctcagcctcccaaagtgctgggattacagatgtgagccactgggcccagccgaccaatctttggtagcttccagtttagtgtcatagttagaagtccacactcccaagttacaaaagtttcctcatagctgattcttgtttgtttagggctttgttttttttccattaagtccttgatttgtttggaattaggcctgatgtggtgtgaggcatggaccaaacttagttggcatttttccagatgattatgtagtttattttaataccattttttcactttccctcttttttttttttttttttctttgagttggagtcttgctctgtcacccaggctggagtgcagtggcgygatcttggctcactgcaagctccgcctcccaggttcaygccattcttctgcatcagcctcccaagtagctgggactacaggcaccygccaccacacccggctaattttttgtattttttagtagagatggggtttcaccgtgttagccaggatggtctcgatctcctgaccttgtgatccaccctcctcggcctcccaaagtgctgggattacagatgtgagccaccctgcccggtctactttccctctttatttgatatgttacttttatgatatgccaagtcttctttatatccattttgcatatttcttgttaggtttgtttatcgttattttgcatctttcgttgctgctagaaacgaagtattttcttccatgttatcttctcactgttctttgtagatatgaaagctgttgattgctctgtaatgattttgtccttagccatgttcttttatccttttactacttatagtagtttccagttgatcttcttgatttgtttctcgtgtctataatcatggcatctgtgcagtgtgatcatgttacctccacattccttcctttgcctgactgtgttgctttatgtgtccagaacagtgttaagaattgtgcttggagatgtcattgccacgtgcctggctttaatggaattgcttctgtggtttttcattaagtccgatactgggttatgggttaatttccaagtaaatggtagtcgtaggtgtgctattcatgagcatttctatgtgtttgtcttctgggcatgtaatagaattgtactccctgttcacttgaaattcagttggctctggtgactcacttggccagtgaaatgggaatgttgtcgtgtgtgtcatttctgggtggaaatcttcaagaaccagtgtggaattggttcttttccttcctgccatggagacgagcggtgttcctgatggtggaggctccatcagttggggtcctggagtgaggaggccagggagcagggccccagcctacccctctgcagacatatagtttgagtgagaaatatacctttgtggtttttggtttgttttgagacagtgtctcttgctctattgcccaggatggagtgcagtggcttgatcatagctcactgcagccgcaagctcctgggctcagcatcctgagtagctgggactacaggtatatggcaccataccccgctcatttttttttttctttttgtagagctggggtctcgctatgttgcgagggctggccttgaacccctgggcctcaagtgatcctccttggcctcccatagtgctgggattacaggcacaggccaccatacctggcctacctttgttgttttaagggttgttacttcagcatgttagcctatcctaactggtaagatcaatttgttcctgtctttagaaggaatacttctgacgttatcccactgaacctaatgctggctttgggttgagatggggatttccttatatatctattactttttattaagagcctctaaaatcaagaatgtatgttgtattttatcatatgcccgttcaacatatgtgcagacgatcatggttttctctttagctctagtaataaaatgattatatgagtagattgtatgaaatgaaaccatctcacagtcatgaaatgcagggagcttggttgtgttatgttattaccactttaatgtttgcaggattctttttgctggtattcttgttaaagagtttgatgttaggccaggtgtggtagctcatacctgtaatcccagcactttgggaggccaaggtaggaggaatgcttgttcccagcagtttgagaccagcctgggcaacatgaggagatcccatctctacaaaaaatacaaatattagccagggatggttgtgcgtgcctgtagtcccagctactcgggaagccgagacaggaggatccctcgagtccaggagttcgaggctgcagtgagctatgattgtaccactgtactccagcctgggtgacagagcgagaccctgtctcaaaaaaagaaaaaggattattatgctgatgtaagtaaggctggtctttactttctttattgatcactttctaggttttttggtaacatacttacttgcctcgtggaagtaagttggaaagttttttttcttttaatcctctggagtgatgtaaatagtattggaattatttgttctttaatgttttgatacaattatcctatgaatctagttgggacgcttttttgaagaggatagctctttaataaatttcaccagttattttatgattattgaagtattaagattttccctgtcttctggagtcagttttataaataagtacatttagacaatttaaataaaaaatagactggatgcggtggctcacgcctgtaatcccagcactttggaaggccgagatggagggatcacgaggtcaggagatcgagaccatcctggctaacattgtgaaaccccgtctctactagaaatacaaaaaattagctgggcgtggtagcacgtgcctgtaatcccagctactcgggaggctgaggcaggaaaatcgctggaacctgggaagcagaggttgtagtgagccaagatcacaccactgcactccagcctgagtgacagagtgagactccatctcaaaaaaataaaaagaatataccaagtgcagtggctcacgcctgtaatcccagcactttgggaggctgaggcaggtggaacacaaggtcaggaatttgagaccagcctggccaacatggtgaaaccgcatctctactaaaaatacgaaaattagcccggtgtggtggcgcgcgcctgtaatcccagctactcaggaggctgaggcagaagaatctcttgaacctgggaggcggaggttgcagtgagccaagatcaccccactgcactccagcctgggcaacagagtgagactccatctcaaaaaaaaaagaataaataaaattatattttcctagaaaattatctctttcagccaagttcttaggtttatgtgcatgaagttgacagatgtgcttatggatcttttcattccctctctgtgtggttatttctcttttctttcttttgtgcatttgttctgacttctccttgattaggtaattaagaataattgattaatcaggaccaaattaggatattagtatattttcaaattttatgatttttgagaagcatgctgtgttgttatttttatttatttatttatttttttgagacagagtctcactcagtcacccaggctggagtgcagtggcgcgatctctgctcactgcaagctccgcctcccaggttcacgccattctcctgcctcagcctcccgagtagctgggactacaggcacctgccaccacgcccggctaattttttgcattttttgtagagacagggtttcaccatgttagccaggatggtcttgatctcctgacctcgtgatccgcccgcctcggcctcccawagtgctgggattacaggcgtgagccattgcgcccagcctgttttgttttgttttctgagacagagtcttgctgtgtcacccaggctggagtgcagtggcgcaatcttggytcattgcaacatctacctccgaggttcaagcaattctcctgcctcagcctccccagtagctgggattacaggtgcacaccaccacgctcggctaatttttttattctttatttttggtagagatgggattttgccaygttggccaggctgatctcgaactcctgaccacaaatcatctgcctgcctcagcctcccaaagtgctgggattacaggtgtgagccaccttgcccggccttcattgtttattaagataaaaacatttatgggagagctttataagctttacagtattgagcaaatactgtatttcagtgcattttgataaatatttgctaagtgtccaggcccttagctggacatttgggaatttgggttagtgttagacactgttatcttggaggagcttatagtctagttggggccatagaagggtcaagaggcactcacagaggctagtgcagtggtagaagtgaggtccaggcactgcgggagccttgcggggagctggaggagggagcaggtgcccctgcagagggacccactaacctggaacttgtgatctgttttagagggacctgggcagacagggccatgccagctgtgatagaattatggatggggtggggtacagagtaatttcatctgaggattcaggaaggactccaagaagcaatggcggtcaacgaattcttatagagtccctactccgtgcatttgagtaatattaaattcattgttgaactatgaatagatgttttgtagcttgtaagaggggaatttaattctaggggagctgaggaaggtggtcttttgaaaatgttctatacctggaaaatgacttatctcttcttgaaaagctagttgaatgagtcagtgaatgcattttagattatatcttaaaagtaaggacctaagcttttgggtggcttagtgaacatagaatggctgatgtaatttcttttttttttgagacagagtgtctttctgtcacccaggctggagtgcagtggtgccatcttggctcactgcaacttccacctcctgggttcaagcgattctcctgcctcagcctccgagtagctgggactacaggtgtgcgctaccatgcctagccaatttttgtatttttagtagagacggggtttcaccatgttgactaggctggtcttgatctcttgacctcatgatctgcccgcctagacctcccaaagtgttggagttacaggcataagccaccgcccccagccggctgatgcaattaaaaaaaaaaaaaactggccaggcatggtggctcacgcctgtaaccccaacactttgggaggccacgccaggaggatcacttgaggccaggagttcgagaccagcctggtcaacatagcgagacttcgtcactagaaaaaatttaaaaaattttttaaaaaggaaaaaatataacttagagccccctatgaaaaactaaattagcatcatgacaggatacactttggggagtgaaatttcacagtacctttatttaattccaagccatagagcctggtaatatttttctctttatcagctgtrgcactaaaataacagtggattttttycctctagacattcttcttttggccgatgaaaaatttgacttcgatctttcattgtcttcttcgaggtaaacaaatgagttttcttcccttgccttgggcataaccacattcagtaaagtctttcctttaaatgccagtgttatgagttattaatcattctttttttaaacaaatagtgcaaatgaagatgatgaagtcttcttyggaccctttggacataaagaaagatgtattgctgccagcttggaattaaataatccggttcccgaacagcctccgttgcccacatctgagagtccctttgcctggagccctctggccggggagaagttcgtggaggtgtacaaagaagctcacttactggctttacacattgagagcagcagccggaaccaggcagcccaagctgccaagcctgaagaccctcggagccagggcgtggaaagattcatacaggagtcaaaattaaaaataaaccyctttgagaaagaaaaggaaatgaagaaaagccccacrtctcttaaaagggagacatactacytgtcagacagccccttgctggggccccctktgggtgagcctcggctcttggcctcctccccggccctgcccagctctggtgcccaggcccgcctcrcccgggcgccrgggcctccgcactctgctcatgctttgcccagggaatcatgcactgytcatgctgcaagtcaggcagcgactcagaggaagcccgggaccaaattgctgctgcctcgagcggcctctgttagaggaagaagcatccctggggctgcggagaaggtaaatgccacagcagagcgcctgcctggggagcccccactccttgcccctcagccctctcacagaagccacatgsggaaagcctcagaggtggcgagtctctgaggcctacaaaacacaggaatgcggagtccaggaaaagcagttgccaatagggagctgatgtgggggtggcttggataagttgggttgacctaatatttcctcctaaattctgtctgaagttgttccttttgttttgttacaatgctggatataccacacagtagggatttcatttgctttaataagcaacctcttccaaaaactcccctcctctgcaatggctgctagtcagcctccttgaccgtgcctcagtttacactgcattcctcctgggcactgagtgaggtgagctttcctgggaggtggcagttgacaggggtgcctttgggtgcagtctgcctactctgggacactgagggtcctggaggtctgggggaaagstgggtgtgagcacaggacttgctgccagggctgcccgatctggctcttgctcgggagaggccacagagaggaagacggggygggtgggagcccyggggcccaccctgcagcccgttcccagctctgccccctcccctgggcagcacgtacagaggaatgaccctgggtggggctgataggaggtgcaggcaaatgcagaatgctcagcaagggcccagaaattcctttacccccaccaagcccatctcctgagccacatgactccctgtggtgagagccaaggatggaaggcagccgaggtgcagccgccacgccacacactgcccttgacaaggaggtatgcccggcactgccacccccaacagctggggcctgcaaactcctttatttggagcccgtttgggatgtagattcctacygtgatgtttctagaatgagagtgggatgggtcctgctgtgtggagcacacgtggactcgggacagggattgtgcatgtagcacgcgtggactcggggagagaggtggtgtgatttgggctgctccagacccatcgaagtatctcttttgatctcctggtcctgggtggtgagctggggtccagagagcttgttcccagtggacagggcactgtccgcacagctgagatgcactcatgcacacgtgggagccccaccatgtcctgcatgtttctctgggagaagtcacttctagagtggctcatggcacatgctcactcctgtgaggagtcattagcaatgggtggaccacttgagtgtaacacctacttacaagtgtgcttgacagagaactgctaggatgcctaaaggaagaagaaaaagaaaataacaggtgttattttgaggatgaggatgttgtggaggatgaggagaaggctgaggatgtggagaagctggaagctcacgcattgctggtgggactgtgaaatggggcagctgttgtggaaacagtttggcagctcctcaaaaaaataaatgtagagggtcccatgggacccagcaattccactccttagtacacagacctgagagaattgaaaccatatccacagaaaaatccacatgcagatgttcgaagcagcattattcataacagccaaaaaagtaggaccaacccaggcatccagcaaatgatgattgggtaacgaaaatgcagtctatccaaacaatggtttatttttggcaataaaaagaaacactactgggcgtggtagctcacacctgtgatcacagcactttgggaagccaaggtgggcgaatcacctgaggtcaggagtttgagcccagcccggccaacatggtgaaaccccgtctctacaaaaaaatacaaaaattagccaagtatggtggtgcacacctgtaatcccagctacttgggaggctgaggcaggagaatcgcctgaacccaggaggtggaggttgcagtgagccaagatggcaccactgaaaacattttgctcagtgagagaggccataacaaaaggtcccatgtcgtatggttccatttatatgaaatgactatgacaggccaatgacagaggcgtggttgagtgcttccctaggtggggctggggaggatgagggaaaggggagaaccgctaatgggtacaggttgtttttttttttgttttgttttgttttgtttctgagacagagttttgctcttgttgccgaggcaggagtgcaatggtgcaatctcggctcactgcatcctctgcctctcgggttcaagcagtcctcctgtctcagcctcccgagtagctgggattacaggcgcccgccaccacgcccggctaatttttgtatttttagtagagacagggtttcatcatattagtcaggytggtctcaaactcctggcctcaggtgatctgcccgcctcggcctcacaaagtgctgggattacaggcgtgagccactgcacccggccgagtacaggttcttttttgggacaccactatattttaagattagcttgtgctggttgtacaacataacagatctactaaaaaccactgaagtatactgtttaaaatagtgaattttatgttatgagaagtatctcagtttttagaaatgctataaagggaaaaagttactgctgcgtctttaccactctgagcttctattgctgttaccttattaactctcctgttataagggggctatttatgtaagtataaattagttccatgaatgcccttgtccctaaatatgtcaagaacttattttttgactctgctggccaaagaaaatggctttcagtactagaccaagaagatttattgcaattgagcagcttctctggtagagatgaccatttaatggatgagtcctttctgtacagcattttaaaatttgtgtaactagaccagctttctcattatcattcttaaataaggatcctgactggggaatggctttagagaacctctctcctattaatgatctgtgtaggtatcatttgatgctgtttttaatgaggaagcaaaatccatcatcacttatgtccatagtgatttggtggaggatgcgaactgcttgccctgttcccttcaatctrgctgatgaatggaggggcatrtgtagcactggggaagatggggcctrggctcgctctgaatggaagcctgagtatctctgtacattgttaagcactagacagttctcacagttcaaattaaaattttcagcccaagaaagagattccagctagtccttccaggacaaaaatcccagctgagaaggaatcccaccgggatgttctccctgacaaacctgccccgggtgctgtcaatgtgccggccrccggaagccacttgggccagggcaagcgggcgatccctgttccaaacaaggtgagttggctgctggggcccaaacttgtggttgctgggaatgaggtggcagctgtgtgtacaagtgctttggattaaaatcccagcattttgggaggccaaggygggaggatcacttgagcccaggagttcaagaccagcctgagcaacatgatgaaacccatctctacaaaaaatacaaaaattagctgggcatggtggtgagcaacggcagtcccagctactcaggaggctgaggtgggatgattgcttgagcccaggaggtcgaggctgcagtgagtcataatcacgccactgcactccaggttgggtgacagaatgagaccctgtctcaaaaaaaaaaaaaaaaaagaggtggaaaagttgaaaatacacccacaagaggcagcctgcaaaatacatgcaaagaatactggcttcgcagtgtgcactgatggctagcctctgccctgggagctgtgtgggttgggaaaagtcagcgtctcggagccccagtttgtaggtggggatattccgtttccctcatgtagagttcttgaacagatgacatgagatgttgatgttttgaaaacagcagctgggtgcagtggctcacacatgtaatctcagcactttgggaggctgaggcgggaggatcacttgagcccaggagtttgagaccagcctgggcaacatagtgaggcccccatctccattaaaaaataaaaatcagccaggcatggtggtgcatgcctgtggtcccagctatttgggaggttgaggtgggaggattgcttgagcccaggaggtcaaggctgcagtgagctgtgatcatgccactgcattccattccagcctgggcaacagagtgagaccctgtctaaaaaaaaaaaaaaaaaaaaggaaaagaaagaaaattgcggttcctcacaggcatggagactaccagccacatctttgccacttattttctggcattggmggtaaaccaagctgtgtgtactggcagttcttgttagaactgcccaaagctgggccctgcagctgctgactcatggggtctgggttggggccccaaatctgcatttctgctagctccctaatgtggtcctcatgcaggggtttgaagactacactttgagaagtgctgcttgacttttttcttctttaaattcaagatgataattattagattattttaaaatagtaaaaacaccaacttttgttgttgttgttgttgttgagacggagtctcactctgtcgcccaggctggagtgcaatggcacgagctcagctcactacaacctccacctcccgggttcaagcaattctcctacctcagcctcccgagtagctgggactacaggtgcctgccaccatgcccagctagtttttatatttttagtagagacaaggtttcaccatattggccaggctggtctcaaactcctgaccttgtgatcctccggcctcagcctcccaaagtgctgggattacaggcgtgagccaccgtgcccagccaaaaaccccttacttttgcagacacaagtaataggtaaataacgagatctttgctgattctgttttttcacattttgccccagttggggctgaagaagaccctgttaaaagcacccggctctaccagcaatctcgcaaggaagtcctcctcggggcctgtttggagcggggcatccagtgcgtgcacatccccagcagtgggcaaaggtgaggcagccggcatcatgcttggacccacatctggccaggtgaggcctggagtgctgctcaggccttggagactgtttctgcagaaccacttaggcttggcaggacgtcccggagggcgtgctgtgtgcggtggaccaggctgtggactgagttgctgtacctgccctcagtgcctctgtcccatgaggagggcacactcagatgggtggcttcagtctacggggtacacatggccagaaagcatgtatgataccccgtgcctgagaacatggacactggaatcaccctcatgtccatgtcatgagacaccagttttaaaataggactattccagataatgtagggcatatggccccataactcctgggtgcctgtttaaatccatgctcccacacctgtttgaggtcaagccacatttcaaccttgccaagccacagctgccatctagtggtaagggaaagccttcgcctttctgctcttcagagcgaaatcctcttcgaggtgcattggccatgtggcgtctcggggtcgttcagggcagcatggtgtggattgtgttcacaaaatgtaaaaagtgggccgggcgcaggggctcacgcctgtgatcccagcactttggcaggccaagatgggtggatcgcttgacccctggagtttgagaccagcctggccaacatggtgaaaccctgtctctactaaaaacacaaaaactagccgggcatggtggcgggtgcctgtagtcccagctactcgggagactgggccacgagaatggcttgaacgcgggaggcagaggttaccatgagccgagattgcatcactgcactccgtctcaaaaaaaaaaaaaaaaatgataagtgtgaactctctaatcagattgatctgatctggaattctgactctgccattctgtgattaagagaggtttgtgtccttatctttatagactgaggtgatgacctcctgagatcaagcaatcctcccacctcagcctcctgagtagctgggactacaggcacatgccaccacacccggctaatttttgtgggttttttttttttgagatggagtctcactctattgccaggttggagtgcagtggcgcaatcttggctcactacaacctctgcctcccgggttcgagtgattctyctgcctcagcctcccaagtagctgggactacaggcacctgccaccacgcccggctaatttttgtatttttagtagtgacggggtttcaccatgttggctaggatggtctcgatctcttgacctcgtgatccgcccgccttggcctcccaaagtgctaggattacaggcacgagccactgcgcctggcccacatttttgtgttttttgtagagaggatggtctcactatattagccaggctggtctcgaactcctggccttgagtgatctcytgccttggcctcccaaagtgtttggattacaggcgtgagccaccactcctgggctaaagtttttctttaagaatcctttaccagatcgtctgcgtatattggtagctcagtatgtattaccctagtttatctggtcttctattttaaatagtgcttatggttaatatgacgcagcctccttgtaattttaaaggaatcaaccagtaacaattgcgtcttttttccttgttccctgcccacctctgtgaccagacaggtgagacatgtgactagactatccccttccatctgctcaactaatgtagatttctcctgccaacataatcaacgaagataggagagcttgaatttatgcatgcttatgtacatgttagtaattattttgagaataagtaccttagaatacactcagctaagctaaaagctgcctgagccatcctgtgtttgatgatgttgcctgaagggcttatagaatattgttaatgtgtcttatgtttaaggtagatatgctaaagacagcataacttctgtgtgtttgttaaatagcttcatacttttataataatgtgatttttgtgtgtataccttctagctaaatcaagtgaatttgcaagtattcctgcaaatagctcccggcctctgtcaaacatcagcaagtcaggcagaatgggacccgccatgctgcggccagctctgcctgcaggccctgtgggggcrtcctcctggcaggccaagcgggtygatgtttctgagctggcagcggagcagctcacggcacccccctcagcatcccccacccaaccccagactccggaaggtggcggccagtggctgaactccagttgcgcttggtcagaatcttctcaattgaataagactagaagtatcagacggcgagattcctgtctaaattccaagacaaaggttatgcctactcctacaaatcaatttaaaattcctaagttttctattggtgagtaatagatacattttaatgtgtctttaaaaaatactgaagaaattgcatttaaagttttaaacaattattgatggcattgatggtgtttttagttctttcctccaacagtgctttcaggtgtgacccgctgtcttctcgcccacgttgttttggggggtcactggaggctccctgaatgtcttacgttcgttcctgtgtgtgtgacaccccaatgctcgtaggctgcttgtaaggttttctctttagtgttactgtcgggaatttgattattatgtgctttgaggtggctttctttgcctttatcccgctgagggtttcttaagcttctttgatctgtgggttggtttttttcagcaaatttggaaaacgttggccattatttcttcagctatcttttcctctttccactttatttcctaggactctaatcacatctatttcaggcctcttgacgttgtctcacaggacaccgaagctctgttcttttttttatttcagccttttttctttttcttatcttttttcttttctttctttctttttttttgttttttgttttttgagacggagtctcgctctgtcacccagggtggaatgcagtggcgcgatctcagcgcactgtaacctccacctaccgagttcaagcaattctcctgcctcagcctcccgagtagctgggattacaggtgcccaccaccacaccyggctaattttttttttgtatttttggtagagacggggtttcgccatgttggccaggctggtctggaactcctgacctcaagtgacccacccatctcggcctctcaaactgctgggattataggtgtgagccaccgtgcccggcccagcctttttccttgagctacagtttgggtagtttctgttgtcagatatcatttcttctgcagtgcctaacagctgtgaagcccatccagttaactttgtttctaacataatagtttccccttatttcttctcatggtacttgggttttcttttacatcctcgtgagcaaattgataatggttttagggtctacgattcttctcataccatcttccccatcattttggggtctgtttcgactgactaattttgtttccgggttttggcctcattttcctgcctctacatttttcacaagtttttcttggttgttggatattgtcaggtgtacacttttgaatgtctggattttgttgtctttctctgaggagttgggttgggcttggcaggcagttaaggtgcagatcatccttccgaggctttttatgctttgaagtggtgggtctagcatagcctttccgcctcccgccaccggcgtccttcccaaggcctctgctgcacacccgtgtgtcccgcaaggcccgcgagacccctgcactcctgctgctgcaagatgacaccttctcggccctgtgagctccgctcgttgctccctggtaagacggcggtttctcggccctgtgagctccgctcgttgctccctggtagttgctcttctcttgaccttgaggactcctgccctgcacctgtgcactgcctggtgctcagccagagactcgagattcccttgggttcctagagctcgttctgtcggagtagccccctcctctctagtttctggccctcagattgcagccacctcagcctcctgagctccagccactgccttctccagtcagtgaggccactggccccagcaggtgtctggccattagtgggtgggtgtttgtaaagttttcatgaatttcttgaacaattgtgtgcaatgcagaaagttctcagagctgacttaaggtgagaggagcgtcctggcctcctctgtcaggcagatctgccctctgggtgcttgaggattttaagttctggcagtgccggccagcacaggcagcctgcaactcccagaaactgcattctgagtcctgctgtaggaacaagctgttctgctgagtgtcttctctgtgctggaatgctttgggggacaagggacatcatgataagacagacctactctcacagaatttctgtttaataggaaaagatacgaaatgttatcagatgagcaggcctgcagatcctagcacaacaaagggactaagggaagatggtgtcctggagctggcatgtttggggaggaatttgcatcgggtggttctttggcaaagatggtcaggaggtgacacgggactgagatctgaaccaggagactgaggcagccggtaggaaagtgcaagggggagcactccaggcagaggcaacggcaggagtgcagaggtcctggggcaggaaggcgtgggacgtgctctgggagcagcatgggggccggagggtgggagtgcagcygctgcggtcgggattctgcgtagacgtgcgacagctggtcagtactccttggtgtcagggacccaggcttrctccatcctgtgctgccgtgatgagcttctcatcctcatggtctagtgtggctgcaccggctctggccctcatacctcccggcaggaagccttcttctaggtgaagaagagcaaatccccacctttcaaggaccctcactgcaagttgtccctgtgactccgtttgtgtcccattgagtacgacgcttccctgcacaggatgctaggacacgttgtctttattccgcacacagctgaaatttcttactgagaagaggaaagttgctgttgaacaaaaactagcaacctcagccagtcagtgaccgaggggcagggtaagaagagatgaagatggaggggcagcccgaggccggctcccagagcgccgcgtgaccagagcggaccctggagtaccgtcagtgcaggaggacgtgcataggagagatcagagcagagcgacttgaccttcagaaggtccctccacagagggaagagcagagtctctgggccgaagagtggtggggagggtaatgcggacctggccctcactgtgttggggaggaagctagtgctggggaaggaggctggagcgctgcggtctgcctgacgttctggtagcttagggctcatgtggcagtgcagagagggactcgagtgtccctgaggttctggcggaacctgggtgctgccactcatgtgacaggagggctggaagaggcagcgggcagagtccacggccccattttggaagtagtgagggtgagaggccacttaggctgcagctgaggggtggagcaggctgagagctcagaggagaagccacagctggagacctcagtgtaggtttcaacagcagagagctgagtttgtagagatgggagctgtgagctgggcacggtggctaactcctgtaatsmtagcactttgggaggccgaggtgagcagatcacctgaggtcaggagttcgagagcagcctggtcaacatggtgaaaccctgtctctactaaaaatagaaaaattagccaggcatggtggcgcatgcctgtaatcccagctacttgggaagctgaggcaggagaatcacttgagccaggaggcagaggttgtagtgagccgagatggtgtcactgcactccagcctgggcgacagaacgagactgtctcaaaaaaaaaaaaaagaaagaaagaaagaaaagaaatgcgagctgtgattgggtgggttctgcagggacaccctacggcccaggtcatgtggaggtgtgttcagtagtgtttgcttcccttctgcctgaatgcctggagccaggacatgcgtctgccatgtctctcctgaccacgttggcacaagtgttggctggtctcctggctgtcgggctgcttgatgccacaggacttctgctaatcccaaatccctgttggctttgccctgtttcccagagcgtgtccctgcggtctccttacgcacctctcagatgtgcatttcaccttcggcaggcggttcctcctctctccacaatgctgggaacaggactgtctcttgcacgcctttggtcattcatcagggtcaaaactggtcccacaaactcagcactggccggaagagaggccccaggggagcagccacgctgttgggaacacacagctctgggaggcacgtggtggtgtgcactttttggctgagagcactggtggtgttgctcattggctgtgacaccagctgtcaccgtggaggagaggtgagggctgagggcactcacagcgtgggaccacatgaacggtgccctgtagtggaggctttcatatgtgcactttctcaaaatactcgaggcaagcagcattctttgtaaaacagtccagttacaaatgttgctatttactatgagtccaygctgccgggtcacccagaggattgagacttggaattctggctgtgggctttgcctccccggtactgggagctgcagtggagacgcgccgtccaggtttagggaagagctgatgtgggcctgggaggcgtgcgtgctcaggcagccctagggcagtcgtgagggtgtcaggagatggcttgttcgtgttctgtttcataagaatgaccttcccgtgccaccatggaagctgctgaagagtgcgctccacccagctgagggagaggacaaccgagaggaaggggtctcgggagagagggagccaacacgggaggcggcaagggagagggaggcggcgagggagagagaggtgggcttgcctccacacccgccaggagtgaccaacttgggtctcacagagacctctgtgaatggtgcggggtcagtgacccaagaatgttcccaaaagacagggattatgggatgacttagtcacagaccaccccactccatacaagaaaacaaacaccagcctgggcgacacagtgagaccccgattctacaaaaacatttagctgggcatggtgctgggcacctgtagtcccagctacttgggagactgaggcaggaagattacttgaacccaggagttcaaggctgcagtgagcagtgatcaagccactgcactccagcctgggtgacagagcaagaccttgtttcttgtaagaaagaaaagaaacaaacaaactgaaaacggaggtggagagagggtgggagcatgtttgactcagctgtgtgcgagctgcgcgcctctccagtgctggggtgaacatggaggcctggtgaacgcacaggtgggggcggtggggaggtgtgaggggcagattcttaactcttgtaacaaacggagtttctgaagaatgcggaggtagcaatgtgggtgcgtgatttagaaatgagtgaagggagacatcgcaagaagctkccagcacgctggaagcagagctgggtgtggtgggagacttgtttgtctcataaaattttaaccttcatttttaaaaactgtgcatgagtcactttgatagaggtgatttttaaaagaataggagaggctggggcagtggctcacgcctgtaatcccagcactttgggaggccgaggcgggcaatcacttgaggtcaggagttcaagaccagcctggccaacatggcaaaaccctgtctctactaacaatacaaaaattakccgggcgtggtggcgggcacctataattccagctactcaggaggctgaggcaaaagaatcacttgaacccaggaggcggaggttgcggtaagccgagatcatgccactgcactccagcctgggcgacagagagagactctgtctcaaaaaaaaaaaaaaaaaaaaaaaaagagcaggagagaggaaatgtaagtgcaggcagcctttctgaggagatctggtttaaagcggggcagggacgtgggacaggagcttgggtgcaggcgcaggagggcgggcataggcttgttaagatggagggcccagcagcagctgtgctgttgccagagagaggggctgtctgtgggggcagcagcctggaccctcgcctggcctcctggaagcacctgtggagaagaggcctcagctccaggccccacccttccctcttggtgctggggtaaggggctctgagggacagcctcttttcccatggcttcccagacatagcaaggtgttccaagggggtcctggtgcctgaggctttggaggccccagagcacatgtgctgatactcaagtgcacactgggattttcaaggagccagtatagwggaggaggaaccatggagccagtgtctgggggcgtggtggcgggactggacctctggggcctgtgttgggccttagctcggtaactggtgacccctttgccctctgagcctgcttttcatcctgttgtgaatatcagatgagatcatacacatggaaatgcttgtcaactaaaacagcacaaacacagtgtaatgaattattattatcccagtaaagtcatggttcgggaaaatgagggaatgtgggctctgttgcgcgtgcctgggaagctaaacccctgcggtgttgttcctgtgggcaagtgtctagcgcatgcaggtgccgtctgacaagtcgacttcgctctgtgaaggtcgtgctcggccctgatgggatatacagccagggtggggcggcgcagtgaagatggctcttctctttctcccccgtgtccatccatcagaccacagcctttgcctgggcaggggtccccgtgtaggggtgaatgcctctcatgtggctgcctgcagcagggtggccctttgtgtacttgtctgagccagtgccacctacactcaagttgggacagtggagatactcggagaattgcccattyggtgacgatcccccaacagtaggtctccccctgatcacttyacctgaccgcacacttcctttcttggacttaggtgactccccggasagctcaacaccaaagctttygcgggcacagcggccgcagtcgtgcacgtcagttggcaggtgagtgacgtyggtccrcttcctcyctttattgctgtagaatgactcacgcatctgcttacctcaaccatttggtaaccctgcagcctggcctgcgcatctggcttccacgccagtctcttgggtgcaggccgagctcctgatgtgtaccagccccttttagatctactgcagacttaagacatctgagacttccgcgatgcagtacggcagctcccagccctggactggtgtggttgccatgccaggctgcacagcagaagtccctccagcgctcttaggactgcccgtgcccagcccaccccaggggttctgatttggttcatctaggctgaggcccagcagctggatttcctaaagctcctgggtgactgtgacttgtaccgcagttgaagagcactggcgtggcaccttgattctgacttggctttttttttctttttgagatggagtcttgctctgtcgcccaggctggagtgcagtggcacgatctcggctcactgcaaactccacctcccgggttcacgccattctcctgcctcagcctccctagtagctgggactacaggcacccgccaccacacccggctaattatttttgtattttttttagtagagatggggtttcaccgtgttagccaggatggtctcgatctcctggcctcgtgatccgcccgcctctgcctcccaaagtgctgggattataggcgtgagccaccgtgtccggcctgacttggctttgaatcccagctccaccacttcctggtctttgatccagtttaagttcccgaatgttgctgacctttttcctcacgtcaagtagggatggcccaagctcagctggggccacttgcaagtcttttggtgactctgggctttagtttcctcctgtgtgagcttgagacacgcttcgcgaggtcgaactagccagtccctcacgtgctgcgcatggtgccatgctaagctgccgtccctcccatgcatggtggtgaagagcaaagaccagagccaggcagccactggccacctcacttgcctctctgtgcctcagtttcctcacctcacccagggttactttgagaattacatttattggaatttttcttttcttttctttttttttgagacagagtctcactctgtcacccaggctggagggcagtggcacgatctcagctcatggtaagctccgcctcctggattcacgccattctcctgcctcagcctcccaagtagctgggactacaggcgcccgccaccacgcccggctaagtttttgtatttttagtagagacggggtttcaccgtgttagccaggatggtctcgatctcctggcctcgtgatccaccagccttggcctcgcaaagtgctgggattacaggtgtgagccaccgcgcctggccggaatttttattttcactggaatttgtggtggggctgccagaacttagcaataaagggaggagggtggggaatcctagaacttcgcggagagcagcagctggggttgacagcagttgctctctggagtgattctgtttctctcttgatttcagcctcgttgcttttcttccatttaaataggctagagtcagtctgttttcaggctccttttgaagaacgtaacaattgcccagaatagagcaatagacaggtctccctggcctcccgaggggccatggtggtgggatgtccttgactcattttattttaaaataatgtctttgtcctttttgggctactataacaaacgttctatcractatgtagcttgaacaacaaacatttgtttctcacaattctggaggctagaaatccaagatcaaggcacctgcagatttggtgtctggtgagggcctgtttcccgattcacagctgccgccttctctgtcctcactgggttaggggtgaacaagtttcttttatgytgatttatttatttatttattttgagatggagactcgctctgtcacctargctggagtgcagtggcgcgatcttggctcactgcaacctccgcttcctacgttcaagcaattctcctgcctcagcctcacgagcggctgggaccacaggcacatgccaccacacccggctcattttttgtatttttagtagagatggggtttcaccgtgttagccaggatggtcttgatctcctgacctcgtgatccacccgcctcggcctcccaaagtgctgggattacaggcgtgagccacccgcccggcctatgtttgtttatttttttgagacagggtcttgctctgttgcccaggctggagtgcagtagtgcaatcatggctcactgtaacctctacctcctgggttcaagtgatcctcacactccagcctcctgagtagctgggaccacaggtatgcaccaatgtgccctcttttataagggcacagatcccattcctgaggctttggctccatgacctgatctcctcctaaaggccccaccttctaatgccatcaccttgggggctaggatttcagcacatgaatctggggacacagacattcagtccacagcaaatgccagttgactcagcctcttcttcatcaacagcaacacaagaaagcaacagttaggcaagacccatgggtagcccgaaccacaggtattgccagggacgtgaggggtgtgaggaccaagtgcccagcttcctcttcactcatttgtgttcacatctgattcaggcgaccttaagcctgggtatgagtgggcgtgcagggagacctgctcccccattcgctggcccaccagacaggctgcggctctgacttccttatggcaatatctatgacaccaactgaaagatgatttgctcagtctcttctgaacctcgtgtgaagtgacatttaatggtagcatccgtaaagtgtaatcacatttgatcaattttcttytgagttgcctgtgaggaagggcagtgaagccattcccactgggagcccgaagcccacgccaggatgggttggtagcagctcggagccttgcccgccttggggcctgtcccaggagagcggagctcacacgggctccctggcttggctcttctgggctgaaaccaaagccctcagcactgcrttagcacaggctgaatgatgagatcttactttttctatgtcatctcagctcacgacactgatgttgtgtttgccagggtcactgtccacagcaccccggttagacgctcatctgggccagcaccacaaagcctgctgagcgcayggcgtgtgtcagccttgcccacacccgccagccggcgctgctctggccttccaccgatgacccccaaaacgatgcccagggccgtgggctctcccctgtgtgtgccagctcggagacgttcctctgagccccgcaagaactctgcaatgaggtaagacacgaaggtggtaataaattggtctcaaattcctaggcttgctgtcccagacagtgacatacctttttcttgccttgctccaggttttagtgaagtaaatagtatttggaaagtttgtttgttttttttttcattgcaaagagaaaatgcaatagacatgagcatagaggaaaattaaaggtattacaaggaaatactgcstgtaattctctgataatcaatttgaaaacctaatggttttctaaaatttgcaagttattggccaggtgtggtggctcacgcctgtaatcccagcactttgggaggccgaggcaggcagactgcytgagctcaggagtttgagatcaacctgggtaacatggcaaaaccccatctctacaaaaaatacaaaaataagctaggtgtggtggcgtgcactgtagtcccagctatttagggggctgaggtgggaggatcacttgagctcaggaggttgaggctgcagtgagctgagattgccccgttgcactccagcctgggggacagagtgagaccccgtctgtaaaaattaaaataaataaaataaataaaataaaatttatctaaattgacccagaacacatgaagtaagccatagctggagctcagaaatgattaaagattgaaaaaggcacctgattccaatgaagtcacacctcagtcgtgtataacctttgaaacagatcatgctagtgtgtaaagttaactatcttagccgggcgcggtggctcacgcctgtaatcccagcactttgggagcccgaggtgggcagatcacgaggtcaggagttcgagaccaacctggccaacatggtgagaccctgtctgtactaaaaatacaaaaattagctgggcatcatggtggcatgcgcctgtaatcccagctactcaggcggctgaggcaggagaatcacttgattctgggaggcagaggttggggtgagccaagatcgcaccactgcactccagcctgtgcaacagagaccctgtctcaaaaaaacgaaaaacaaaacaaaaaaacatatataatatccgtgtatttatacacaaattacacatttttatatatcttatatgtttctgtgtatgtacatctaccaacagtaggtgttgacactgtgtgtatctatgtagttctatgataatgcagaagactctggaagaaaatatgctggcatgtgtgtgcattacagagggagagggaaaggcatggaatgccaaagagaaaatgagaaacaaggcctcactgaaaacaccagatctgatatataaataggaatatgtgtttaactatcttgtatgtttgtaagtgtaaatgtagaaacaaaattctgcttgtttttggaattttcttatgaaacctctgaagtattaaaaagaaggtactgtgtgttagttgatggacctgcggctttgctgggtttccggaaggaattcagttttgcgtggcaggtactcgaggacctgtgggcagcaggcaagcccagcagcgcccgtgcagggtcctgtgggagacgccattggaaagctggtgtgggcagcctgtacctggggcctcagccctgatcagggcactgggcagcaggggagggggcatctggggcagaaggagccagctgcatacccacctaggcctaggagaagccccccactagctgcatgcgaggaggagctggccgtggctcaaggaggggtccctgtgtgtggtctgggctcccttcaggaggtgacgggcgtgcgcattaccttgtgtttagtaactagaaaggaaggggctaacatcagcccctggtgatgctggacagctaagatttgtgagctgagaggaactggagagatcactgagccccttccatacacaggaaactgggggtctggagggtgaaggccctagagccgggacgcactccacccaggacactgttcctccagagtgacttgcttcccacatcagccaagtgaacgagcattttagagacatttyctcataagtttttttccttcccacagaactgaaccaacaagggagagcaacagaaagacagattccaggctggtggatgtgtcccctgacaggggttctcctccttcccgtgtgcctcaggcacttaacttttctccagaggaaagcgattctactttctccaaaagtactgccacagaagtagctcgggaggaagccaagccgggtggagatgcagcccctagtgaggtgggcagaacgggcgcagctgggttctgttagctgagattcctggaggctrctcgggaagcccgtggaacccagggctgtggctggcggagttccctgccatgcttcatcctggggccagtgcctccgtgccaagcaacccaaagggaggcagtcaggacttccaggcctccaggggagaaagccctgcatttgactaaggcaagggtcagggatcaaagctgaggaagcgggaagcagggtggcaggagctggtggctgctggtgagcgggtatggacagggaggtgggcaacagtcagagaggcacggcccaccccatacagagcctccttccaccaaggccccgcctgattccttggctttccaaaccgccagcccacctggaacatgagcaaagctcacattctcccaagatggttgccagaaagatgctggactctgctcttaaccttggttttgtacccaggctcttcttgtagatatcaaactggaaccactcrcggtcactccagatgctgcaagccagcccctcattgaccttcctctcatcgacttctgygataccccagaagcacacgtggctgtaggatctgaaagcaggcctctgatcgacctcatgacaaacactccagacatgaataaaaatgtggccaaaccttcaccggtggtgggacaggtgagaagtggcaggtggttcatgttgactcagccctgggtgtcctcagttctgggattgttcatcctcccagggccatcgtgggacccttgagagtggctgttgagtcttctcagctacacacctcagggcaggatgcacctttggcagcctgagcttctcaaagatcagctgcctctgaggtgccctgccaggaccctgccagctcttgttggacagggaccgcctctctcctgcccatagaccccagggccagatgtgggacagaggaatgtgcatggtgggggcctgggcttctccgtgtgtgtcctgtctccttccagcttcttagacgtggtggcccagagtgcttttcagtgcacccgagccaggatgagcgagtggctgtgatgacccacgcagccagtcctctgtgcagggaggggaagggaggccctagccggatccacgctcacctcctccactctgctctcttccagctcatagacctgagctcccctctgatccagctgagccctgaggctgacaaggagaacgtggattccccactcctcaagttctaagccgaaccaaatcctttgccttgaaagaacagccctaaagtggttttcaaccctcagaaacaagctttaggctggtcgcagtggcttacacttgtaaccctagaacttgggaggctgaggtgggcggattacttgagcccaggagttcgggaccagcctgggaaatatagtgaaactcctgtccctacaaaaaatacaaaaattagccgggtgtggtagtgcatgcctgtagtcccagctacttgggaggctgaagtgggaggatggcctgagctcaaggagatgcaggctgcagtgggctgtgattgtgccmctgcactccagcctgggcaccaatgtgagaacctgtcttggaaaaaaaaaaaaagaaacatgttttagtagaagttttatttgaaaaagaaaaataagcataaatatattcccagtgctggagagggtgggctgagggactggggccagcacggaccacccaaggcctctgcttcccgccgccaccctcctcgctgccattctctgggctggaatgtgaagcctcagtcactctaaatgaagaattttcttttgaatgttttgtatgtaaaatagcaagtggctatttttaaagttaagtttgtataaatagttagatattctagatttacattaaattgtaaaataaatggacttattgaagcatatcttgatttttaagcttatcttgattttcaaacatgcatagctatttttatcactctaatcagtaaggctactatctagactcgaatgctttcatacaagtgattttcaaaaattagtcaataaaaattgatgtcagtgcaggcccaggcccgcccccagatacactagtttctaggtctggggccagcctagtaattgttactaggcacacaggtgatgctgactcgatggcctgagacacaccccttgagaagaagctgctctggggagacgagggtatgagtggaaagaggatgggcgaggaggccgggcttacctggacactaaggtgatggacrgcgtctgctgggcaggcctcggggaggacccctcagctttgctctcagcaggggcccgacaagctcagtgggcagtggcaggaactgagtgccactggaaagcccattccctttatttagaaaacgagctccaggaagccgctactttgtgtccatttctcttgaggaaacttaccaccttggttgagcggcttcatggcagacagcagcgagccagcggccggactctgtatttcggaccccactccagtgctccctgggtcataccaggatctgcctctgtccacaaagatgagggaaaatgatgactgtgctgtgctctctacttcctgcggttactgcgtgattctaaagctgccactcggaacagcgagtcctctgscgtcgagagcagggaggggtagggtggacaggcgatgccgtggaaagacgtctcggtggaaactgccatggtggaaaggtggcgcgcttctcacggctgagttgctgcgcctgcagacggaagctccccacaggcagagctgcttggatgtgtgagtcatgaagccagagaagccccgctccatgagcagtgactccccaggtaagactttcagccagtcctgcgctggccagagtcgccgggcccgtgggaatcacggcggctccacgtctccgggacagcagggaatcccaggggcctggtagtgacaccggagggtcctcagggaacctctggtctggccctcatttcccaggggtagaaaaggaaatctgaaattggattaaaccatgcagcaaatatttactgaggctctgctatgggtcaggctgttttctgctgggtgcagcggggtgcagcgctcaggtaccccttccctcttagggcttcccactgggtagaggagggagatgttcagctcccagctcatctgtaaccaagctgtgcctcagttgtctccattcaggccctgggggtgagcccagcctttggcctgtggccccaatcccgctgctggggctcctccccsctgtgcccttcccctccccggtgcggcttcagtgcagccaggctctccttggtacccaggccagacagagtgatctgactttaactctctacagacagacaggaagagggcccaggagcaggagctggacagagcagagctgctcctgtcctgaggctccaggcccattcctttctgtctgggtttctccactgggctcttcctgccgaagccacccagtctgagctcccccactccctctcctggtacacaggcccttggttcacccctcagagggctccgggtgggaagatgcacagttagttggagactgaagggctccgtggccccaggagggccagcccctttctccataggatggcaccgaacacctcagctgccactggagggccaccctcccaggtccaagacgtccaacttcatgtgattttttaccacatttcattaattttgtggagcaaatgtcttcccattttacatctctgaaatccacgtctctgacattgctgttggcaggcggcacctgggatgtcgtcatcctggccataactagcctgtagtggacctgggtgatacacaggggcctcttggagctacggagtacctaaaataccatatagttaaccaaaaagtagcagaaaatatgtgagcatggatctcagccattttgcgggttggctgcaactgggacttaacctgccataaccttagatcagcctgccacacccaaggagggcctgcccccagacccagactcaagtttagacacagcctaaacgtgtacctctaaatctgcacaaaytcagctgcccagatactggatttccttatctcttccgggaaatgcaagatgaaattgccctcctgttgggtattttcctgatcctttattctgaaaaagtggtcatccttttccccacaggccctgtgacctccctcctgtcttgcagctcctcctggcaccagtccccagggctctcctgttggtagttcctgcttttcttcttggaaattcctcgtggacctcgagatctttaccctaaaatagttctgttgaatttcaccctggcaatgtaaattgatagcttatcttcacagatgccagacaatggacaactcaccatcagtcctctgctcacctgagacaaatgcatgtctgattgcttcctctgccctattgtttatgtgaaaatgcagattcactgagccagactaaggcatcagtgactgttcctctacctgcctctcacatggagattgtgtattcagtgaaaggctgatcaaagacccaaaggaatgcaacagtttatctcttatctacctatgacctgcgagctgcccaccacccccagttgttgcgcctttccagacagaaccagtgtacatcttacacgtattaattgatgtcctgtgtctccctaatatgtatcaaagcaagctgtgcctcgaccaccttgggcacatatcctcaggacatcatcctgaggctgtgtcactggcatgtccttaaccttggcaaaataaactttctaaattgaaacctgtctcaggtactttgggttcataccacaagggagggttctcatgcacatgtgcctaataataacaactatcacaaaagactgcaaaaaccacaactttacacaaaggctatcgtaaccttcctcaaaaaaaaaaaaaaaacaaaaaacttctgttgcaaggacatctgcccagcaactgcttgtccaaccctggagtgctgtcacccttgttattgatctttgtagccaaagaattatctcaaaacaatgatgtgatcctcattttccctttaaaaacctttgtcttcctaggccgggcactgtggctcacgcgtgtaatcccagcactttgggaggccgaggcgggcggatcacaaggtcaggagatcaagaccatcctggccaacatggtgaaatgccgtctctactaaaaatacaaaaattagctgggtgtggtggcatgtgcctgtaatcccagctactccggaggctgaggcaggagaatcgcttaaacccgggaggcggaggttgcagtgagctaagatcacgccactgcactccagcctagtgaccaagtgagactgtctcaaaaaaataaataaataaaataaaaacctttgtcttcctttacttccctgaatacccacatagcttattgtggcatgcatattcccattgcaatgccctattcacaaatgaacatctttttcgttcagagtctccctgtgctttaggtagaccttgtctagatgctaactcgtagagaagaactcagcttgaatatcacccctgggggatgacctccattctctcctccttcctttattcagcgaggttatgaagcacctgccctgggccaggggcttttctgggcatggagtaggagtggacagaacacaaaacccctgtccaacacacctcacagacattaaggattgagtgctgagtatgcttggagtcaaactgtaaaagatttgaagatatttattcatgtcatagtcccaggagatcctgagaacacgtgctcaaactggtggtgctacagcttttggtttcgtacgttttagggagacataagccataaatcaatacatgtaagatgtaacattggttccggaaaggtgggacaactcgaaggtggggtggggcttccaggtcataggtggattcaaagattttctgggccgggggcagtgactcacacctgtaatcccgccactttgggaggctgaggtgggcggatcccttgaggtcaggagtgagagaccagcctggcaaatacggtgaaaccccgtctctactaaaaatacaaaaattagctgggcttggtggcgggcgcctgtaatcgcagctactagggaggctgaggcaggagaatcgcttgaatcttggaggtgaaggttgcagtgagccgaggtcgcgcccactacactccagcctgcgacagagcaaaactccatctcaaaaaaatttaattaattaaaaattaaattaaattaaaatactgtaaaatacttcgatatctttcagggcctgccatctgtcatgtcggtatcctattgctacggagagtccgcctagacagtcttaagtctgttttgacgttaatgctggtccgaattccaaagggaggaggagggtctagtgaggcgggtcccacccggcctttcccatcagagcccgaactcgcggttcaggttccctctaggacgcccttggccgagaggaggcctccaatggctggctggggggcttagaattttatttttggtttacagcgcagaagaagagcagtgaggccggggcgcgggtggggagggcaaggcggcggctcaaaaaaaaagccagcccctcgcggcccgacagagtctcggcgccccgcgggtcggtggagcctcaggggtgagcgcaggccggagacaggggaacccgccgcgggacaggggaaggccggacggaacgcgggtaagctgccgcagcttccggccgggccactagcgcggaccctacggccggggcgggacttccggcaaggcgcggaagcggcggtagctgcagctggcgaagttgggcgactggcggatgcaggccttgcggcacgtcgtgtgcgccctgtccggcggcgtggacagcgccgtggccgcgctgctgctgaggcggagaggtgaggcgtccgaggctcccgccccccgccgagcgaatgtgtccccggaaacctgtccccgtccgtcgtggcgttgtgcacgtctcctccctccctgggccgctggttgcgcgcgggtcggcaggaggataccccgtcctctgactttggttcggaggctcctcgccctccacctgtgtagtcggaggtgtgcgcgactgcagctccgactacctgggagcagttccgcgcccctctccacccacgcgcgcccacccacagtgagaagccggcgggccggggtggggtggggagggaagggtttctcacggatctgcggcgtccacattcacctgtgagaccgtggacactggtgaggggagctgggatcgccgggccgggggcctgacctctgcacacgctgtggccgcccggtgggaggtccttgtcctccccactcagcagactggacaactgccgcgcggcgggtctgcttgttcagcgtctcctgtgttctccgctcgctggaggacaaagttttctccaggagcatttgcatttcttccggcatctaaacggagccccacgggtgcttagcattcctcgggcccggcgctgaaatgagcacttgtttaacttcacctgtgtggctccccgcgggaggcctcattcacagagtcacgtttgtggagctctgctttgcgccatctttggctcctgaccttgggcaagtgaattaagccgtcccctgtaaaattcggctaacacctgcctcacggggtgactggagggattagatgacatagtacatactgatgagtacgtgctcagcacatacgaggtacgcagaaaacagtagtggctattagtttatattgttaataaccatagctattatggtaggtacagtaagtgccaaagagaagggtaggcggaccataagcagaaatagttgtgaggaagggagagtggaggaaagcatcctagagatggaggtgctcagctgagtcgaaagaagagtaggatgtcactaagcagagacttggaggtggaggcggccctcccggcacagtcagcagtgcaagcagaatcacagaggcctgcaagtgtgggctggttctggccagatggagatggaaggagaggagcctggagcacgtttagccctgattatggaagatgctataccaggggctttagactgttaggtagacattagtctggttgatctgggataggggtggtctttcgcgtgtggtggtgtagttttgacaaagctttgtcatcaaatttctgttgttttgggtactatatgaagccttcttcagcagtcatttgccctgtctttcattacattcagcctacctaaacgaaccagctttctcatacagggtctgcacctgtgtagtttgctaaggtggtgtagggctaaagttggcctttccaatatttgggtgaatattttgttacaatcgaaaaggtagaaaataggtcataaactaggtggtacagctcttacaaaatatcgaaaattttaattatctttatatctgatcacttagaatctaagtcttagatagtaactagaaataacttttgaaaagagtttccttttttgataactgaatggtgctttgaaaaattttgttgagtttcgactattccttcgtgtattccacacacactggctgatcccctcctgctaggtattgtgctgatacatagatggggacacaaagatgagaaaataccacctcgttaatcttggggactcaggcaccaagatggaaaccggatccctgaagccacatggcaaagcagggactgcccggcaggccaggcacagaggcacaggagcacagcgtgtggggaacttctcagagctcagaaatcactgccgttttaccgaaggttgatttatgtattctctttaattgaccttcccgcccgcaggttaccaggtgacaggggtgtttatgaagaactgggactcactggatgaacatggggtctgtactgccgacaaagactgtgaagatgcttacagagtttgccagatcttagacatccctttccatcaagtgtcctacgtaaaggagtattggaatgatgtgttcaggtgagtgcgggtcacagcacaaaggaagcttcctcacactgtggatccttgcagtggaaggatccggtaaccagccagaccgacgcctgtgctgcagcccagcgctctccctccacggtggtgctgaagactgcaagaggcctcagccaccctcggggctctgtgttagaggcgaggcctggaccccacagcacacccagctctctcactcctgtcattttgccacttgcctgaagtctctttaatgctttcttggaccttgagctgtttctgttgcccagttaggataggggagctaaggctgagggctcccctggaaggtgagcaccaatgcctgtgtgctatgtgggtcagcgattaggggatttctgagaaagaggtgatacatggcctgtgcctctgaaaacaagaaacaaacaaaaacttttctaaaatccaatataatctcaataattaagtgctgtgtgctaggcgtgtgccacatctaggaacattaagatgtcttcactgtgacctggctctgtaggagtttgcggtctagttgggaggacattatcttcacaagaggtgacagtgatgcgtggcacgcaggaagtaccagtgatgctatcagtcactgaacccagaggagggagaaacttgcagtgtggagtaatcaagaaggcttcaccggagaggaggggttgcaaacaaagttgtagagaagggactccaaatggggtaacgagagcagcgtgaaggggagaagaaatgctgattgtgtatttcaggaccgttgtaaagtttggctggacttttgttcctgcagtggaaggagtgtagggctcatcctctggtgagccctgactgtgatgaatgtcgggcagttgtcgaaggcgtctgacacagcaggccatgtgcgcgggacaggctgcccctgcctgagtgggctttaggggcagaagagccttgggttgagtcctgactgtagcttattatatgaccttgggcaatttacttgactttgtttttttaattgaaaaaaattctctttttttcctgccaacaaagacccagaagagatacttgacttttctaagccccaattttctcatctttaaaatgaggataacactgatgcctcacagggttatgaaagaattgagattaggttctagtatgtatgcctggtatattagtaagcagtcaataaacatagctgtttttcttttctatttttttttgagacagagcctcgctctgttgcccaggctggagtgcagtggcgcaatcttggctcactgcaacatctgcctcccaggttcaagcgattctcatgcctcagcctcccaagtagctgggattataggcatgcaccaccacgcccggataatttttgtatttttagtagagacagggtttcgccatgttggccgggctagtctcagactcctgacctcagaagatccactcgtctcagcctcccaaagtgctgggattacaggcgtgagccaccacgccagcctgctatttttattttcattattaaaaagatgagtctggggagctaagctatgaggacgcaaaggcataaaaatgatataatggactctggggtgagggataaaagactacacatcgggtacaatgtccactgcttgggtgacgggtacaccaaaatctcagaagtcaccactgaagaacttatccatgtgaccaaataccagctgttgcccaaaaaaccattgaaataacaataaaacgaaatttagagagattaagtaaattgactatggtcacctaaataatcaacggaagagcttgaatatgaaccctctgtgactctatgctataacatatgggtgtcgtatatattaacaacatggacaaaactgatggctgaattttcctggggaaagttacctgtagaatgcatgataaatgcattaaaaacttatctgtagaatgcatgataaatgcattaaaaacttctgcagttttctcggggacataagaaaaaaaaaagagtgtggcggccaaatacaggataaatctgggggaagaccaaaggcagagagtctcaggaagtgctgttgctggagatttggacttcatggggagggagtgtgggagtggaaggtgagggctggcttgttggacccagaggacaagtccaccgggcagtagatctgaggtgcttgttaaacacagacctggaccgaggtctgggggcggccctggaatctgctttaataagcacttcagctgtgctggtggtgtggggggttgtcagggtctttctttgagaaaaggtgtgatgcggcttagggactgatgtgtgtgggagaccagagaggagaggagtcagcagtagtttca

SEQ ID NO: 96996 - DNA, 134296 bp, Homo sapiens
  misc_feature (1)...(134296): n = A,T,C or G
cacggataatgaacatacggtcaacataaatgtaaattctgctttctttcaaaaagaagaagaagaaaagtgcttctcccacaatgacaggcccagcatcagaaaagcagcaagaagatggtacatgaagtgtgatttcaatgaggctggctctagagcctatctacgtgagttcaaaccccagttctaccacattccagctttgggatcaatgacatgttacttaacatctctggccttagtctaatcatctttaaagtaggaataaaaacactccctaccccatatgtttgtcttaaggattgatgatagacacttggaaagacacagccagagcctgtgtacatgctctacaacaggggcctgagcccactgcaacaaaaagaaaaatgccaagtgggaaacactggcactcctactgatgaacccctcttgctgtggatcctacccaaattcccccagtgtgacacccgaaagtctcccatgtgccagacctttccctctcattcctttcttaaaacttactcttggctgggcgcagtagctcacgcctgtaatcccagcactttgggaggcccaggcgggcggatcacgaggtcaggagtttgagaccagcctaaccaacaaggtgaaaccccgtctctactaaaaatataaacattagccaggtgtggtggcacgtgcctgtaatcccagctactcaggaggctgaggcaggagactcgcttgaacctgggagacggaggttgcagtgagccaaggtcacgccattgcactccaacctgggcaacagaggaagactccgtctctaaaaaaaaaaaacaaaaaacttactcttcattggatctctttcctcttgccataaatgggtgacaattggagaagctgggtgggcagtacagttggtacagggtgtgaacacacacagggaagctgaggaggtgatttcagttctgactcttccaggtccagccgtgtgatccagggcaaggtcatcctacctcccaggatggtttcctcatgggtgaaatcagaggactagactagatcaaaaatagcccatgtctgcaatgggccagagagttaacatgtttgactttgagagctctgtggtcttgtcacaacttctcaactctaccatcagagcaggacaacagtcacagacaatgcaatgagcgtgtctgtgttctaataaaacttttcttacagaaacaggcaccaagccacacttggcctgtacagagcttattactgtacaaatatactatatatatataaaagatatatatagtatactataaatatacaaatatactatatataatgtagtatatttataattaatctggagaactaatttaattcatagttaatgaagtaggtatgaagtgtgatagataaaataaataatatatttataattctataattacataggattatatatttctataaattatgttctataatttatatgtccaccacctaaacccacaaccatggtactgtaaccaatctccctgggcagtgacccatggctgacttttagtctgtcctgggggcacttcaatctctttcagggagtgcagccataggttgacacagtcattcagctgcctccatgcagaactgtacctgcactagcccagccagacaaggaagagctacttataacatgctctaggtcacttctagaggaggctccctttggcaataataaaaaattggtggttttcatctctgtagtagagcacttcagaactaatatcatttccttagtgatctatattagaaaacaacccagaaaccaagaaaccatacagtggcatggcttgtaaatgttctgcccactcatcccagagtgaagaaatctctcttgcatctccccaatcaatttaattcatttgacagaaatcattttctccatcattgacatgaccatttatttaaaaatcttttatatcgatttctctctagaggaacagaaacttgttaattcttaaaggtaccatttcgtataatgtgcccccattctgcagccaattatatccagtgccatggcttcctctggatatcaataactatcagccacccagtggaccgctgcttgcaacttcctttctgagctgtcattagaagatccctgacttggggctgactcacagcagttgctgttaactgctgcggccacctttgtgcatcttttgagtgcaatgtctacctcctggcgtcactctgatgcctttcctgaggctccagctttctctccccctgggttccatccataacatcaacactatgattttttaattagctctatgagacatacatttgaaatcaaatcccaaaaggaactgggtcttgtagaataaagtaacttggatgcctatctggaggaatcattggaatcctaatttctagcatgaccatagtcaggcagccaagtgaaccttctgccactggcatcttcctacacttccacagggcctgctaagctgctgtgtggaaaggggcttttccagtcccagttttctcctttcctcttgagttaaggagaacagaaaggggaccacctgaccaaaccctgactaagggtaaatgatcagacctttagggataagtttgccagtgatcgtggttccagctgtctcattagggatttccaaggcactctcaagattcaaaaccaacaactcttgaaggttctgagtgtccacgcaagggctaaatatatccatacaactcaatatcagcccaaggccacagatagcccaaatagcctctgcaggcgcctactctttaaggaggaatcacattaagctctggttcttccctctactcttaacagagtcccccaacttaggaaaactccacagaggtcttcattagcaatgattcaggaaatacttcctgctctatatccccgaagctgaaaaatgatgcaaaaatctcagaaagacaccaatggaaaatttcaaaggagcaatctttatcccatggatactacccagttcctgaagagcaagcagtctattgcaggaaagacagctgtattcttgagatagatagatagatagatagatagatagatagatagatagatagatgatagatacatacatacatacatacatacatacatacatacatacgcaggcagacagatgatagatgggcatgcagacatagacacagatatgttaccagaaagaagtcccaatccaaaccccaagagaaggttcttggacttcacacaagaaagaatttggggtgagtccatagagtgaaggcaagtttattaagaaagtaaaggaataaaagaatggctactccataggcagaagtgacagggccactcaactgagtatacttacagttatttcttgattatatgctaaacaaggggtggagcagggatttcccaaaagcgatttcccagaactgagggttcttccccatgtcagactatatagggtacttctggacattgccatgacatttgtagactgtctttgggacattaggagcgtcttttagcatattaatgtattataattagtgcataatgagcagtgaggatgaccagaagtcactttcatcgccatcttagttttggccggcttctgtactgcatccttgtttatcagcaaggcctttgtgaccggtatcttgtcccagcctcctatctcctcctgtggccaggaatgcctaacctcctgggagtgcagcccagtaggtctcagcctcattttatccagcccctattcaagatggagtcactttggttcaaatgcctctgacagatatagacgttgatatagataaatacaatccttatgaaatacctgaagacaatgtataaatgattgcagatcaaacagaaatacagaaaatgtggcattgacatctagttcccaaggggactgagaaaaagaaaaacagcctcttctctatgtcttaatgtacaattacaaaaaattccatacagcttgcatcaattaagctccttctatgtacctggcaccatgctaagagattaatgaacatagttcctgccttaaaggcttcccaatctagctgagaagaaagccacaccaacaaataaccataatataaagcagactataataagtgatacaataaagatacaaaagtgcagaaaaataatagggctgtttgctttgttttttcaaggaccacaaattttaaaaatttaccaaggcatccagcaagggcaagggctaattggcaatcttcagagcttagcaacaacaaatgaaatgaaaacatgacttctcatttcccaaaataaaacacactgaattatggccacagatacattctcagttctcccaaaaatgatctcaatgtgtcttctgtgtttatgacctgaaaaactccgtaacaataaatcaaagtctggagaagaaaccaaaataaagaatagaattaccatctttttcctcattatgcccttatctctacctcagcctcccagttcattaaaggtaccattccttgctttgcacaacacaagtacttgcctatgggccaatttgaaatgactcaggatacagccttctgaaaacacttaaaaggatttacttgccatatctatgtatcccacaaacacgtcttaaacacttgttgagaaccttactcagtgccagactctgggatcgagagaacaagacatggtctcatcctcgatgaacaagacagtccagagatgaggggaaggaaggaaagaacgaatctatgcacaaataaggacatttgaaagtggcaaatgtgccaggtggtgctgtggctcacacctgtaatcccagtactttgggaaactgaggcaggaggatcccttaagctcaggagttcgaaaccagcctggggaacagagtgagactccatctctacaaaaaaaaatgttaaaaaattagtgcacgcccgtagtctcagcaactcaggaggctgaggcaggaggattgcttgaacccagaagtttgaggctgcagtgagccgagatcacgccactacactccagcctgggcaaaagagagggactccatctcaaaaaaaaaaaaaaaaaaaaggaataatgctctactgattttatgtccagggttattacagcagcatccacacactgtttcttatgcacgacggcaaagaagccagaaaatcatcaaatattttggaaagagtcaagtcatctagtgtatgaagtttggcttctaagagatctcttattcctactctcttccctctccaattcatcttgcatcccacttctgggtcagtactcgtaaagcttaattctaattgcattaatcctctgctcaaagagttctaatgcccctcctcttaactatcgagtgaagtccaggctccttagcaatgcacccaagcattccaaaacttagcctcagcctcccgctccagctttgcctttttattcagtaaatatcaattaaatgccaagcatgggagatactgggaaaatcaagaaaccagaaattagtcaagattcctaatttcttagtagaatattaagcagacaaattaagcaagcaaacaaaaaatttcaaatggtgacaagtgctatgaagaaaataaagcagcgctagagaatggcaggggcgggggaccactctacaatgggtgattaggagcatctgagtaagagacatttaaacggagacctgaataactaggagcaagccacatgaccctctaggggatgactacgtcaagcaaaggaaccagccaaggcaaaggcccgatggaactatgaagaccagggtgggtagagcgtcaggaacaatggagagaatggtgtgagacaaggttggagagcctggaccacgtagggcttacaggcccatggatttttaaccccatgtctgatgagaaaccattagcaggttttaagaaggaagcaggtggtggatcctgcgcctggccagccctgcccggccttccctctggcccacctgaccgccatgcgtccgtcctcctccccacctcgtggccggcagcagccctccagctttggctccgtggactggctctcccagaacagctgctcagggccgacccacacccccaggcctgccgacgtctccccggggagccaccctggcccgggccagacatccggcacccgggagccccctcaggccgtcagcatcaagaaggctcggtcctcaaatctgcctgcgccggagagggccgtggctgggttgggtaagaagccaaacccctggcaggccccctgtgtaggcacagccttcaccaccgagcaggtccgcgccttggagggcgtcttccagcaccaccaggacctgggccctctggaacggaaaaggctggcagggagatgcagctctcggacgtctagacaaaaacctggtttcaaaaacgccagatgaaacagaaacgacaaacgcaggactcccagctgaacagccccttctctgtgtctctccacgcgccccctgctttccactcaccgtcttctggccttgtcaatacctgcagctgccgtgcccttgggcacccctgccagggccccaggctctgatgctgccccctggctctctctggggtctctgccaagtggaacaagaggccctggcctctgcgggggtttcctgctatgggcagcctctggcgtaccaccggccaagcccaggaagtggcgtgcgtacgctgggaccagctctgtccacggggccctggggcctgagcgccctgcaggagacggggggatgcattttgaggatgcacctctgactccatgcctcccacacgcgcggtctgtgcagatcgcacctggagcccacctggagggctcagctgctctgttctgtttacatcgtggcggcacctctcaccctgacccatgcaaaggttctggagctttctggagaatatatttattaaagccatctcttcactgaaagttaccaaaagggtctgtttaggaagtaaatggtcagtgaaccgagtcaaacgcagaaatgggcttgttatgggtagggctttcagcatatgataaaaggataatttgttttttaaaaaatgttggaaaaactggttttccagttggaaaaagtaaaggttgtaaattttgtgtgtaaaaaagaaaaccaggaaggattggaagggaatgcaagtgtcgtgtttataaccttggggttcgagtccctcttaacaaggactccaaagctggaaagaaggagggaacaaaggtgaaaattaaggcgggatgctggggccctgcaatgctctctaggccgtgagtgagccgggactgtgccggcagcctgctggggccctgcaatgctctctaggccgtgagtgagccgggactgtgccggcagcctgctgggggctgctcttctcgggccagggaaagtggggcagccaggacctgcggctgtgcctggactgaaaccgtcgcacatgtccccactcttcagcatgtgctcacctgtccacctcctcgcagcagcctcgggacaaaacagaatgactcaaggacagcacttcctgctgaaaatctcgaagtgcccagaatgggaggcacggaagcccctcccggggaggactctccctcattgatggagcatttttggtgcagacccctcaccgcacacaccgaagcttagacaagggcrcatccgtccacgtcgccccagagtgcccaggaggcaggcagcgcggggcacccagacagacgggttcagcctgcaggactgagaggcgacctgtgaaaccgacccaggcatcccaacaggaacaaaagcgtggtcctgtggccgtgtccacagcaagttccactttccccttactcatttctgccttgttggaagtgtttacaaccagaaaaaagaaaagtaaggaagcaaactaatgtgatattcagcctagatgggtcagtttggctaccctaagaagaagagattgagctgggggcaagggacgaggcaaggaactcagttggaagcccctgcagatttcaagtgagatgtggaggtggcctggaccagagtgacagcaagagagatggaaagagttgaaccgaggtatgatatgcaagaggggtaggattttacagaatctactctaggatcacttgtgggaggaaaaggaaaaagaagaatgaaagacttcagagattacttcaaggtgcgtggcttgagcaagcaggcagacagtgatgtcagttacctagttcccatcatagctttttctctgccccaaaacactccaaccccttcaaacactcctagcccccaaatgctctagagtcaaagtagataatttgtcacctctcgagcacaacctactcttttcaaatgtgcttcattgttcatttcccttattcctgcgttttttggaactctagacataattcaagactcaaaaccagtgttatatttcctgaacctgtctgctgaaattacctcttctattcacaagcaatgcctttttacacctcaattattacatgtatcctactccaccttacattaatttactgtgccatatgcaatggtctgaatgtttcccccaaaaatcatatgtcgaaacctaattaccaatttgatagagaggtatggcctttaggaggtgattaagtcatgaaggtggggactcttrcaaaagaactttatgctgggtgcagtggctcaaacctataatctcagctactcgagaggctgaggtgagagtatcacttaagcctaggagttccagaccagcctaggctacatagtgagagcctctgtctctacaaaataaaataaattagccaggcatggcgacacatacctgtggtctcagctacctggaaggccgaggcagaaggatggctcaaaccaggagttcaagrctggagtgagttattattgcaccactacactccagcctggacagcacagcaagaccctgtctcttaaaaataaaataaaaggggccaggcgtggtggtggctaacgcctgtaatcccagcactttgggatgccgaggcaggctgatcacttgaggtcaggagtttgagaccagcctggccaacatggtgaaaccctgtctcgactaaaaatacaaaaattagccgggcgtggtggcgcacacctgttatcccagctacttgggaggctgagacaggagatcacttgaacccgggaggtggaggttgcagtgagctgagatcacaccactgcactccagcctgaacaacagagtgagactccatctcaaaaaataaaataaaataaaataaaataaaaggtcttgaggaagtggactcacccttttctgtcccttccaccacatgaggtaacagtgaaaagacaccatcttggaagcagagcaacccagccctcaccagacatagaatctgccagtaccttcatcttggacttcccagcctccaaaactatgagagatgaatttctctggcttataaattacccagcctgtagcattttgttatagcaacacacataaactaaacatgtatgccgctcacacccataaaccctaaacctcacctgtgaccaggctttgtaactcccaggaatagttgtaacttttctaactttgacctttgtaactcctgggaatctttgcatccacaaatatgtgtagacgaggatagagatggtgcggatactattgacccctaagctttgtttagttccttggccctagactgctttaggctaattcttatggagagtttggaggttgtttcattttctaggtgaggggatcaattttgaataacttgtctaggtgacacaagggagcctggattagaattcatatcctagggggtctgacaatagcatagagagtcacatagataacatatatttcttctttaaatctctacaaccagcctgcacaggaccttatttcatcaagtctaaaatgccaattcagagacccaatattatttaatggaacactgtttaaaaaagtgaagtcaattaaacttttgacacatgctaaaatgcaaccatcatcagggtagcctgatttcagagatgttaaatgtgagagaggagaaagggtgctttaaaatccctaatttataagtgagaaaactgaagcttagatagaataagcaatggccccgcctcagacaccaggtaagtggcagattatcttgactccaagaactcaggtgtcttggctccaagaactgtactcgctccgtgttagcagtacctcccctttctgtatcttggatttttcagaagaggcacaactatagcagggcatcataaagaaataaagattaaatatggagccyaagctgaaaccttgttctacactaatgcacttagcagaagcccacaacttactggtctttcctgaaatcagggggaaatgtctggctgagctgctgctccgtgggtggcactgtccagaattgtcagggataatggtaatttatgtttccttccacacctgctctcttcccagctttagtcatctgctaacacagcttctctccaggggaggacgagggaggggctgaaacgaggggaaggaagcagctcttgttcaccgcagctcagctaaattgcatttgccctcttttgcatagagcawaagtgttatagaaaatgcagcatggatttttaattttctccttgtcactggctgctgtaatcacataattaaccaagtggtagagatagtcatttatagcaaatgagcaaaacaatcacagaggttagtcacccagagaccaaaaaggttacgtttgcctctcaaaaaggcatgcgtggacagagtccccaagccttggctgtgtgggacccgacacctaaagaatgcagcattgaagtaaagaaagggcaatgtgtttgtccttcaasacaatgaattgctaactgcgcactggtttggaaggccatgaaatggacagggtggggatgggaacccccccagggccagaggccagcagctttacagacactccagccctcccctccatcccaagggatgctttcttagtaaatgcctttgttcatgctcctccttctgcccgaaatgtccttccagcctgctggactccagttcttcattcaaggacagcccaaatgtttcctttctggctccttccctgcccgaccacttcaccatggcccatagcccccatttctaccactagagtaataaacaactataaatccacacgcatacacatactacctccagcagcaccatcaccaccaccaaatgactggacagaaactaataaaacctgttaaggcccaggaagtgttttgcctgcctgactccccagataaaaaggcctccctcgaccctatgagcatggcaattaaagacaatgcaaatacccacctcctaggatccaggaatgagaacgaaattggtgatcttgagaggtgttttgaccaatactagtagagctcctctgcccaccatcacttcaaattagttttgctgtagaaccctgaaattccagcttgcgtgttaaacattgccttctccatgggatactctcttttaaaatgcaacattcatgggaaaggtaccatgtgacttattgtgccccaaaccttaatgcaaattagcataatatcttatatctttcttccctaaaaggtgaagcccagacagcagagaaatttctcacctgagcagagaggaatcaacagagaggaaagtggtaagaaaaaggcactaaacgacatgccaaataataagtatttattgagtagatacttcagaccagaacttgttcattcttctactatagctttgtaaaataggtttttgggctttttgttttttggggtgtattttggagaaaagggtctcactctgtcacccagaytgtgcaatggcatgatctcagctcactgcaacctccacctgtcaaattcaagtgagtctcttacctcagcctcctgagtagctgggattacaggcacctgccaccacgcccagctaatttttgtattttttgtagacacagggttttgtagacacagttggccaggctggtcttcaactcctgatctcaagtgatcctcccgcctcaacctctcaaagtgctgggattgcggacatgaaccaccattcctagcctacaaaataggtattagtagtagtggtattttcatttcatggatgacaaagacagcttaaacaatttgcacaaagtttaagtggagttactagaattcaaycttgagcctgtctgcagcaaaatccatgccctttccctacgagggtgcaaagtatggaattgttttcttcttccaccttcccctcaactggcccttatgcttttaccttgttctctccatcaaatctggtcaaaggaaagagtcaaatgatgtgtcatttataccttagagatgataccatgaacagctcagggagaaaagacaaaccattcacttaaaatctcataaattatggtaagacattctttttttttaggtacttttagtttttttgtttttgtttgtttgttttttgtagatttaggggatacaaatgcagggaggatttgtttgtttatttctttgtttttgagacaaggtctcacgctgtcacccaggctggagtgcaacggtacaatcgtggctcactgcagcctcaaactcctgggctcaagcaatcctcttgcctaagcctaccaagaagctgggaccacagtataagttccatgaggcagagactgtgtccactgtatccccagaagctggaaagacagcatgtgcttaataaatgtttgtggaataaataaaatttacagataggaaatggaagcacaaatgagttaaataacacattcaaagctaatccaccataagaggcagagctaggaattgaatggaacatgcctgactaactctcaaaccacatatgctctttctgctatcccatagtggaaataggttcaaccccaacctcytcattgcccaatccaacattttgtgtttttttgtttttttgtggcttgtccaggctggggtgcagtggctatttacagatgtgatcccactactgatcagcgtgggagttttcacctgctccgttttcagcttgagccagttcacccttccttaggcaacctggtggcccaccactcctgggaggtcaccatattgatgtcaaacttagtatgggcacccaactggcatagtgcactacagcccaaaactcctgggctcaagccattctcctgcctcagcctcctgagtagctggaactataggcatgggccaccatgcctggcccagtccaacatgatttaaaaggagcttaactccttcacccaggcctttgtggatagaagtatcactgcctgctgacagagggatcatgttagctcagaatgccctgcactgaaaaccttctctctcttgcaagtacatgtcagctccatgtttgtgagctaatgccaatcgagaaaatcaaataatggatgattctgaaggcccatacatgtgaaagtttgggaacagctggtttagagcactggttctcaaagtgtggtcccagaccaccagcatcagcatcgcccaggaacttgttagaaatgcacattcttgaaacccaccctgattctactgaatcagaaaccctggggtgaagccaggtgtggtggctcatgcctgtaatcccagcactttgggaagccacggcgagtggatcacctgaggtcaggagatcttgacctcagacctcagacctgatcaagaccagcctggccaacacggtgaagccccgtctctacaaaaatacaaaacttagccgggcatgatggcaggtgcctgtaatcccggctattcgggaggctgaggcaggagaatcgcttgaacacaggaggcggaggttgcagtgagctgagatcgtgtcattgcactccagcctgggtgactaagtaagactccatctcaaaaaaaaaaaaaaaaaaaaaaaaaaaagaactctggggtggatcctgattatttgtgttttaatcagtcttccaggttgatatggtttgggtctgtgtccctacccaaatctcatgttgaattataatccccagtgttgtgagagggacctggtgggaggtgattgactcataggggcagatatcccccttgctgttcttataatagtgagtgagttgtcacaagatctggttgtttaaaagtgtctagcacttaccccttcattctctctcctgccaccacatgaagatgtgcttgcgtccccttcacctttgcgccataattgtaagtttcctgaggcctcctcagccaggcctcctgtacagcctgcagaactgtgagtcaattacacctcttctctttataaattacccagtttcaggtagttctttatagcaatgagagaatgtactaatacacaggtgattcgatgtccaccaaaatttgagaccacctagtagtctagtagacaaaaaaaaaggagagtaatggcaaatgtagtcatttctgaatacctatttcctcccattgagactccatgaatagttagggccaggagagagtcatgcrgactctcatgtctcatgtcagcctgacaacgtctaagtttccctcatctgtcattccctttcttccagcatgctgagccacagtccagaggcctcagcaaaatggaatgcagtaaattcaaatgatacctttgacaaccctgggttttaatttcctgggtatgtcctttggggcagcttcacctagcctagaacaagctcagaatctccccccaaaaaagaaaagaagctattgctttctccctaccccaccctcttggcttgagattatttttttccatcctagcctgctggctttaattaggaggagtgaaggcagcgtgcagattgtagacagcaggcggtcatagcacaaaaatgtgttagagaaacagctttggataatcggaggtcaccatgtccctgtgtctgcactcccctccctctctctggcttcttttccccatcttgtttatcttacatttacccctcattacttataagggagtcaccagctcagagttcttttgctatgggcttaggrgggggtccatctttacaaaaggttgagggctgggggaaggaaatcagaatgaatggaatcatattatatgtgcacaatcagctataattaggcatcttataaatgtccactagacaaatacattacaataacaaaattaggaatggttaattgcattctgactctgggtcatagagggtaatttctttgaacccaagaggaatctgatgtattaaaatgtgcactaaatgcatatgactaagtgaagaaagtgaatctgaaaagtccatgtactgtaggattccaactatatcactttctgaaaaaggaaaagctatggagacagcaaaaagctcagtggtttcccagggttagggcagcgggaggatgaataggcagarcacagaggatttttaggacagtgagactaccccgtatgatactacagtgattaatagatatcattgtacatttgtcaaaamccatagaatgaacgacaccaagagcaagcccttaggtaaactatggactctgggcaataatgatagttaggttcatccattgtaacaggcaccattctggtgaaggatggtgataataggggaggttgtgggtgggcaatgactatgggaactctcactactttccactcaattttgctatgaacctacaactggcctaaaaaatgaagtcttggccaggcacattggctcacacctgtaatccaagtactttgggaggctgaggtgggaggatcacttgaggccaggagttggagaccagcctgggcaatgtggcaagaccctatccccacaaaaaaawtttaaaaatcatcaggcatagtagtgcacacctgtagtcctagcttcccaagagaacaaagcaggaggattcccaagagaccaaagcaggagtttgaagttatagtgacctatgatcacaccactgcattctagcctgagcracagagcaagaccctgtctcttaaagaaaagaaaaggggggcttttttttttaagagcattaaacttggactgaaaagatatgaactgtaatccctatcacagtcttggtcacctgctagcagtcacacttgggcaagttacttggtttctctggcccttggggatcctatctataaaatgaggatgataatatcttccagacagaaatgtggcattggttaaaatgaagtaatacatagagacatacagcccatgtttgtttaattagtaatagaaaaatagcatatagaatttggggcacagactggggatgaggattcttggctgctgttctgaagcagacagggctagcccagaccacaccactcatgctacctatttgagatataagctctttctttcaccattgaaaactctctgccccatggcctgctagaaacctgagagtcaaatggtaattttttttttttttctgagacagggtctcactctattgcccaggcttgaatgcagtggcacaattgtggctcaacacagcctcaaactcctgggttcaagtaatccttccacctcagcctgatgagtagctgggactagaggtgtgtgtcaccatgcccagctaattttttttttaatattttatagagactaggtatcactatgtcgcttaggctggtcttgaacccccaggctcaagagatctgcctgcctcagcctcccaaggtgccagggttacaggtgtgagccattgcgcccggccacatgaaaattttttaagacagaggcagctaactaagagagagaatcatcaaaaagcaagtaacaaatacacactgagcacctatggtatgccaactgctcttcgaggtattcagaatacattactaaccaaaggaggagttcatagaacttccattctggtggaaggagacggataatgaaatattaacatactaattaggtaagttatgcattaaaaagtaacacattccatagcatggtggctcatgcctgtaattccaacactttgggaggccgaggcaggcaaatcacttgaggccaggagttcgagaccagcctggccaacatggtgaaaccctgtttctactaaaaatacaaaaaaaaaaaatacccaggcgtggtgatgggcacctgtaatcccagctactcgggaggctgaggcaggagaattgcttgaacccaggaagtggaagttgcagtgagcccagatcgcagcactgcactccagcctgggcaacagagagagagagacgctgggaaaaaaaaaaaaaaaaaaaaaaagaagaaggaaagaaggaaggaaggaaaagaaagagagagaaagaaagaaagacagaaagaaagaaagaaagagaaaagaagagaagagaagagaaaagaaaaaagaaaaagaaaagaaagagaaagaaatggtgaggcatggtaggagtggggataggaggggagattccgtcttaaataggatggtcagggaaatgctaaccaagaagatggcatgtgagtggagtggaaggagtgagggagggagccaagcagatgtcgatggagaaatttctaggcgaagggtacagctagagcaaaggatccacggtaggagcatacaaacacatcctgagctgctccaggaagaacagggagctgaatgtgcaaggagaatcgaatggaaggaaggagaagcaagggtttaagggttcaatcgtgtagggcctcgtgggccactctaagtctggtttcacccttgaaatagggagctgttgctaggttgggagccagagaagtggcacaacctggattatgatttacacggatcactttgtctgtggtgctaagaacagatgctagtctatggagacaagggtggaagaagcaggagagcttctcagaagactttgtagtgatccaggcaagagctgacagtagatgaatcatggtgaccatgttggaggtgtgattttcagacaccgtgtgtctggaggctgagggtagaaccccaaggtcctctggaggtatatatcccaggaccttctgaagcagtgagtgtccaggtattggtcctgagcgacttaaaggatgaaattgctatcacattagctagggaagtagggaaggctgccactggaggaggtttagagaagatcaggggtttgcaggaaagtggcaaagcaggaggagtgggagtagatgacgtgctgaaagcacagaccacgcatctcacacacggcccgggaccctgccctgaggatgagcctgccctgaggaatgtgtcatttatcagtgtcattggcctgaaattgttcaggccatgtttagcaagaatcattctgaagcatttcctaggccctcagtttccccatgcaatgcaacaaatccaaaagaaattgagattaaaggaagcatacatgtattttgttactttttttttttgaaacagggtctcattctgtcacccaggttggagtgaagaggtgcgatcacagcgcactgcagcctcaaaaactcctgggatcacagctcaagggatcttcccacctcagcctcccaagtagctgggactacaggcccgaaccactrtgcccagctaatttgtaaatttttcgtagagatggggtcttgctttgttgctcaagctgatcttgaactcctggactccagcaatcctcctgcctaagccttccaaagtgttgggattatggacatgagccaccatgtctggctggttactctttatgagtggtcatccatcccatgtccacccaaccacatttgctaccactctagagaacagccatagttaccagaagatatagtcagttagatgatgaattacctcatcaatccccttagagaacaagctaattcactcctgcagattcctccttacatccaccacccacttgccctcacccactcaaaacatgttctagggagaagatctaataagccaacttccagaaaggtgtaaatgagtggggaaaaaaatgaaaatacttcctcccccagggatatttgaattttaaagtatccaaaaccctaaaccaagaggcaaaataatggaatatcattcatcagcttagggagtttaagggccagtggtcttggattcacattactcagcagctacttcctgagaaaacagtggggctccaggaacaattcaaagtggcttccttgactgccccacctttacctgtcctgtaaggtcctctgcaggtgcacacacttcctgattgtctgcacctcattcctttgtgtggaacaccctttgctccctcccttctagtccctgtgtcagggactctttctatgactctgctcaaataaataaatagatagctaaacaaatggtgtccttatccttgctcctacactgtgagtcaactccaaatatgccaaactatacagatggccaagatctagtcagggccagtggttcacgcctataatcccagcattttggaaggcaggagagttacttgagcccaggagtttgagatcagcctgggcaacatgtcgagaccccatctctgcaaaaaarttaaaaatttgccaagcacggaggtatgcatctgtggttccagctactcgggaggctgagatgggaggatcacctgagcctggggaggtcgaggatacagtgagctgtgatcatgccactgcactccagcctggacaacagagtgagactttgtctcaaaaacaaacaaacaaaacaacaacaacaacaaaaagtcatcatcttgctgtgctcaagtctggggcttgacctaacttccctgtgaccctaygacccaattgccctatggccagggaaataaaggtaagaggcagtaaaggtaaatgtctaatgagaccattttccaggtcattttaacagaaacccaaacagatgtgatgtgcctgtgcctgtgtgtgactgtgtgcacccacgtgtgtttgtgtgtgtgttgcctgcacattagcctccaaagcccttaaaccaagtggtcgccgaggggtccgccaagcaacagcagtgccagcgaagcatggagggagcccctcacacagggccagcgagagggccccagggatctctcaaacaccagtcactcactcagcgtgaagctgacagccacctccagcaacaattacagctcctccacaatttttggaggctgtaatgttaaatcaatcaatcaggtgcaccactcactgaagctcgggctgccaactcacttaagkggtgcgcaggaagcaatcaatgcataagctgcttctcctggctgtcttatttgacttccatccactttgtgaagccattacaaatctgtccttaggaaagttttttctccctctgtggctttgcaccacacttggcaaatcagcaactcccagacaagctgcaaacattctgaaatgcacctacacagaaatacacatgcacacacagacaagcaagcatcctccagcagacacacagaaagacatgcacatcccagggcaggaccaccagcttccacacagcagtcacggtcagcagtcatggggctcaggaccccagcgggagacctgaggagtcacagtgtcagaagagaagatccaccaacaatgtcccatcttacaagcatgctggccagggtggatggaaagaacagtggtttttttgttttgttttgtttttaataaaaaagaaacaacaggcaaaccacattagtccaatgtcccaccagttcctgctgcaatgctatccacgaggtgacttgcttcatgttaatcccatctccttttggaggtaactgatctttttttttgtaagagacagggtctcatgctgtcacccaggctggagtgcactgttgcaatcatagctcactgcaacctcaaactcctgggctcaagcaatcctcccaccccagcttccctagtagctaggactataggcatgtgccaccaagctcgggtaatttttatatttttagtacagacagggtcttgctatgttgcccagactggccttgaactcctagcctcaagcaattctacctcctcagcttcccaaagtgctgagattacaggcatgagccactttgcccagtcagaggtaattaatcttgaatcttatgttttcttctcccatgtccatgttaatttcctgttctcactcacctgcctgacagtcctacycacccagtgcatacacttaaaacagtgcagcattcttctggaagagtccagaaatcaccagaaatcataaggtcctctgattaactccactgaaacactggggatatattttaaagttagtgataaagagagaaattcagactttagtaactgacaagggggaaaaaaatgcatacccaggcagaagtcagacacatagacacttatctgtgaaactccacacaaacagactatatgcacacatctatgcctcaaaataaaaaaccccagcacctcactctgcagtaagctccaccctgtgcctgaaaataggtaaatggcatgttcaggatttcagctcccatatttaatttgttaccacgcaaaacatcagaggcatcactttgaatggtaggcatcaatatgattgaaacggctgccacttaatgtggtgaggaggaatcagctgtgcccccaaaacagaagacaaggaggagcatcatcctattggtttccygggaaatgatgagccctaktaatagttgttaacatgaatcaacaaatcactcctctgtcagcagctggcgggctgggccccaaatcagtcagttaaggggaagaaagctgatcattccaggaaaagtctgagcaagggaagggggcaggccattgacccctctgaggaaggagagggagccagatggtagcaaagagaaataaatgttaaccagaactccgcgcctctctgtatggctgagggaggggccgtcaaaggcagggctcctccctactaaaaacctagaatttagtgctgcgatatcaatgctcatgaaagtgtctcatgaggccagggaagagcaagagtaaggggtgatttttaagtagcgcttaagtgacgtcagtggccgggtgcagtggctcaagcctataatgccagcattttggaaagccaaattgggaggatagcttgagcccaggagttcaagacaagcctgggcaacatggcaagaccctgtctctacaaaaaaatttaaaattagccaggtgtggcggcatgctcctgtagtcccagctacttaagaggctgaggcaggaaaaccacttgagcccaggaggttgaagccacagtgaactatgatcacgccactgcactccagcttggacaacaaagcagaccctgtctcaaaaaacaaacaaacaaaattaagtgatgacagtgtgcagcccccaacaccaggtatggaaaagttggttagggccttgccagcaaaggaagcactggccaaatggaggctgaaattaaccgtgagttccccactcctgtctttgttataagctaaaaaccctacagctatagccagtccctgagattcaacaacctcagccattggcaaatgacaacatagaaatcagaacagccaagtacagctgaaccttttggagattctctacagttttttttagatgaaatgccttctgtaggactagattggtgccgtaatacactgattttttttttttttgagacagagtctcrctctgtcacccaggctggagtacaatggcacaatctcggctcagtgcaacctccgcctcccaggttcatgtgattctcccgcctcagcctctcaagtagctgggactacaggcacacaccaccgcacccggctaatttttgtatttttagtagagacggggtttcaccatattggccaggctggtcttgaactcctgacctcaggtgatccacctcagcctcccaaagtgctgggattataggtgtgagccaccatggctggccactgattcatttttttgaaagaatttgtttaagtacctgtatttctatgactatacaagttttttcttctctatttctagtggtttaaaatatactcacacaaaacattttgcaacattaatgtcaaaggataaatagccttaagaattaaagagctcttaaatttttgcaaattaaaatgtataagacaaaagatctcattaacaataacaaatatttatgaaacacctcattacatcccaggctaagagttttacctaaattatctattttcattttttcagtaactttaggaagtaaataatattatgccgatatcataggtcaaaaaactaaggctcagatcgtttaaataactttagtgtgtcaaattgcacaactagcaaatgatgaaacagtcattcaaaaaagtctacacttttacactatgttatatcaatttctcataagaagcccacaaaggaagacacacaaataaccaataaacatttttaaagtcaattgctaaataacaaagaagtcaaaaaataataataatttatcatttatttgcttatcaggtagacaaacatcgcaaagattaacagaacctaacattgatgagtttgtgaaaacactgactcacttacacagtattgctgagaatgtaaattataaaacctgcctggaagtcagttttctcaaaatatataaaagtgtaatttatgcatactgtgaatatccccattttggaattatcttaatgtgatsttcaaacaagaaaggtaagacaaaaagacattaatcacagttttgtttataagagctaaatattggaaacaacattagtgtccatttataagaattgcttaaatcaattatgaaacatctgtacaatagaatattactcagtcaactaaaataatggtgttgatctatatttactggcacaatgatatctatgaaaaattgtctcatcaaaaaagcaattacagaaacatataaaaatataaatatttatcgtacatacacgtgaagcaaattttctggaaggatgtttatgaaaataatgttagcactgatttttagattctggatttcttggggcttttactttactttctttttgtatttgtatgtattatctgactctttgaataagatctattgcttttacaacaataggtcattttcagaagaaaaaaatccacatcttccattttctaatttaactttgtgtaggatagcactggccctgggaatactttaaatagatgaaatataatgtcatacagagagcatggactttagactatgaccgatctggagtgcgagcttggcttttactaactttgtgactgtattagctatggctgccataacaaattatcacaaactccatggtttaaacaacacaaatgtataatcttacagttctttgggccatacctacagactcactgagctaaaattaaggtattggcaaagctattttattttctggaacttcaaggggaggatccattttcttcctcattcagatcattggcagagctcagttctttgtggttgtaggtcccagttttcttgttgactgtagctaagggctgttcacagcttctggaggctgccacattctttgactcatagctccctccctccatcttcaaagccagccacatggatggtctagtcctcacttatatctgacccatcttctacttttaagaactcatgagatgaaattgaatccactcaaatgatccaggatattcttccattaagcacatccacaagttccttcatgtcacgtaaagtaacaatcacagcttctgggtattaggatgtggacatctttgggaaatcattgtcctgcccaccacaatgactttggcaaattgtctgatgactctaaaagggtagagtaactactctaaatgggatgtggcaagatgctttcacttttttgttttatcattgcattttattcttcccattcaaagaaggtttcaaggcctccctcaccttatttatgatacctgaagacagcttttcttcttggctttgttttcataaaaaaaactaacctggcaggatccctaggagactgcagtgtaaaaaaaggtgatggctggatgatatcacagagagaagtgaccctaagtacttttgttctcagtcttgacaaggatgccttaaaaaaaaaaaagaaaaaaaaaaaaacatacagggccaggggcagtggctcaggcctgtaatcccagccttttgggaggccaaggcagggggattacttgaggccaggagttcaagatcagcctggccaacatgtcgaaaccccacctctactaaaaatacaaaaattagctaggcatggtggtgtgtgcctgtaatcccagctactcaggaggctgaggcaggagaatcacttgaactcgaaaggcagaggttgcagtacgcccagatggtgccactgcactgcagcctagacaacagagcaagacactgtctcaaaaagaaaaaaaaatgtggacttatacaatgagcaaatgagctgtgaccaggatgggcagaaaaccaaatggctttctccaaagcctctgtttgagtaagacccttccgacatttgtactatcatagggaaggggttggaaagagaatcctaatgatgacagattgacttagtgggacaggggtacayggagtcagattgatttgattaaaaaaatatatatatgacatctttagcacccctgtctgtgacatatccactacataggaataataataactatgatgtgtggatttaggaaggatggatatatgcaaagtacccaacacataataggctcataatatttgatattaatacataaagacataaccaatgggtcaaaaacttgcaaacagtaacctctaaagagctaaaaacaaatgaataaatgctatgtgtacttatggtattttttgagccacacccaaaggtctggttaaagacttatcatacaatgttcagttttaaatactcgtccttaaaggagctgatggagctgaaagccaaggctcaagaactacgtgaagaatgcagaagcctcaggagctgatgcgatcaactggaagaaagggtatcagtgatggaagatgaaatgaatgaaatgaagcgagaagggaagtttagagaaaaaagaataaaaagaaacgaacaaagcctccaagaaatatgggactatgtgaaaagaccaaatctacttctgattggtgtatgtgaaagtgacggggagaatggaaccaagttggaaaacactctgcaggatattatccaggagaacttccccaatctagcaaggcaggccaacattcagattcagkaaatacagagaacgccacaaagatactcctcaagaagagcaacaccaagacacttaattgtcagattcaccaaagttgaaatgaaggaaaaaatgttaagggcagccagagagaaaggtcgggttacccacaaagggaagcccatcagactaacagcagatctctccacagaaactctacaagccagaagagagtgggggccaatattcaacattcttaaagaaaagaattttcaacccagaatttcatatccagccaaactaagcttcataagtgaaggagaaataaaatactttacagacaagcaaatgctgagagattttgtcaccaccaggcctgccctaaaagagctcctgaaggaagcactaaacatggaaaggaacaaccgctaccagccactgcaaaaacatgccaaattgtaaagaccatcaaggctaggaagaaactgcatcaactaacgagcaaaataaccagctaacatcataatgacaggatcaaattcacacataacaatattaactttaaatgtaaatggactaaatgctccaattaaaagacacagactggcaaattggataaagagtcaagacccatcactgtgctgtattcaggaaatccatctcacttgcagagacacacataggctcaaaataaaaggatggaggaagatctaccaagcaaatggaaaacaaaaaaacgcaggggttgcaatcctagtctcggataaaacagactttaaaccaacaaagatcaaaagagacaaagaaggccattacataatcataaagggatcaattcaaaaagaagagctaactrtcctaaatatatatgcacccaatacaggagcatccagattcataaagcaagtcctgagtgacctacaaagagacttagactcccacacaataataatgggagactttaacaccccactgtcaacattaggcagatccacgagacagaaagtcaacaaggatacccaggaactgaactcagctctgcaccaagtggacctaatcgacatctacagaactctccaccccaaatcaacagaatatacatttttttcagcaccacacctcacctattccaaaattgaccacgtagttggaagtaaagctctcctcagcaaatgtaaaagatcagacattataacaaactgtctctcagaccacagtgcaatcaaactagaactcaagattaagaaactcactcaaaaccgctcaactacatggaaactgaacaacctgctcctgaatgactactgggtacataacaaaatgaaggcagaataaagatgttctttgaaaccaatgagaacaaagacacaacataccagaatctctgggacacattcaaagcattgtgtagagggaaatttatagcactaaatgcccacaagagaaagcaggaaagatccaaaattgacaccctaacatcacaattaaaagaactagaaaagcaagagcaaacacattcaaaagctagcagaaggccagaaataactaaaatcagagcagaactgaatgaaatagagagacaaaaaacccttcaaaacattaatgaatccaggagctggttttttgaaaagatcaacaaaatcaatagaccactagcaagactaataaagaaggaaagagagaagaatcaaatagacgcaataaaaaagataaaggggatatcaccactgatcccacagaaatacaaactaccatcagagaatactacaaacacctctacgtaaataaactagaaaatctagaagaaatggataaattcctcaacacatacaccctcccaagactaaaccaggaagaagttgaatctctgaatagaccaataacaggctctgaaattatggcaatgatcaatagcttaccaaccaaaaaaagtccaggaccagatggattcacagctgaattctaccagaggtacaaggaggaactgctaccattccttctgaaactattccaatcaatagaaaaagagggaatcctccctaactcattttatgaggccagcatcatcctgataccaaagccgggcagagacacaaccaaaaaagagaattttagaccaatatccttgatgaacattgatgcaaaaatcctcaataaaatactggcaaaccaaatccagcagcacatcaaaagcttatccaccatgatcaagtgggcttcatccctgggatgcaaggctggttcaacatacgcaaatcaataaatgtaatccagcatataaagagaaccaaagacaaaarccacatgattatctcaatagatgcagtaaaggcctttgacaaaattcaacaaccttcatgctaaaaactctcaataaattaggtattgatgggacgtatctcaaaataataaaagctatctatgacaaacccacagccaatatcatactgaatgggcaaaaactggaagcattccctttgaaaactggcacaagacagggatgccctctctcaccactcctattcaacatagtgttggaagttctggccagggcaattaggcaggagaaggaaataaagggtattcaattaggaaatgagaaagtcaaattgtccctgtttgcagatgacatgattgtatatctagaaaaccccatcatctcagcccaaaatctccttaagctgataagcaacttcagcaaagtctcaggatacaaaatcaatgtacaaaaatcacaagcattcttatacaccaataacagacatacagagagccaaatcatcaatgaactccsattcacaattgcttcaaagagaataaaatacctttacaagggatgtgaaggacctcttcaaggagaactacaaaccactgctcaatgaaataaagaggatacaaacaaatggaagaacattccatgctcatgggtaggaagaatcaatatcgtgaaaatggccatactgcccaaggtaatttatagattcaatgccatcccaatcaagctaccaatgactttcttcacagaattggaaaaaactttcaagttcatatggaaccaaaaaagagattgcatcaccaagtcaatcctaagccaaaagaacaaagctggaggcatcatgctacctgattttaaactatactacaaggctacagtaaccaaaacagcatggtactggtaccaaaacagagatatagaccaatggaacagaacagagccgtcagaaataatgccacatatctacaaccatctgatctttgacaaacctgacaaaaacaagcaacggggaaaggattccctatttaataaatggtgctgggaaaactggctagccatatgtagaaagctgaaactggatcccttccttacaccttatacaaaaattagttcaagatggattaaagacttacatgttagacctaaaaccataaaaaccctagaagaaaacctaggcaataccattcaggacataggcatgggcaaggacttcatgtctaaaacaccaaaagcaatggcaataaaagccaaaattgacaaatgggatctaattaaactaaagagcttctgcacagcaaaagaaactaccatcagagtgaacaggcaacctataaaatgggagaaaattttcacaacctactcatctgacaaagggctaatatcctgaatctacaatgaactcaaacaaatttacgagaaaaaaacaaacaaccccatcaaaaagtgggcaaaggatatgaacagacacttctcaaaagaagacatttatgcagccaaaaaacacrtgaaatatgctcatcatcactggccatcagagaaatgcaaatcaaaaccacaatgagataccatctcatgccagttacaatggcgatcattaaaaagtcaggaaacaacaggtgctggagagkatgtggagaaataggaacacttttacactgttggtgggactgtaaactagttcaaccattgtggaagtcagtgtggtgtttcctcagggatctagaactagaaataccatttgacccagccatcccattactgggtatatacccaaaggattatcaatcatgctgctataaagacacatgcatacgtatgtttattgcagcactattcacaatagcaaagacttggaaccaacccaaatgtccaacaacaacagactggattaagaaaatgtggcacatatacaccatggaatactatgcagccataaaaaatgaagagttcatgtcctttgtagggacatggatgaaactggaaaccatcattctcagcaaactatcgcaaggacaaaaaaccaaacaccgcatgttctcactcataggtgggaattgaacaatgagaacacatggacacaggaaggggaacatcacacttcggggactgttgtggggtggggggaggggggagggatagcattgggagatatacctaatgctagacggcaagttggtgggtgcagcacaccaacatggcacatgtatacatatgtaacaagcctgcacgttgtgcacatgtaccctaaatgtgcacatgtaccctaaaacttaaagtataataataattaaaaaaaaaaagaaaaaaaaacactaaagaatagaaaggagtcattccatgtagaaatctggagtcctctacaggcacatctcattttattgtgcttcactttattacacttcacagataataagattttttaaatattgaaggtttgtggccatcctgtattgagcaagttaatgagtgccatttttctaacagcatgtgtccatttcatgtttctgtgtcatgttgtgataattctcacaatatttcatactttttcattattatatctattagggtgatctgtgatcattgatctttgatgttactattgtagttgttttggggtaccacaaaccatgtccgctgaagacatctaacttagtccataaatacttggcatgctttgacagctccactgaccagtcattctctcatcctcaccatctcttcaggcctccttattccctgagacataacaatattaaaattaggttaattgataaccctacaatggcctcaaagtgttaaaatgaaaggaagattttcacatctctcactttaaatcagaaactagaaataaatgattaggcttagtaaggaaggcatgtcaacagctagccaagttgggaatgcaaatgaaagttctgaaaggaaataagaagtgctaatccagcgaacctacaaatgataagaaagacaaacagtcttattgctgatatggaagaaagttggagtggtctggatagaagatcaaaccagatacaacattatctcaagccaaagccaagtccagagcaaggccctaattcctttcaattatatgaagtctgagagaggtgaggaagctgcagaagaaaagttggaagctagcagacattggctcatgagatttaaagaaataagtcatctcgatgacataaaagtgcaagacgaagcagcaagtgctgatgtagagactgtagcaagttatcctgaaaatctagctaagatcattgatgaaggtggctacactaagactgtcagtgtagacaaaacagccttctattggaagaagatgtcatccatgactttcatagttagagagaattcgatgcctgccttcaaagctttagtggacaggacaggctaactctcttgttaggggctcaggaagctggtgactttaagctaaagccaatgctcatttaccattccaaaagtcctagtgcccttaagaattatgctaagtcagcagagtgtggtggctcatgcttgtaatcacagcactttgggaarccaaggtaggaggattgcttgagcccaggagttcaagaccagcctgtgcaacatggtgaaaccccatctctacaaaaaatacaacaacaamaaattttcaggcatggtggtatgtgtctgtcatcccagctagttaggaagctgaagtggcaggatcacttaaacctgggaggtcaaggctgcagtgagccatgattgagccagtgcactccagcctgtgcaacagagcaagatcctgtctcaaaaaagagaaagatttatgctaaatctactccatctgtgctcgacaaatcaaaaaacaaatcctggatgacagcacatctgtttacagcatggtttactgaatattttaagcccactgttcagatctactgtttagaaaaaagattcctttcgaaatattactgcacactgacaatgcacctggtcacccaacagctctgatggagatgtacaaggagattgatgttgttttcatgcctgctaaaacaacatatattctgcagcctatggatcaaggagtaattttgactctcaagtcttcttatttaagaaatacattttttagggctacagctgccatagagagtgattcccctgagggaactgagaaaagtatattgaaaaccttctggaaaggattgacaattctagatgctataaagaacatttgcattcatgagaaaaggtaaaaatatcaacactaatgatagtttgagagaagttgattccacctcttatgaatgactttgaggggtttaagagttcagtgaaggaggtcaccgcagatgtagtggaaataatgagagaactagaattaaatgtggagctgaatatgtgactgaattgttgcaatctcataataaaactttaacagatgaggagcttcttccatggatgagcgaaaaataaaatggtttcttgagatggactctactgctggtggtgccatgaacatggcatgaacattgctgaaatggcaacaaaggaagaatgttacataaacttagttgatagagctgtagcagggtttgagaggatggactataattttgaaataaattgtactatgggtaaaatgctatcaaagagcatcacatgctaagataaattgttataacccaatgggttcttcttgcccactgcacagagccaaacctgcaatatctccaaggtatgcctatacttggttctttcctctctctcacttcctatattcaattggtcaccacttatgtcttgccattccaaccctatatatatctgcaggacccttctctgcctctctatccctactgccaatgacatggctcaggtcttcatcttccctctccaagtctgtgtatgacaagaccttcctgatgggtctccttgccttctacctcagccccctccaacccacccttcatttcctcatttaaaattctttaatggtcctctttgacctacagtcttgcccaatgtctcattactccaaaatgtttcttttcatctccctccctgactttatacagaccagtcctcctttctgggattacctctctccccttgtgtattagcccactttcacactgctgataaagacctacccaagactgggcagtttacaaaagaaagaggtttattggacttaacagttccatgtggctgggaaggcctcacaatcatggcagaaggtgaaaggcacatctcacatggtggcagacaagggaagagagcttgtgcagggaaacccccattttgaagccatcagatctcatgagacccattcactatcacaagaagagcatgagaaagacccatccccatgattcrgtcatctcccaccagatccctcccacaacagtacaatgtcctttccacattgttttgttgctgtttgtagatatttccccaataagccaggaacttctcaagtgcgggcactgtcttgttcaattttagatacttagcaccaatccattgtctgcttaaaaggtgctcttaagcattttattaaagaaaaaccaggaaaaatgctgttaagctgtgaagcattttgatatctgtgatgaaatggaaaggccaaattgtgcccagcacagttaatttttccatacagacttctcaggggacaaagacctttttttagcctcttctctccaaaatgtgccaaaacaatgaaacggcactttgaaaaagaatgtcagcaagtcacaatgaggagatagtgaatagtcaggattcaacaagcatttcctgagcatctatactctgcaaagcactgtaccagggactgaggatacacagtccctgtcttcaaacacctcacagtctgtagcaggattcagaaacaacacatcatgatgctggggctgatctgggcaatagaattgtgtttaatacttgcttaaaagccaatgaaagtaccacttcacacccattaggatggctattatcaaaaacaaatattggtgaggatgtakagaaattggaacccttatacattgctgctgggaatgtaaaatgatgcccctactgtgaaaaaccatttagtggctcctcaaaaagttaaacatagattgaccatatgatccatcaattccatggctatgtgaaaacccaaaagaattgaaagcagagatttaaacaaatacttgtgatacagaatattttcttgacctctttgtgggactcgctacaggagtgccttgtttacttagcccaccccgttcaacccctcgcaggagggagcatgcgagtgaacatttgcaggaactggccgctttggcaccagcaggagcgaactctgtgtgggccctgcggcagcatccatatagggtgtctgtgaccccaaggccccagagggcgtattataatgctgtcttagctctgccatctgcagacagcagtgtgttatcagctcagtgggctgtttgcctcatcacatggggcagctgccctccactagtgagggcaaggggccagtgtgacagcctttttgggtacctgcatgtggtacatcccaaattcttgtccagtgcccaagaggaatgagatcacatggatgaactgaaggatggtgaaagtggagaattttattgagtgatggaagtggctcttaatggagaggggagctggagaggggacaagaagggaagtcaagccacctctctgcctctctctcccaaagtcaagttgccttatccagccactgtcttgaagtcacctcttcccaacctccaaccacttctttctgacatccagctgcttcttctctctgccagttgagtctgggttcttcataggcacatgatgggggtagggcgggccataggtagttttggaaaaggcaatattcgattggtaaaaagacattattcagaaagaaccaactgggagagagcaggcacacaggaatggaagttctcaccttgggccacgggtttcaggatttttgatttgaaggtggggttttgccagggacctgcccctgcctgcctagaatttctttgactcctgtcactatcgcttgtataccaatgatacaggaggtgggcagggaagtcctgggaagggaagagtgtggtccctggctagggctccaaccctgggcctgtgcctatggacctaggtgaggacaggttctcctgcttttgtgcccaaatgttgcatttcccaagaccaccctggcctgccacacccccatcctgtgcctataaaaacccccaagactctagcaggccagacacacaagcagctcgacatcaagaggaacacatcggcagaagaagacacaagtggctggacgttgaaaggacgtcaaggggagcatgccggcaggccattgaccagcagaatgaggcagagtttgactggggcagtcagaggagagcccgggacaccaagtggcccagctccaaggaaaaatcatctccattctggctcccccatctgctgagagctacttctactcaataaaaccttgcactcattctccaagcccacatgtgatctgattcttccggtacaccaaggcaagaaccccaggattcagaaagccctctgtcctkgtgataaggcaggagtctaactgagctaacacaagctgcctacggatagctaaactaaaagagcaccttgtagcacacgcccactggggctgcagctgtgaacattcaccccagacactgccgtgaggtcggagccccacagcctgcctgtctatatgctgccctagaggtctgagcagtggagcactgaagaagcaagccacacccctgtggctcaccctgtgagggggacaagggaacttttcccatgtcaccaatactcatagcagcattatccacagttgtcaaaagatggaaacaacccaagtctccatcaacagatgaatggataaacaaaatatacatatacacacactagaaaattattcagccttaaaaaggaaagacattctgatacatgctacaaaatgaataaaacttgaaataagccagatacaaaaggacaaatcttgtgtgattccacttatatgaggtacctagattaagcaaatttgtagagacagaaagtagaatggagttatccrgggactgtcgggagagaggaatgggaagttattgtttgtgggtacagagtttctttttgggatgatgaagaagctccagaaatgaatggtggttatggctgcacagcaatatgaatatacctaatgtcactgaactgtacatttaaaaatggttaagatagtaaactttgttatgtgtgtaccacatattttaaaaccacaactttaaaacaacaaccaagaacaatttatattcaatgaggatgggattctcacgctgacagaaatacctcactctaggaaaggaggtttaattgactaacggttctgcmgcctgtacaggaagcatggtactggcatctgcttggcttctgagaaggcctcaggaaacctataatcatggcagaaggcaaaggggagcccccacacagacagaaccacgaggaagagagagagcggggaagtgccagacacttttaaacaaccagatttcaagaacactcactcattatcacgaggacagtagcaagagggatggtgctaagccattcaggacaaatccacccccataatccaatcacttcccaccaggcctcatctccaacattggggattacaattccacaggagatttggtggggacacagatccaaaccatatcaggagggaaccgatagtaaaagttacttagaagtcatgactttcgaactgggctctgaagggtgaatagaagttcgctagatgatgagtcagaagtctgactttaagttctggagctgccacttactgatacgtggctcttttttcctcatctataaaggtgggaaaagatataccatacagttgtggtgatgagataacatgtctgaaaatgatttataaactatagcaggattcactgacaagtgatataaagtaaaatgatggcaggaaagacctttagacattgtatccatattgttcagcccaggatattctctaaactctaaacaggataggcttcactccctcctgtcccagcctgaatgaagttaagaaagagcagataaggaacaggagttaaacagcgagattttgaaactatattcttattctagtataggagtgtcatgtagccactaaaattcagaaacaggaagatgtggagaagaaatatgggaaggcattgagcattctgcttccttcccctaatatattataaatcacaactctgatttataactgtgtaaatatacagatacaaaaacaagaactgaaagtcaatatgcaaaagtgaaacaaaggggtcacatttttcttttaatttcatttgattttttttattatttttgcgataacaaatgaggacaagaaaataagcattctattccctttttaaatgtttatcagctaatttctcgctgaatacttgcccacaatctctgtcattactgacttccaaggtgatcaaaggcccagtacctttaaaccctgggggcctagagggtagcatttgcttctagcaatgacagaagtttgcacagaacaactggaggatgctccaagaccccttcacggtaaagagctgctgccttctatagatttatgactctgggctcctggggacactgagggcacaggaaaagccatcacatcatgtttggccttgggctctgattcaaaggctgcagcttccaaggcccttgcccttcccattctgaaagacaaggtgctgactccgaaagcttgcaatgttcattttgatttcctcagatgctggcattatttctcagagcaggtcttcccccaactgcttctctagatgrgagtgagccataaactatttcggctgctaaactcataactagatcaaggagagaaactaggaatggcaggttggttttataccctcatgctgtctctccagtctatcaacatgtggacccatatgtattagcacccctctcatacatcagaagctgtagcctataaacaggggaaacagaatcagagggacatctcaatttcactctgcagatggaaggccactctcacagagagagaaaacttaaccctgtaactacatagctgctctcttcagccaaagctttgattctgccagcatgagggcccccattcccaaagtggaggtgaaacgggagagttcccttatcccccttgcaggatgtgcaacagggatgtggcttgccccttcagttgccccactgctcaagcctctagtgggagcatgcagacgggcaggtgcaggggccctggggttgctctggggctccagccccacggcagcatctaggggtgggtgtctgcaactccccaagcccaagtgggcatatgttacagagtgctctttcagctttgccagctgcagaaggcttgtgttaatcagctcaatagaccctctgccttatcgcaagggaagagggccaatgtgacagctttctgtatcccgagctctttcccagtgtaccagaagaattggctcacaggatgaatgcaaggttttgttgagtggtagaggtggctctcagcaagatggatggggagctggaagcggggatggagtgggaaggtgatcttcccctggagtggggctgcccagcggccggactcttccccgactgccccccggctgaaccctcctcgatgtccagacttcctttttcttctctctttctctgtcacgttgttctgtcatcaccggtctgctggttccaatattcacctgcttgtgtctgtgcccactaagggctcatgtttatatgggcacaagatgggggcttcagtgggcgggggagggggcacagtggtcttagaaaatgcaacatttgggtttgaaaacaggagttcctgttctcatgtaggtccacaggcacaggcttgagggtggaccccccaccaaagacccagaccttctgtacccaacacttccctgccccactcccgtgtcagaaggactgtgtatggttgtgctgcctgtctgtgcacaagggttcctggctaggagcagtgggggctgacctccagcacaaggcacatgcaacctgtcatgttcctggcccagggacagctgcctggaggaaggagtgcctttttcacaatggtatgatctgctccccaagctgcactgctaaggggtatactgcctgccctgtgggggtacccttttctaattcacacaaaacacagtatccactagcagtggcccaacctgagcaaactgagaaagccatcctggaggtgcctgtgtatcttgcatctgaatagcacagaaacctgcctgtaaactgtacatccaagacccaagtagggaagctgagtattttatgttattttcttataaaaggttctttatggcagggcgaggtgtctcacacctgtaatcccagcactttaggaggatgaagtgggaggacggcttgaggtcaggagttcaagaccaacctgggcaacacaacaagaccatgtctcaaaaaaaaataatttaaaaattagccaagcatggtgatgcatgcctatagtcccaactactcaggaggatgagacargaggatcacttgagctcaggagttgaggctgcagtgagctatgagcccaccattgcactccaacctgggtgacagagtaagaccctgtctctaagaaaatatgttttttaggtgctgaaagactacctaggccccatctaactttcagaccaagttttccttttagttcccataataaatggttctttccttttgcaaagtatttaatagctttcctttacaatttccactgtgtttgatccttgacaaatgctcgcccctgccccccgcccacttccctttccctggccatcccattcagatgctacttcattggccattctttctcagtgctccttgcctagcaccttcctgtagctttagtgaccctttgataacaatgtcatcatgggccctccccaggctgtctgtctgaattcagaattttggaactatgcttgactcctgaaaccatataatagagaattccaggatatgcctaaaataattaactccacagaattataagtctggtttctagaaaggatcatagccttcatcttatgcaattttacctctcaaaaggaatatcaagcaactgaggctagaaatggtaagtgattgctgccatggtttggaaagtccatgccccccaccaaaattcatatgttgaaacctattcctcaaatacatggtattaggaagtggagcctttgggaagtaatcaggtcatgaggatggagacctcatgaatagaattattgctttcataaggggctgaagagactagggttctccccttgcaccatatgagggcacaattagaagtcagcaggcagtgttcagcctggcagaggccctcaccagaacttgactatgttgaggccaggcatggtggctcacgtctataatcccagcactttgggaggccaaggccagtggatcacctgaggtcagaagttcaagaccagcctggccaacatggtgaaacctggtctttactaaaaagacaaaaattagccgggcatggtggtgggcgcctgtagtcccagctacttgggtggctgaggcaagagaattgcttgaccctgggaggcagaggatggcgccactgcactccagcctggtagagcaagactctgtctcaaaaggaaaaaaaaaaaaaraaagaaagaaaaaatctgaccatgttatcaccctgatttccagcttcccagcctcaagaactatgagaaataagtttctatcatttataagccacctagtctatgttatttatttcattatagcatcccaaacagactaagacagtgacttaacccaaagccacacaaagtatttgttgcaaaaataggaatacagtgcaatgtttgcaatcttcccctccgtggattccgcatttatccacctaccaaatgtagaccaagcttctgtacagagaagttgtccttgatgttctcaagagaggcaatacctaagagactgtaataaggaaatttcacagtgctttcatgcactactgttagtacttagccctcaggggccattgctagagaatataagggagaaagaggcattgaatttggactcaagagtccaccacctggggtgaaattcctctctgacattgcccagattcatcaccttgggcaagtgcttcaatctcatcatctgaaaacgggaacaatagtagctcaaccctgtaagactgagatgaggatcaaatgaggtaacttacagaagaggtgtttaacacagtacttgacacttaaaagtgatatgtctgccaattccactaatgacctcctgaaacatatcaactttacacacatgccatgctcaggtgagtcatgctaaagtgagagtcaggattctgtctggttttcacaatagctggcatcatctagtgtattcataaatgcttcaggaggaaaacatgcactgggcatggccaataaacataaaaattcctaaatcaagttcgtttaaaaaccacatggtaattccctagtaattctgggttaatagcatattaattaccatcttgttatagcatcaatgagccatacatttgatgtgggaacctacagcagagactaaatgctaaaagagactttccccaactgctgcagaaaatgatccctgctcacacgatatcaacaagtcttctcagaaaaactcctatgttactgattctttaaagagctcaataattacccaaagtatcctccaaccaaagtttcttctagtgtgggtatgtaaagactagcagtgacatctaccaccagtgacatctatctccaaataccttggatcaaaatcttttgaaatgacaaacctcagcctgctgacctcttctgaggtgatggtttaattggctgcaagtgtcttgagacatttccaaggtccttgcctctgtctccttcctgcccctttggaagttgacttttccacatctactgcattgaaatacaatcccaaaaaataagtcatgtgagcccagctgaatttcttggtagaggaattatgtataacaagacggttggcaaggttatatcactccatgaaagctgtaatttccctgcaattgatttcctaaagataactcactgtttgcgtgcagtgaaagctaatttaacaagaaagatgagtctcttcagaacaccttgattggcaattgtgataaattcctataattactattgactcagaggaggattttcatttgttaagatgttgctgaaatgacagcccagtgatggttttaaacagaggaaatggtaacaccacatgctgctcccatcttcacaaaagaaacttgggggactgacatggttacagatatttcagagagcccatgaagaccctgttgagtgtcagagagacctctacatcttccttggcatttttgtgttgactaaaaattctcataagaaccacagttcttaaacccagaaagtctggctctttctcctaacaaagaaataaaattgggtctagattagtagttccacagtggaggcaataaaatcttattactaacatcaaaaattgaataaaattaagtcagctgggcatggtggctcatgcctataatcccggcactttgggaggccgaggtggcgaattacttgaggtcaggagttcgagactagcctggccaacatcgtgaaaccctgactctactaaaaaatacaaaaattagcccagcgtggtggtgcgcgcctatagtcccagctactcaggagcctgaggcaggagaattgcttgaacctgggaggcagaggttgcagtgagccaagatcacaccactgcattcagctcaggtaaaagagcaagactcagcctcaaaaaatatgtatatgaataaaatgaatcatattaaaagtccaacaataggccatcagttaaatcaattagtataaatccaaataatacaacattctatagtcattaatatsattttatagacagttaaagacataagcaatggctatgatacgtttttggtgtaagaagtaggatggtgcctggacacggtggctcacgcctataatcccagcactttgagaggccaaggcaggtggatcacctgaggtcaggagttcgagaccaacctggccaacatgacaaaaccctgtctctaccaaaaatacaaaaagttacctgggcatggtggcgtgtgcctgtaatcccagctacttgggaggctgaggtgagaggaccgcttgagcctgggagacggaggttgcagtgagctgaaatcacaccactgcactccagcctgggcatcagagtgagactccatctcacaaaaaaaaaaaaaaaagtagaatgctaaattacatgtacaagtcaggaaagatgatgcgcacaagtagtcccagatacttgggagactgaagcaggaggatcgcgtgaggccaggaactcaaggttgcagtgcaccatgatcacacctgtgaatagacactgcactccagcctgggtgacatagcaagattccatctctaaatatatgtatatataagtatgtatataaatattaataacatgtacaatatgagcttagctatgaaaaactgtataaaaagaacaggaagagtgtcccatattgttaacagcagtaactctagatcttagatctttgaatggtgagataagcaaaacagtaagaaaagaagaaagaaagaaactctacttttctaaaagttcaggcctataataagaggttacccctgaaattaatttgggtcaacttatttgagagaatcaaactataaaatatccctatttcctaagtaaaaactgccctttgctgttcaggaatgatagctcagctatcactgtcagcaccaccaaaaagtttgcccattaatttcttgtttatgattctacatgacacatacaaaagctaaccaagaactgctacttgccttctaggatttctcaagcttgaatagtctactctgacataaagcatagactttctatataatttgccatacaaatataaagcattaatattgatcataatttataattatagtcattaacattactaaatgctctcttgccattaactcattcaatccctttamgaattctaagagacacacagaaattatcttcatttaaaatgaggaaactatggctcagacatatggagtgacttgcatgaggtcacacagcaaggtaattctttaaacctaagtcttgtatttcaaagtctaggactcttcctactttaccatgtttatgacaaaatcttacaaatttttaacaaattagcatattttgcctgtatcgatacttttctcctccctttaaaaactgtttgcttatcagtagctctccttatcagtaggttttggaatttcaaatggatgtctatttttttcagagttcactgttaggaacaataaaaaagcaagcaaacatactactgggcttcttgtttcaacaaatattattgtaatatgctaagaggctcaaatacaattttaattaactgcaaactgaattcattccttaatgacagaataggatttgttggtttgtttctctttgacagatttcttttttcaatttttaatagtggttaaaaattccataacataaaatttaccactgtaactgctttttttttttttttttttgagatggtgcctcgctcttgttgcccaagctggagtgcaatggtgcaatctcagttcactgcaacctccgcctcccaggttcaagcaattctcctgcctcaacctcccgagtagctgggatttacaggcacctgcctccatgcctggctaatttttgtagttttagtagagatggggttttaccatgttggtcaggctggtctcgaactcctgacctcaggtaatccacccgccttggcctcccaaagtgctgggattacaagcatgagccacctcgcccaaccaaccatttttaatgtgtactgttcagtagtgttaagtattgcattgatatgcaacagatctccagaagcttttcatccagcagaactgaaaccctatacccattaaaccactatccatttcctcctgcctgtatcccctagcaaccaccattcccctagcaaccaccattctactttctgtttctatgaatttgatgattctagatacctcatatgaatgggaccatgtactatttgcataatgacaaaatatgagtttttaaaatatgtgaaatgttgttttgcatcaacttttcagaaactcacacatttgtcattttgagggctgcaacccctccccccccaaaaaaatcaggaaccaaaaagtaaattatataaaaacaaggattatcatatcctgaaattttactagaggttgcttaatctctctatgcctcaaattcttcatctataaaatggggatagcaataatacattcctcagagcactgtgatgagaatttttttttttttttttttgaagcggagtttcgctcttgtcccccaggctggagtgcaatggcgcgttctcagctcactgcagcctcccccctcctgggttcaagcgattctcctgcctcagcctcccgagtagctgggactacaggtgcccgccactacgccaggctaatttttttgtatttttagtagagacagggtttcaccatgtcggccaggctggtctcgaactctcaacctcaagtgatcctccaaagtgctaagattacaggtgtgagccacagcggccggcctgtgatgaaaattaaatacattagttcacgtaaagaatttggaacagtggcaggcataaagtaagcactgaataaatattaaatattattatttttacatgtattctatcagtaaagggaccacactataattaaaatacaatggctactatcaaggagcccatatctaaaaatgtatatgttctgcacaaaacccatggtagaaccttgccaattattattgtttaataaggtattattcaacagatagaatcaagaaaataaaatatataaaataatatccaggatgggtgcggcggctcatggctgtaattccagcactttgggaggccaaggcgggcagatcacccgaggtcaagagttcgagaccagcctggccaacatggcaaaaccccgtctccactaaaaatacaaaaattggctgggcatggtggcacatgcctgtaataccagctactccggaggctgaggcaggagaatcgcttgaacctgggaggtggaggttgcagtgagccaagatcacgccactgcacagcctcggtgacagagcgagactctatctcaaaaataaatgaataaataaaatccagctgaaaactgagagtgtggttatagtcaacacaatgcacattcccagactgtaatctcggcaagatttgccccaatctccttttgcaaatataattaaaagccgtaaatttattttcactgtgggcaagaattgaacaaattcttacatctgttttttaaatagccacccaggcacttcaacactgctactgtatttgcctgctccagagacatatcagaagtgtaaaatgattctaatagtaataagagcggcctttctcttcttaatgaaattctaaaaggctacagtctcctgtaatgcaaacaagcatttctgccctggcagattcatcacaaaacgcagccggccatggctgagcagggattgcggccggcaatgatgccacctgccgtatggaagtggagttgctgtctttacagggaggwaattaaacaaacaaaaaatcaatgccttgacaaatcggtgctgctctgtttaggtaaattactctattatcctagtagctcagtacattatggaagtagttacccctctacttagctaactcacctggttttctggctaacttaatcctttatttacagtttcactgtcttgccctatcatagagcaacttggctttctcttttctttcatttactcaaggtgaattacttaatgttgaaacatcgttttcagcatcacattttttaatggtgaacccaaggtctcgtttctcaggacagcctgtacacaaggacaygataataataaatgcttagggaatttcctttttttctgggaacataaatgtgcacactgactaggagactgtttcgatatatataaatgaggccagcgtggtggctcacacctgtaattccaacactttgggagaccgaggcaggaggattgcttgaggccaggagcttgaggccgccagcctggtcaacaagcaagacccggtctctacaaaaagaaaacataaaattagctgggagtggtctgtagtctcagctactcagggactgaggcaagaggatccatcacttgagcccaggaatttgaggctgcagtgagctatgatcgctccactgcactctagcctggagaccctgtctttcaaaaaaatatagacacaaaaaaaattcagttaaatacagacatgtccagactcttttgcacccaaaatgtacacacacacccctaagtgtgcagttaagcaaagagagatggagcccgattttggaaaattcatgacgtaaacaaagttgatctttagccttctgtgcacctgttggagacgcagctttctttttctcttactttccatcaccaaaacctttattttttctttctttctttttttttttttttttttctgagacagagttttgttctgtcacccaggctggagtgcagtggtgtgatctcgactcactgcaacctctgcctccagggttcaagcgattctcctgcctcagcctcgtgagtaactgggattacaggcactggccaccatgcccagctaattttgcatttttagtagagacagggttttgccatgttggccaggctggtctcaaactcctgacttcaagtgatccacctgtctcagcctcccaaagtgctgggattataggcctgagccacctcgccccagcgggaaaaaaaagaatgtagacacaaaaaatattcctttaaatacagacatgcccagactcttttacacccaaaataatacacccacaccctaagtgcaattaagcaaaagagagatggagcccgatttcggaaaatgcatgacataaacaaagttgatctttagccttctgttaaccttttggagatgcactttcctttttctcctactttccatggccaaaacccttattatttattattttatttttccataagttattgggttacaggtggtatttggttacataagtaagttctttagcagtgatttctgagatcctgttgcacccatcacctgagcagtatacattgcaccatatatgttgtcttttatccctcaccccctctcactcttacccccgagtcccctaagcccattatatcattcttatgccattgtgttctcacagcttagctcccacatatcagtgagaacataggatgtttggttttccattcctgacttactgcacttagaataatagtctccaatctcatccaggtcattacaaatgctgttaattcattcctttttatgactgagtggtattccataatatgtttataccacagtttctttatccacttgttgattgatgggcatttgggttggttccacgattttgcaatcatgaattgtgctgctataaacgtgtgtgcaagtatgctttcctttttttttctttttctttttttttttttttkttttttttttgkttttttttagatggagtctctctctgtagcccaggctggagtgcagtggcacaatcttggctcactgcaacctctgcctcccaggttcaagtgattctcctgcctcagactcccaagtagctggaaattcaggcgtccgccaccacaccaggctaatttttcatttttagtagagatggggtttcaccatgttggccaggctggtctcaaactcctgacctcaggtgatccacctgcctcagcttcccaaagtgcagggattacaggcatgagccactgtgcccagccaccagtatctttttcaaataatgacttcttttcccctgggtagacactcagtaatgggattgctagatcaaatggtagttctacttttagttcgtcaaggaatctccacactgttttccatagcggctgcactagtttacattcccatcagcagtgtagaagtgttccctgatcaccacatacatgccaacatctactgttttttctttgattatggccattcttgcaggggtaaggtggtatcgctctgtggttttaatttgcatttccctgatcattagtgatgttgaccattttttcatatgttcattggccatttgtatatcttctcttgagaattgtctattcatgtccttagcccactttttgatgggattgtttgtttttttcttattgatttgttcgagttcattgtagactctggatattagttctttgtcaaatgtatagattgtgaagatttttctcccactctgtgggttgtctgtttactctgctgactgttccttttgctgtgcaaaagctctttagtttaattaggtcccagctatttatctttgtttttattacaattgcttttgggtttttggtcatgaaattcttgcctaagccaatttctagaagggtttttccaatgttatcttctagaaattttatagtttcaggtcttaggtttaagcccttaatccatcttgagttgatttttgtataaggtgagagatgttccatttttatggaacagaatatgcctatttttatgccagtaccacactgttttggtgactatggcatggccaaaaccttttgaggaggcttagttgtcccggttacccttygagatacccagtgaagcacactgtgacccctgggtcctcccagacttgacaactttcctgaytcctcctcaaccaccacccactaccacctcaacaaaacttattattccagttttccactcttggatgatgtggttaattgtttgtggcaagtcacataagctgagaaagtcaagttgctgcagctaattatttaatatattaactaccttcaaatgtttgcatgttgaccaaggcctctgtcagcccataacataattaaaaacatgaataactggcagaactgtaggcaccgtgaatactgatggtggaatatttagatggttcagatgagggaaaactcttagtgacaatctttaaataatattatataattagcagccagctgttttatccaggtctagggcttcctagacacacacatacacacacacacccacacacacacacacacatttgcacatagaaagtctcccccaaggagagaaaatgtcaccctcctgtaaacacaacacacatcctaagtgtctttagacaccaatcacatacctgaagatggcaagcggggtcagatctagagttcacatgttttttccacaacttcatcaccaccccacacccacaagaggctcaggtagcaaagtgggcagagttcaagggaaacataaatcattcttggcatgaaatatcaggtgagtgctttcatcactgtggtttcatgttccgtaaccttttccctgaggttccatgctgaaagcaggaggttgttcctagatatcaacatggctccatttgaaagacttatcccaccccattgtagcaacctccaccaaaaaataaatccaaacttaagtaggataactatgtagaaggaccctttgccagaggatttttccttgcagctctggtaaaatttcataaaatggtatcttttattaaaatcatactgtggtgggtattttagaacttgagcagggtgtggtggctcacgcctgtaatcccagcactttgggaggccaagataggaggatcgcttaagtgcaggagttggagaccagcctgggcaacataggaagaccatgtctctataaaaaataataataataaaatgttgccagcacagtggtttacgcctgcagtcccaacgcttcagtgttgaggagtaaagagaatgtgatccacctcaggaggccaaggtgggtggatcacataaggccaggagttcaaaccagcctggccaacatgatgaaaatccatatctactaaaaatacaaaaattagccgggcatggtggtacacacttctagtcccagctctctgggaggtgaggcacgagaatcgcttgaacccaggaagcagaggttgcagtgagccgagagagagattctatctcaaaaaataataataataaattttaaaaacagaatttgctctcctaaactgaggttgatgttactggcatattagcacttaatattttcttctggtgagtaaccttttgctcaccaacttggaatagataaggataggattcatgtaaggttggttatggggttaaaataaaatcatgggctctgagctttgaccatgaagcccagaagaaagcatcactctgggcagaaacacttcagacaacaacagtattaacaagaaaaatgtaaagcccaaggtatagacctgggtcgtaacctgtaacattatttacttgctattacattctctttggttttgctcctggatttgatgagagcarcagaatcaatttcaatgcacatgcatttattatacaactgcatttcatgcggggagccccccaaaaaaggatgggaatccttgatcttaaagcatttaaactgagtgtggtaagctatttccccagtccccatcaggctgagatgtaaaattccagaatcacaggtcacagtggtggtgagagcctgaatcatgggcccaccagaggaatcacagcccactgataacatttctccttcaggagtgcctcatcttttaaaattcagccttgactagaaaatataacttggctgggtgcagtggcacactcctgtaatcccagcactttgagaggccaaagcgtgtggatcayttgaggtcaggaagttcgagaccagcctgaccaacatggcgaaaccctgtctctactaataatacaaaaaaaaaaaaaaaaaacaattagcctggcatagtggcacacacctgtaatcccagctactcaggaagctgaggcacgagaatcacttgaacccaagaggtggaggttgcagggagccaagaccatggcactgcactccagcctggatgacagagtaaaactgtgttaaaaaaaaaaaaaaaaaaraaaaaaaacagaaagaaaatgtaactgaagccaaaagctataaaacctaattagcagctgagtgaggaacccttgagaagaattggaagactcaaagactgttgaacaggagctctgagaagacaaagtattcaactagatgatcatcttgttagagttgagaaaaagcttagtgaatatttacgtacaacttacctaccataaaatttacattaaacgagacttatctgtatcttgtcagcataaagttgtttctaagaatgtttaccaagaatggcaaagagctttcctgtaatattgatttgctttaatagtgccaatgattgctgatttataattctgatactatgaatgtttgttataggaaattacatttgttaaaatgtgtgctatagcaaattgttagttcactaagagtgtaaactatttttgtcayggaagtcttattttaaccacccaccttgtgacaattaactcaatttctataatcttatcaaatttgttacttcatttgtacataagtgaatcagcattccttgttactcaaaaatcatcaagcctttttttaggcttttttaaacaaatattttgtattctaaaagttgtatctctaaagtaaaatttaaattattttctttttttaattttkgtttttattatattttgtttttatcatggcctatattattactttggtaacattctctttaaccctcaaactaataaaaaactgtcactcatcacaaaagactgggtaaattaagaagtacagttgatccttgaataatatgggtttgaatttcaggtgagttttcctttgcctctgccacacctgagacagcaaaaccaatcaaatctttctcttcctcctcttcctctgcctcctcaatgtgaagacaatgaagatgaagacctttatgatgatccacttccacttaatgaatagtaaacgtattttctcttctgtgtgattttcttaataacattttcttttcactagtttaccttattgtaagaacacagtacatactgcatataacacaaaatacgtataatcgactatttatgtcattggtaaggtttccagtcaacagtaggctattagtaaagttttgggggagacaaaagttatacacaaattttcaactgcatggggtgcccataatcaccacattgttcaagggccaattgtattcattgagcattgagaatatactttatctgaacattagtaataataaaaataaacttttttggaattttagactctacttgccaacgtaaccaaactcaggtccagctgcttgccactggaaaaccaaaattaaagaagcaagatgctttgaaaagaaagcaactgtattcaaaggctagcagctaggagatggttgggctcaagtcccaaaggaaccatctcaaaactttaggcaagtgagtgtgttcaaaaagtgaagttggcatgggaagcatgcgggagtggtgcagggtctgtatgtcttgttctgactgccatcttcagttattgtccacctggagcgtgggctggtgccatctsaaggtgacaatggctgtgttgcagaytaactgccttgaggtaatctctacatggggaggattctgcagctgggtctctatgcctgatttatttcaagattagcccctgtaatttataagcaagcacatagttagataagcaagtgcagtgcaagggaccttgccaactttgttacttcatttgtacataagtgcattggcattacttgttacccaaaaatcaacacaccttttcttaggctttattttaaataaatcctttttgtttaaaaaaagtagcaggtggccaggtgtggtctctcacacctgtaatcccagcactttgggaggccgaggcaggtggatcacttaagatgaggagtttgagaccagcctggccaacatggtgaaaccctgtctctactaaaaatacaaaaatattaaccgggcatggtggcagatgcctgtaattccagctacttgggaggctgaggcgggagaatgacttgaacctgggagacggaggttgcaatgagcccagatcgcgccactgcactccagccagggtgacagagtgagactacatctcaaaaaaaaaaaaaaaaattagtcaggcctgatggcatgcacctgtcatcctagctactcaggatgctgagagaggagaattgcttgaccctgggaggcagaggtttcaggttgctgagatagtgccactgcactccagcctgggtgacagagaccctgtctcaaaaaaaaaaaaaaaaaaaaaaaaagtagaactactatataatccagcaatcccgcctctggcataaatccaaaagcattgaaatcaagacctcaaagaggtattagcactctcatattcattacagcgctgttcacaatagccaagatgtgaaaacaatctaaacatctatcggtagatgaatggataaagaaaatgtggtatatgcatacaatggaatattattctaccttaaaaaaacaaagttctgcaatatgcaacaacattaacctaagataaaccttgaagatattatgctaagtgaaacaggtctcatcacagaagaacaaatactgcatgatgccaccaatagggagtatctcaaataatcgaacacatagaatcaaagagtggaatggtggttgccaggtctggggagagggaaatggggtactgctaatcaacagcatacagtttcagttaagcaagatgaagttctggagatctgctgtgcaacattatagcctgtaacgtgtaggttataacctataatagtattgtaacctacagttaacgatactgcattgtacacttaaaaagttgcaaagagatcggatctcatgttgagcgctcttaccacaataaaatacaatttttaaaaagcactaatatatataaaatgagacaatacgtcacaaaatagtctattctacatcattgcacctattattaaaatgctgcagcctgaacactgtggctcgcacctgtaatcccagcactttgggaggccgaggcgggcaaataacttgaggtcaggagttcaagaccagcctggccaacatgatgaaaccctgtctccacaaaaaatataaaaattagccaggcatggtggtgcgcacctgtaatcccaggtacacaggaggctgaggcaggagaattggttgaacctggcgggcagaggttgcaatgagcagagattgcatcactgcactccagcctgggcagcagagtaagtaaaactccatctcaaaataaagtgaaataaaataaaatgcttcatatgattatggtaattattagaataaagcattcagyccagaaacctcaggggtggttgtctaactatggctttgaatagcattattttacttaggagaaattctgtttccacccactacccagtttttgtggatattaataattatctggtttggttgccttgcatccattcctttattgatttattttaatggcaatagtatcccaatttcctttactctcctcaggaatacaagcttttttttattctcaagctacrtgatttggagggtatccaccccagattaggagtggaatatgtaacctcgggttgacagtcgtggcctcaacattctctagtccagtgattgatcaatgtgaacatgtgacctagatctggtcaaacggcaaacttcatttcctggatacagtgattggttcagtaatatcaaattggtccaatcatagttaatcccaggatttatggaggagctataggaaagagacttaattttttcttttctgttgaacttagatttaggaagatattatcttacaattgccagaggtctcacatgaagcctgtggatgaagctgactataaaaccaagagatagggccaggtgcagtggctcacacctgcaatttcagcactttgggaggccaaggtgggtagattccttgaggccaggagttcaagaccagcctggacaacttagcaagacttcgtctctacaaaaaaaaaaaaagaagaagaagaagaagaagaagaagaaaattaaaaaaataaaaataagagatggagagaaactaatttcagatgacagtacctgaagccagctttcccctgggatttttctgctataccatatgtgctaataaactcccccttttgcttaactcagtttgaaatgagttttgtgttatctacaacctaatttactacttagaagtaagttagaagcgtaagttaccaatctttccaaatgagatatttcatattgagtagtggttcagcagggatggaggcaatcagctctccttgggtagaattccaacctattccataactgtaccccagcatcaccaaagcacccatcaatctgtagtagaatttccccggagttgaactgggaggatctaagcatatcaccttggagaaaggctaaccactcactctaaagtttcttcctggttttgaaacttctctttttctctctctcccttcctttgtttgaaaataaaggctaacggacccactaccaagagggacactaaataaatggaacagaaaaaggcaaagagaaggaaatcaaagagagaaatttagtgcaaccagcaaatgcccacattaggctcacaacaaagacaagctcaatttctctcttattgacattaacaagtttgatgggagtccaacataaaagacaggcaaatctgcttgctcttataggggtcctaggatctctgcagctgctttcaaattgcttaattccactaaagttcatctttcttgattggtttttattcctttctatgtccaaccaatcacgtgctggccaagcagatggcttggagccagtcctggctgtccaggtcagcagctgcagcctcaccccggaattcagaacttgtcatccctccctaactacagaaatccttcttcctgcacaggctctttaactaggaatcatagagacccgatagatatttcctgaaggaataaatgttactgcataaactcagtgcctagcactatattaggggctggaggtgaaacaaaaaaatgtaactcaaggaataaaatgaaaattactaatttttttaatttataaagaaaaggaatttatttcttatggargctgtggggcctcatctagtgagggccttcctgctgatggggactctccgaagagtcccaagagcctatgcaatttaagaatamcaggccaggcacggtggctcacacctgtaatcccagcactttgggaggccaaggtgggtggatcacctgaggtcaggagttcaaggtcagcctggccaacatggcaaaaccccatctctactaaaaatacaaaaattagccaggcgtggtgtcgcacgcctgtaatcccagctgctcagggggctgaggcaggagaattgcttgaacccaggaggcagaggttgcagtgagccaagattctatcattgcactccagcctgggcaacaagagggaaactctgcctcaaaaaaaaaaaaaaaaaaacagtcagcagcagggctgagattcaaactcccatatttgcatccagagctctttattccagtaacatggcatccgtctgagatggaaagggggaaagaaaagaagaatcaagcagagaaagagaacgtgggaaggagaaattagcatggaattatttgttagttttcttgtatgaggcaagtattttttttttcaacctttattttagattcagggggtacatgtacagctttgttacctgggtatattgtgtgacgttgaggtttgcaataagaatgagcccatcacccaggtactgagcatagtacccaacagttaatttttctacccatgacgccctcactcccttcctcctctaacagtctccagtgtctatcgttcccatctttatgttcatgagtatccagtgtttagctcccacttttaaatgagaacatgcagtatttggttttctgtttctatgctaattaacttaggataaagacctccagctgcatccatgttgctgcaaaggacataaattcattccttcttatagctatgtagtattccacattttcttttttaatatttttaactaattcacatgccacctttgggaagtattccacattttctttatccagtctaccattgatgggcacctaggttgatgccacatctttgcgattgtgaatagcatggtgataaacatacaagtgaatgtgtctttttggtataactatctattttcctttgggtatatacccagtaataggattgctgggtcaaatggtagctctgttttaaattatttgagaaatctccaaagtgctttccacagtggctgaactaatttacattcccaccaactagagtttataaatgttctcttttctctgcggcctcaccagcatctgttgtgttttgactttttaataatagccattctgactggtgggagatggtatcttagtgtgggtttgatttgcatttctctgatgattagtgatatggggcattttttcatatttttgttggccgcttgtgtatcttcttttgagaagtatctgttcatgtcttttgcctatttttaatggggttatttggtttttgcttgttgaacttgtttgttttatgagacagagtatcactctgtcacccaggctggagggcgggggtgtgatatcggctcactgcaacctctgcctcccaggttcaagtgattcttacacttcatcttctcaagtagctgagatttgaggtgtgcaccaccgtacccagctaatttttgtatttttagtagagacagggttttgccatgttggccaggctggtcttgaactcctggcttctagcaatcgtcccacctcagcctcccaaagtgctgggattacaggcatgagccaccatgccagccttattgtttcaattccttatagattctagataatagacctttgtcagatgcatagtttgtgaatattttctcccattctgtargttgtctgttttctctgtctgttgtttattttgctgtgcagacggtctttagcttaattaggtcccacttgtcaatttttgtttctgttacagatcttttgaggacttagtcataaattctttcacaatgccagtatccaaaatggtgtttcccaggttttctttgaagattcttatagtttgaggtcttacatttaaatttttaatccatcttgaattaagttttgcatatggtgaaatgagggttctagtttcattcttctgcatgtggctaggcagctatcccagcaccatttattgaatagggagtcctttcccattgcttgtcattgtcgactttgtcaaagatcagatggctgtacgtgtgtggctttatttctggttctctctattctgatccactgctctatgtgtctgtttttgtactagtattatactgttttggttactgtagccttctagcatagtttgaagtccagtaatgtgataccttcagctttttctttttgctttgctttggctattcgagttctttttggttccatatgagctttataatagatttttcaaggtctgtgaaaaatgacattggtaatttgataggaatagtattgaatctgtagattgctttggacagtatggctattttatcaatattgattcttctaatccatgagcatggaatttttttcatttgtttgtgtcatctctgacttcttttaggtgtgttttgtagttctctttgtagagatcttttacctcattggttatatgtactcctaggtatggtggggtttttcttgtgcatgaggcaagtattaaattagacctctcatgttatactttatcttattccttacaatagttcagacagtagatcatctctgtttccactcaaatgcaccagaagcctgagtgtgtattttatttatttatttaaaaactgaatatcactctgttacccaggctggagtgtggtggtgtgatcatagctcactgcagcctcaaacacttggcctcaaaggatcctcccacctcagcgtcctgagtggctgggattacaggagagaaccactgcacctagccctgagtgtgtatttgttttctgataaagagctaataattactcttgtagatcagatctggtatttaaaagaaaacaagacattgtgctcattttctcttagtttttaaaatttttagaaatattgatgtgaggatgatttaatcatagagcaagaaatgtttatttagmatctactttattcagcacatgtattcattaacttaacatttactaagagccaagtaccagctgggtgtagtggctcatgcctgtaatcccagcactttgggaggctgaggtgggcagatcactggagatcaggagttcaagaccagcctggccaacayggtgaaaccctgtctccactaaaaatacaaaagttagctgggcatgttggtccatgcctgtagtcccagctacttggcaggctgaagcaggagaatcacttgaactcaggaggtggaggttgcagtgagccaatatcacgccactgttctccagcctgggtgacagagcaagactccatgtcaaaaaaaaaaaaaatagaaaaaagatccaagcaccctattaggtcctagagatgcaaaaagagataattaagacagggtccagtccctcaagaagctggagactactgaggaaaacagagagaaatagacaattacaaattagtgtgtgatatggtttggctgtgaccccacccaaatctcatcttgaattgtagctctcataattcccacatgtcatgggagggacccagtgggaggtaattgaatcgtggtggtgggtctttccagtgctrttttcatcatagtgaataggtctcacgagatctgacagttttataaaggggagttcccctgcacatgctctctttcctgccaccatgtaagatgtgattttgctcctccttcaccttctgccataatggtgaggcctccccagccatgtggaactgggagtccattaaacctctttttcttcacaaattacccagtcttgggtatgtctttatcagcagcatgaagatggactaatacaatgtgcttactgccatttagtttagaagtctatgcaggttgcctagggagctcagagggaggaaaattagcctaaactgagtgaaggagaaggtcaggaagcctttcttagaagaggtaatgtatgaattgagtccagatgaagtgggtgggagggggaacagttcccagcagagggaataatgagtgctgaagcccaaggaaagcatattgcatgccaggaaatacagtactgcagtatagtttaggcatagtctgtttataggaaactattaagggctgaaggactgagaaagggcttcagaatttattttgaaaaatttagaaattcatggaaagcagtaatcaggcaagaaggagaatcratgtgtatttaagagagatcactctgtgaccactcactgtggagaatgtcctggaagtaggcatacctgaaattgagcattgtttgggattgaattccagcgtgcgggcccattcctgtcagtgctaccatagactttctgtatgaagtagtaaatgtggggtagaaagacctaggattggttcaagttctgccacgtgctaatcataggactttgagcacttttcttaatctcctaaggttcagtttcataatctggcatatggatttaataataatactcatcaagtagagttatagagttattgtgagaataacataagaaaattagccaggcacagtagtacgtgcctgtgttcccagctatttgggaggctaaggcaagaggattgcttgagcctaggaggttgaggctgcagtgagttatgattacaccactgcaccccagcccaggtggcagagcaaacccctgtttcaaaacaaaaaaaaagaaaaaagaaaaggaaagagaaagaaaatacatataaagcgcttttcatagtcacatgtggtaacagttcaataaatgttagttattcatattatcattgtcaatatcaccatagcttaaaaataaggaaaccataaagtaaaggaagtgagaataaagatgaccaaagaagttgatgactgattgtatgcaaatgatgaacaggagctaaagatgactgcaggtttctggctttggcaatggaatatgccacttcagcacagaaattattttgaggtgaaggtaattgagaatcagcagatgctggaagagttctctgcctgccccttatctaactaaaagtagggcataaatgtgtttcatgaaggtgtctgcctcttctgaaccaggaggaggagagtgatttttatccccagagatggagagcctgctatcccaactcctgtttagtaaggtaaacaaaccttgccacaatgacccttaccttcactagtttcttctatatatttcctaattatttttccatgatttatcatctgtcaaagcccaaacccacttttcctttgtttaaaatggtatgtaatcccccaagtctaactacttctttgagttttatgtctgtgaactcctgtgcacataactagtaatacaaactatatatctttttcctgttaatctgtcttatattagtttaattcacaggccccaggcattgaacatacaagggtggaggaaaagtttttcctcccctcacaacttatttttattttttatagagataggatctccctatgtttcccaggctggtctctacctctgggcctcaagcaatcctcccaccttggcctctcaaagtgctaggattataggtgtgagccaccgcacctggccccagaaagttctttcatcattatttagtagaagtcatgaaaaaaaaagagctcactcaaggagagatcataaaatgagaagagaagctagaactctagggaatgcaaatatatcaatcagcaaaggaaaaagtgacagcaaaggaaaaagaagccattggtggaaagtgagaagtaccagaaagaaaacagaaaaacctacagcatggcgtcatgaaacttaaaggaggtgagagttgtgacaggcagcttcaaatactacaaaggtatcaaattagataggcctgaaatgcatctgtaggattacaccacaaaatatctctgaaaacttgatcataattgtttcagtagagtgatggaggagaaaactgaaatcaattgccaaaagagtgaatgaaagatgagaaagtggtgtattagcttcctaatggtgctgtaacaaataagcacaaactcaatgccttaaaactcatacactttttatcccatggttctgtagttcagaagccaagcagattgcaaaactgcttttgcaaaatttataacagtaagaaaatcataacagtgaagaagatctgatctggccaaacctccatcgtgcctttggccctcaagctgcccttagacatccctgggcttaggtgaagctacctttgggagacatttagtttatagtttaaatggtaatagctcttccccagaactcaaccacctttgtaaagctaatgagagaccaccagcctaggaagatagaggaggctgaattctgccaaggtgtagaaataaacgactgccagtcattattctggaggtcacaagatcaagatatgcaacctccccaattactcctacagataacatcactattgcagaacctaagattggccttttgagatatgctatcaggttttttgtacgtctracacctgccaaccagctcccgtagccccactcagaagcagctcagcctgcaggaagactatttcccaaacccctataattgcacgcccaagcaatcagcagcaagcacccaytgccgagccacccccatctcttcccccaaactatccttgaaaaagcctagtccccaaatgctcagggagatttatttgagtaataaytttgtctcccccrtggcatggctgacctcatgtcaacaaaactctctctttactgcaatgccatgatctccatgaattaaattttgtttgtgcagtgggcaggaagaacccgttggaaagtcacagtcacttcgggtctcactggcctaaatcaaagtgtggattggctgggcttttacctggaggctctagggaagaatgttctctttccggctgttggaagaattcaattccatgtgattgttggactaagatccccatttccttgctggctgccagctggaaattattcttaccttctagaggctgcctacaatccttggcttcgttatcaaagccagaaatggcaggtcaaatattttgtttgtttgttttaggcaggatcttactctgttgcccaggctagaatccagtggtacaattatgactcactgcagcctcaacctcccaggctcaaccgattctcccacttcagcctcccaagtagcttggactacaaacacatgctaccatgctgggttaattttctttttttttttttgagatggagtctcactctgttgccaggctggagtgcagtggcacgatctcagctcactgcaacctccgcctcctggattcaagcgattctcctgcctcagcctcccgagtagctgggactgctggcgcacaccaccacgccagctaatttttgtatttttagtagagatggggtctcaccatgttggccaggatggtctcaatctcttgacctcatgatctgcccgcctaggcctcctgaagtgctgagattacaggtgtgagccaccgcacccagccaawtttaaaactatttgtacagatggtgtttcactatgttgcccaggctggtctcaaactctaggactcaggcaatcctcctgcctaggcctctcaaagtgctgggattacaggcatgagccaccttgtctggcaaggtcaaatcttgatcacacttcaaatctccctgacctctcccggttggttctcctgccttccttttctgcttttaagggctcataaaattacactgagtccacccagataatccagaatgctctctctctgtttaaattcagctgactagtaaactcaatttcatctgcaaagtcccttcacaacagtgattgagaaaccagaggaggccagacacggtggctcatgcccccagcactttggaaggccaaggcaggcagataatctgaggtcaggatttcgagaccagcctggccaacacagtgaaaccctgtctctactaaaaatacaaaaattagccaggtgtggtggtgcgtccctgtaatcccagctactcaggaggctgaggcaggagaatcacttgaacccatgarggggaggttgcagtgagccgagatggcaccactgcactccagtctgggcaacagagcaagactccatctcaaaaaaagaaaaagtgaaaaattgattgaaccacatctgaggaaacagacagcattaggatccagatcacaagtggaagcagccagccttcacgttaacgttgcaggtagaaaggagggaagtgtcaagaagtggcagtagtggcaagtcactgaggaagttctcttttaataactattattttctctaaaccagtagttctcagagtgtcatccctgggccagcaacatcagcatcagcagagaacttgtgagaaaagttaagctaaggccctgccccagacctacttaatcagaaactctgggggtgaggcccagcactctgtgcttaacagagtcatgcagcaaggcatggtggtgtatgcctgtgatcccaaaactttgggaggccaaggcaggaggatcactagaggccaggagttcatgaccagcctggtcaacatagcaataccccatctctaaaaaattgtttttaattagccaggcatggtggcatttgcctgtagtcccagctactcaggaggctgaggaggggggctcatctaagcccaggagttggaggctgcagtgagctatgacagtgccactgcactctagcctgggcaagagaatgagaccccatctctaaaaaaagaagaaaaaggaaaccagaatcaccctccagtgattctggtacttgcttaagtttaaaaatccctcctaaaatgaaagaaaaaaatcattggtaagaataaggaaggccgggcatggtggctcatgcctgtaatcccagcactttgggatgccaaggygggcaaatcacctgaggtcaggagttcaagaccagcgtggccagcatggtgaaaccctgtctctactaaaaatacaaaaattagctgggcgtggtggcacatgcctgtagtcccagctactcaggaggctgaggcaggagaatggcttgaactcaggaggtgaaggttgcagccaggcctgtgccactgcactccagcctgggcaacagagaaagatttcgtctcaaaaaaaaaaaaaaaaaagaaaagaaaagaaaaaagataaggaggacatgaggagtgaaagacttaagggaatgtaaaagtttgaaagatctatgggaagaaaaagagagatttgttgagaatatatgaaaggccacccagagtaaaatctcaccaaactcctacaggaaccaatgccaggtatggacataaggggttctgggttccaacagacttttgacaaaagatactgtaatataatcaattccaatgagacttttcttcctcttttttgagataagatcttgctctgtcacccaggttggaatgcagtggcacaatcacagctcactgtagcctccacctcccaggctcaggagatcctcctgcctcagcctcccaaatagctgggattacaggcatgtgccaccacacctggcttatttttgtatttttttgtagagaaaaggtttcaccatgttgcccaggctggtctcaaactcctgggctcaagcaatccactcacctcaccctctcaaagtgctaggataacaggcgtgagccaccgtgcctggcctcagtgagaattctttagcatcatgaagaacaacaggaatgactgagacaggaggatcctagcaggcaggaaagaaaactgattttagagtctacatcatctggattcatttcccaactctgccactgcttgagttagaaagttacttaacctccttgagcccctttcctcaacatggaatagaaatacatcaggggtgtagaggcctgcattaggccattttgtgcgttactataaagaaatgcctgaggctgggtaatttagaaagaaaagaggtttgtttggctcacagttctgcaggctgttcaagaagcatggtaccagcatctgcttggcttctggtgaggcccaggaagctttcaattatggcagaaggtgaagggggatttggggtgtcacatagtgagagtgggagcaagaaaggatcggggaagggccacattcttttaaacaaccagacctcatgtgaactcagaacaagaactcaatcattaccaaccacgagccattcatgagggatccacccccatgacccaaactcctcctgctaggccccacctccacactggaggtcacatttcctttttttcagacagggtctcactctgtcccccaaactggagtccatcttggctcactgtaacctccaccttctgggttcaagcaatcctcccaccacagcctctggagtagctgggactacaggtgctcaccaccatgccggactaatttttgtatttttagtagagacggggttttaccacataggccaggctggtctcaaactcctggcctcaagcaatccacctgcctctgcctctgaaagtgctgggrttacaggcatgcaccaccaygcctggccttggaggtcacatttcaatatgagatttgcagggggcaaaacatccaaaccatataaaggccctacccatgataacatatgggaattcctagcacagaatctgacacacaaatgaaaactattgatgcaggactttttcagtgctgtttcaccagctggagacctacccagctggcaacgcccccacyggggctccactcagctctgagctcacagctggaggtaccccgcctgctcagccatgtggctgcacttggcttgcttcagcctgtttgtgttacaacttgtttggtctcgctaccccactccagcccccagctccagggctggcccagccctcccactgcttcctgtcacatggagtgactacctggcactggtggaaaactggagctacagtgttatagcctttttcgtacccacatgtattagttcattttcacactgctgataaagatatacctgagactgggcaatttacaaaagaaagaggtttaatggacttacagttctatgtggctggggaggcctcagaatcatggcagaaagcgaaaggcatgtctcacatggaggcagacaagagaagagagcttgtacagggaaactcccctttataaaactatcagatctcgtgagacattcactatcatgaggacagcatgggaaagacctgctcccatgattcaattacctcccactaggtccctcccacaacatttgggaattgtgggagctatatttcaagatgagatttgggttcacaggtcctgagttcttgtcccatgtccaagaagaatgagattacactgacaactgaagggtgaagagcagagaagagttttattgagtgacggaacagctctcagcagagaggggactggaagtgggtggtcccccacctaaagcaggtagatcccctcgaaggtgggtagtcccccagtgtggctgagcaggggcttttatggatcagaatgggggagtgcatgctcactggtttgtaagtatgcaaaactggctaaaaaaaaaaaaaaggcacgtccctctccctctccctacggtctccctctccctctctttccacggtctccctctgatgccgagccgaagctggactgtactgctgccatctcggctcactgcaacctccctgcctgattctcctgcctcagcctgccgagtgcctgcgattgctggcgcgyacccccasgcctgactggttttcgtatttttttggtggagacggggtttcgctgtgttggccgggctggtctccagctcctaaccgcgagtgatctgccagcctcggcctcccgaggtgccgggattgcagacggagtctggttcactcagtgctcaatggtgcccaggctggagtgcagtggcgtgatctcggctcgctacaacgtccacctcccagccgcctgccttggcctcccaaagtgccgagagtgcagcctctgcctggccgccaccccgtcttggaagtgaggagcgtctctgcctggccgcccatcgtctgggacgtgaggagcccctctgcctggctgcccagtctggaaagtgaggagcgtctctgcccggccgccatcccatctaggaagtgaggagcgcctcttcccggctaccatcccatcaaggaagtgaggagcgtctctgcccggccgccatcccatctaggaagtgaggagcgtctatgcccggccacccatcgtctgagatgtggggagcgcctctgccccgccgccccgtctgggatgtgaggagcgcctctgcccggccgtgaccccgtctgggaggtgaggagcgtctctgcccagccgccccgtctgagaagtgaggagcccctccgcccggcagccaccccatctgggaagtgaggagcgtctccgcccggcagccaccccgtccaggagggaggtgggggagtcagccccctgcccggccagccgccccgtccgggagggaggtgggggggtcagccccccgcccggccagccgccccgtccgggagggaggtgggggggtcagccccccgcccggccagccgccccgtccgggagggaggtgggggggtcagccccccgcccggccagccgccccgtccgggagggaggtcggggggtcagcccctcacccggccagccgccccgtccgggaggtgaggggtgcctctgcccggccgcccctacagggaagtgaggagcccctctgcccggccaccaccccatctgggaggtgtacccaacagctcattgagaacgggccatgatgacaatggcggttttgtggaatagaaaggggggaaaggtggggaaaagattgagaaatcggatggttgccgtgtctgtgtagaaagaagtagacatgggagacttttcattttgttctgtactaagaaaaattcttctgccttgggatcctgttgatctgtgaccttacccccaaccctgtgctctctgaaacatgtgctgtgtccactcagggttaaatggattaagggcggtgcaagatgtgctttgttaaacagatgcttgaaggcagcatgctcgttaagagtcatcaccactccctaatctcaagtacccagggacacaaacactgcggaaggccacagggtcctctgcctaggaaaaccagagacctttgttcacttgtttatctgctgaccttccctccactattgtcccatgaccctgccaaatccccctctgtgagaaacacccaagaatgatcaataaaaaaaaataaaaaaattttaaaaaaaaggcaccactcaaagatgggcataacagtgtaaaaaascaattagggaagggtaggtatatgcaaaataggggaagggtggcatcagtcagaggaaagcacactaaacaggaagagaggttctccatccggcccatggatttatctgagactcgtaccttgattttcaggctttaaactgtctttggtttgaaggtccagtttcaccagggacccacccctgcctgcctaggagcttgtctgcctcctgctgctatcactatggttgttcatttggatatctgtcagattttatcataataataaatgaaacctctatcatttgcttctcacccacagtacttcactcggttccactgggctaggctgggctctacatgtcttctcatttcaggacccaagtcaatggagacgctcctatctgagacatgcatatgctcatggcagacagcagcatgcaaggagtgactgcatttaaagcaatggcatttgaagcttctgttgtgtggcatacatcccatccacccacacacctctggtcaaatcaagtcacaggaccaaattcaaagccagtgaagtgggtgtagtcctgcttcagggaagcacagcaggggtgggaaatggatatatcatttgaacaaataatacattttatcatctattataataacttggrgtaatttcaaatgagattttctaggctatttggaataaagatctaattaaaggcraaagctgaggaacacccagaaggcactctggtgaagactttttcagattctggaaacataattacctttgcaatatccaaacgtttgttatctctaattaaatactcacagtgatcagtgtattcatttactagggccaccataacaagattccacaaactaggtgcctyaaattacacaagtgtatcatcaacaaatgctggtgaggatgtggataaaagggaaaccatgtatgctgttggtgggaatgtaaattagtacaaccactatggagaacagtttggaggttcctcagaaaactaaaaatagaggctgggcatggtggctcatgcctgtactcccagcactttagggggctgaggtgggcagatcacttggggtcaggagtttgagaccagcctggccaatatggtaaaaccccatgtattagtccatttttatgctgctgataaaggcatacctgagactgggaagaaaaggaggtgtaatttgacttacaattccacatggctggggaggtctcataatcatgtcagagggcaaaaggcacttcttacatggtggcagcaagagacaatgaggaagatgcacaagtggaaaccccttataaacccatcaggtcttgtgagacttattcactatcatgagaatagcacaggaaagaccagccctcatgattcagttacctccccctgggtccctcccacaacacatgggaattctgggaaatacaattgaagttgagatttgaatggggacamagccaaaccatgtgaccctgtctctactaaaaatacaaaaattagccagacatggtggtgtgtgcctgtggycccagctatttgggaggctgaggcaggacaatcacttgaatccaggagacaaaggttgcagtgagccaagattgcaccactgcactccaccctggaagacagagagactttgtatcaaaaaaaaaaaaaaaaaaaaaactaaactaaaactagagctaccatatgatccagcaatcccactgctgggcataaaccccaaagaaaggaaatcagtwtatcaaagagatagcttcactcccatgttttgttgcagcaccattcacaaaaaccaagatttggaagcaacctgagtccatcaacagatgaatggataagaaaatatggtactattcacaatggagtactatmcagccattaaaaagaatgagattctgtcatttgccacaacatggatggaactggaagtcattttcgtaagtgaaataagccaggcacagaaagacaaacattgcatgctctcacttatttgtagatcaaaacaattgaactcatgggaatagagaatagaaggatggttactagaggctgggaagggtggtggagggaatgggggtaggtggggacgattaacaggtacaaaagaaaatcgttagaaaggaggaaaagacgtagtatttggtagcacaacaagaggactacagtcagtaatagtttaattgtacattttaaaataactaaaagtgtatatttgtattgtttgtaatacaaaggataaatgcttgaggggatggacatccaattttccatgatgtgattattatgcattgcatgcctgtaccaaaacatctcatgtatcccataaatatatacatctactatgtacctacaaaaaatttttttaaacaaagaaaaaaaagtgtattctctcagagctctggagattagaaatccaaggtcaaggtgttagcatgattggttccttttgagggctctgagggagggatctgttctaagcctcatttctttttttttttttttttttgagacggtgtctcactctgtcacccaggctggagtgaagtggtcaatctcagctcactgcaaccttcgcctcctgggtccaaggattctcatgcctcagtctcccaagtagctgggactacaggcatgagccaccrtgcctggctgatttttgtatttttttagtggagatgagctagtcttgaacttctaaccttaagtgatccaccctcctaagcctcccaaagtgctggggttacaggcatgagccactgcacctggccaatttttgttatataaagatataatcttttttgagagacagggtctcactttgtcatccaggctagagtgcagtggtgccatcaaaactcactagagcctccaactcctgagcgcatgcaatcctcctgcttcaggctccttagtagctgggactacaagcagacaccaccacayctggctaattctaaaaaatttttttagaaatggaggtttcactatgttgcccaggctgatctccaactcctggactcaagcaatcttcctaccttaggctcccaagtccctaggattacaggcatgagccactgtattcagccttagacatcacttgttggcttctcaatggctgtctacatgttcacatggcattctccttgtgtatgtatctgtgcccaaattttcccttttcataaagacaccagtcatattgcattagtggctcttttgcgccagtataaccacatctcagctagttacatctgtactgaccctatttcctgataagatcatattcygggattctgggatgccaagtgttgggacatcaacatatgaactggtgggggtggggtaccttatttaacccataaaagtcaacaataaaacccttaagagatctggctctagctagctgagtcctgatggaaaaacatatatatacatacatatacatacatacatatgacttgttttcagagaaaaaacaaagaatcgtaaagctggggacactgtctcccaccccacagcctttcatgtgtagaaaggagaaccatgaaccaagtctttttagtgcacagatgaaaccagcacaccgagcactggtggaatgaacaaattctgtaacaacacaaatatctgtaaggattctttgtcaagttgaactcattgtctaaactgagtacttgtaatttaactaatcttcacacagagaccaaaaagattttgtgctgcatatttctgccaaagtatgcacgagactggttatctacaatgaggaggccagggcagggaggagcagctcagctatggagctgaacagcctattcctgctggtggcaaggcccctgcttcagggcaccatgaatggttttgctagaactctgccaactttcaacacctgctttcttcgacctttcttattttaatgaaagccacactctatctcgcaccgcaaagaacaacttcatttcctcccttccctgtgtgaatctcttgctctctagaaaggttactcctttcataggcagacaatgttagctatcagctgatgcctgctgccctttcctaaagtaaattaccattgttcacttggatattatttacctctactatagctctttctctctctctctcctatccttttgattctttttatttgctttaatctcctgtccttctactgtctgccacccccaccacccagccttcttcctgcacacacaggtgcgcgcacacacacacacacacccctcttacctataaaggcttaacctgtcagctcaggaaaagagggtgtattcttccactctcatgctgctaataaagacatacccaagactgggcaatttataaaggaaagaggcttaattgactcacagttttgcatggttgaggaagcctcaggaaacttacaattgtggcagaagaggaagcaaacacatccttcttcacatggtggtaggagagacaatgagagaygagcaaaaggggaagccccttataaaaccatcagatctcatgagaactcactcactatcatgagaacagtatgggggaaaccacccccatggttcaattatctccacctgatcctgcccttgacacatggggattattaaaattcaagaagagattttgggtgggaacacagccaaaccatatcattccaccacaacccctcccaaatatcatgtcctcacatttcaaaaaacaatcatgtctttccaacagtcccccaaagtcttatttcagcattaactcagaagtccacagtccaaagtctcatctgagacaaggcaagtcccttctgcccatragcctataaaatcaaaatcaagttagttacctcctagatataatgggggtagaggcattgggaaaatacacacatttcaaatgggagaaattggccaaagcaaagaggctacaggcaaaatccaataggataatcattaaaccttaaagttccaaaatggtctcctttggctccatgtctcacatccaggtcacactgatgcaagaggtgggctcccacagccttgggcagctccactcctgtggctttgcagcatacagctccctttccagctgctttaatgggctagcattgagtgtctgcagcttttccatgtgcatggtacaagctgttggtggatctaccattctggggtctggagggtggtggccctcttctcacagctccaataggcagtgacccagtgrggagtctgtgtgggggcttcaaccccacatttcccttccacactgtcccagcagaggttctctatgagggctctgcccctgcagaaaacttctgcctgaccatctaggcatttccatacatcttctgaaatctagatggatgttgccaaacctcaattattgacttctgtgcacccacaggtccaataccacgtgtaagccctcaagccttggggcttgcaccctctcaagcaatggtctgagctctacattggccccttttagccatggctgggatgcaaggcaccaagtcccaagactgcacaaagcagcaaggctttgggcctggcccatgaaaccattttttactcctaagcctccaagcctgtggtgggaggggctgccatgaagatctctgacatgccctggagacattttctcattgtcttggagattcacatttagatccttgttacttatgcaaattcctgcagccaggttgaatttctcctcagaaaatgggtttttcttttttattgcattgtcaggctgcaaattttctagactttcatgctctgcttccctttttgatataagttccaattccaaaccatatctttgtgaatacataaaactgaatgcttttaacagcacctaagtcatctcttgaatgcattgctgcttagaaatttcttccaccagataccctaaatcatctctctcaagttcaaagttccacagatctctagagcaggggcaaaataccaccagtctctttgctaaaacttagcaagagttgcctttattccaattcccaacaagttcctcatctccgtctgagaccacctcagcctggacttcattgtccatatcactatcaacattttgatcaaagccattcagtaagtctctaggaagttccaaactttccctcattttcctgtattcttctgagccctccaaactgttccatcctccgcctgttacccagttccaaactcccttccacatttttggttgtctttacagcagcaccccacttctggtaccaatttactgtatcagtctgttctcacactgccacaaagacatacccaagactgggtaatttataaaggaaagaggtttaattgactcccaattcagcatggctcagagacctcagaaaatttacaatcatgttggaaggggaagcaaacacatctttcacatggtgaaagcaagaagtgcagagtgaaggggcagaaaagccccttataaaaccatcagaacttgtgagaactcacttactatcatgagaacagcatggaggtaactgcccccatgattcaattacctcccaccaggtyccttccacaacacatgaggattatgggaaatacaattcaagatgagatttgggtggggacacagccaaaccatatcagagggggatgctgcatacagcttttgtgtttccataaaaagtgataaatggcactttggaaggccaaggcaggtggatcacaaggtcaggagattgagaccatcctggctaatacggtgaaaccccatctctactaaaaatacaaaatattagctgggtgtggtggcaggcgcctgtagtcccagctactcatgaggctgaggcaggagaatggcatgaacccgggaggcagagcttgcagtgagccaagatcatgccactgcactccagcctgggcaacagagcgagaccccatctcaaaaaaaaaaaaaaaaacagaacagtgataaatgggtcaggcatggtggctcccacctgtaatcccagcactgtgggaggccaaggtgggaggatcacttgaggccaggagttcaagactagcctgggcaagatagcaagatctcatctctacaaaaagtgaaaaaaagtagccaggcatggtggtgcacacctgttgccccagctactcaggaggttgaggcaggaggatcgcttaagcctaggagtttggggatggggtgagctatgattacattattgcattccagcctaggtgacagagcaagatcccattgcaaaaaaaaaataaaaaataaaaaattaagcaataaactaatggtaatagacactattgaacatttcaagccctacctcaaagcagagatcaagtaaagataccttctcccatcaaacctagccccacaatactgccataaccacagccacaggcagaatcttagactgggtatgcctggaaggcttaaactagggaacaaccacaggtcctattcaagttccttgcagcaaagctaagctgctggcccagtggtgttctctggtattccctgggctagtacattaagaaagcaccttgaacataaacttggactatgaggggttgtatagacagcaagacctagcagatgcctcctgcacccaggggtgactggctggctcaaagcctgattaaatatgatacaggtggctcaggtgggagatgaggctatgatggacccacctgcactcctatagtgcaggccttcatctgactccacatccacataaaccttgtaaagcaaaaataaagccccaggcccccaggtgagacaggacagacactgtaataacgtgataccaaattataaagatctaaggccatgccagaaaaggattaagtcatgcaccccctacacttaaagagtaaactatgttttaactgccacaaggttttcttctttttctctagcagacaaacaagaattggcctccagatacacagtattaaagcaattgcagctcactgaccaacttacccctgttccaccagccataaccaaagctttgatttgacgaaagactgggttcattttctcctgacaaaagaccaccgaccatgaactggttctggccagtttacagaggctgagcactgagtgcttcgtrtccctgcttcactttctactaataatatatagagcctaactttactgcatttaaaagttgtctctatctgccatgcatagtggttcatgcctgtaatcccagcattttgggaggccaaggagggagggtcacttgaaccctggagtttgagaccagcgtgggcaacatagcaagaccccatctctattcgaaaaaaagaaataaatgttgtcaccaccacaaagtgaacatgggtggtatacaatatacatctttattcactacacatgcattaggacccccttcatgaatattcatagctcctcctataatccgttgaatatgtatacttggccaaccccttcagcataatattcctgtttcatccttcctccctcaaagtgcttgcttttggtctcttacagaggcttcacttcccagcctacagcatggccaaccttcaagctataaccttttataagaaataaagtctcttctcaaaatgtatgaatttcctgcatgattcttcagttaacaagcctgagtcaagacatcaagggttcctttccagggctgtcctctgacaaattctggaaggaggtaaatattatctttggtatttcccccataaccattgctcaaaatcatcttagggacccagaaaatgcttattccaatcagacaaaactaacatccagctgggcctgttcatttcggtgtcctacagaatcacaagcataagctgtcccaaactaaaccgactsccatcctcccaacatgatcacaccagcttccacccacccagtgtgcaagcaccaggctgttccctcacacctcatactccatggatccctcccaattttttctactgtgttcctcctccacctcactacctttctcaggccttccttgttgctcatttagataggataagcccctaagataggattagggggtgccggggcaggtgcttgacccaggaaaacctgtgctcaaatccaagtccttccactaacttaccaagtagttttgaaaaaggtaatgaacttgttagtttcctcacatttataatacctcttttgaaagattgtggtaggatttaatgatgcaatccatgtagagatgtttgtcaatttgatttttttttttttttaagagagagggtcccactgtgtttcccaggctggtctcaaactacttggctcaagtgaccctcttgcctcagcctcctgaatagctgggactatgggcgtgcatcactgcacctggcaatccccttttcttcattcagttccagtgccctttacattgtattctgtatgaacagtgcccctctggagttcagcaactctgtggccctgacccataaatgtgctgtaatcctaccacattgggaagctgaggccagtggatcacttgaggtcaggaggttgagaccagcctggccaacacggtgaaacatcgttatctactaaaaacacataaaatagccaggcatggtggcataagcctgtaatcccagctactctggaggctgaggcaggagaattgcttgaacccaggaggcggaggttacagtgagcagagattgtgccactgcactcctgcctgggcaaaagaatatagaatcacagaatctttccaaagatttattaaatttattaaaattattttatcattttacttactctatgatagtaaggtgattttatgtatattctggggttttttttgagatggagtcttgctctgtcgcccaggccagagtgcaatggtgcaatctcagctcactacaacctctgcctcccgggttcaagcgattcttctgcctcagcctcccgagtagctgcaactacaggcgtgcaccaccacaaccagctaattttttatattttagtagagatggggttttgccatgttggtcaggctggtcttaaactcctggcctcaagtgatccacccacctctgcctcccaaagtgctgggattacaggtgtgagccactgaacccagccaagaatattatttaggattatttatcttgaaaaattatattawcaactttactttaatataatcttaatgacctatgttcatttattccaggggtccccaatcctctggccacagaccagtaccagtccatggccagttaggaactgggctgcacagcaggaggtgagtggagggcaagtgagcattaccacctgagccccgcctcctgtcagaccagcagcagcattaggttctcataggagcacgaaccctattgtgaactgcacacatgggatctaggttgtatgcgccttatgagaatctaatgcctgatgatctgaggtggaacagtttcatccctccctaccccaccctcccatccatggaaaaattgtctcccatgaaacccatccctggtgccaaaaaggttggaggccactgtttattcaacaaatacggtttgaggccttttatgtagcaaatactgctcccttrgcttgtcctcatttaattcctgacatgttgtttaatttaagtcacttatgtgtaaaaaatatttttgttgacaaacataaattccaaactggtatcatatcccatatggtttcaagactgaattcatatcaaattatctattcaagttaaacctatgttatgccatcaaatctagaaaaaaaccacttttactccctaaactttgaattcatgcattttacattaaattgtaaatggctgggtgcggcggctcacgcctgtaattccagcactttggaaggctgaggcaagcggaccacgaggtcaggagatcaagaccatcctggctaacacggtgaaaccccatctctactaaaaatacaaaaaattacccgggtgtggtggtgggtgcctatagtcccagctacttgggaggctgaggcaggagaatggtgtgaacccgggaggcagagcttgcagtgagccaagatcatgccactgcactccagcctgggcagctgagggagactccctctccgcaggaggagggaattgtcccctggttctggtcttcctggcttccttcccttttttttttttttttttttgggggggggggtgcggcggtggtgtggggcgggggggggggggtctgtctccttgnnnnnnnnnnnnnnnnnnnnttgtaaaatggttctagtattcatgttttattcctttttttttttttttttttttttggggggggggaatcttgttcttttgcccaggctggagtgcagtggcacgatctcagctcactgaaacctccacctcctgggttcaagcaattctcctgcctcagtctccagagcatctgggattacaggcttatgccaccacgcccggctattttatgtgtttttagtagatacgaggtttcaccatgttggccaggctggtctcaaactcctgacctcaagtgatccacctgcctcagctttccaatgtgctgggattacaggtgtgagccactgcacctggcctccaatactgagtgtgttttcaatgagtgctttatgattctgccacttggctgatgagttacaattcagctgaacatcattagctatcatggtgatctttataaccttttgatttttactctcaattatcatttaatatattccagtaatgtaacattggttgaaaaaaggaaatataagaaacagaaatgaaaacagtaagtttggagagtaaggtgaaaatatttctgcaaattcctttcaaatagatctttctcataggtttgagttaccttctgcttatgcaatgctttaggaactcattgaatatctctgcctaaaatataggttaaacaaaaatatagtggttgcatcttcattaaatcggagtgaatgctatccatatcaaaaatgttttacttgcagtaaagtacttgcaaatatcagctttaaacttctcatcttgtcagttataaatacaacatacaggctgggtgtggtggctcgtgcctgcaatctcggcactttgggaggccgaggtgtgtggatcacctgaggtcaggagtttgagaccagcctaacatggtaaaacccccatatctattaaaaatacaaaaatcagccaagtgcagtggcacacaccttcccagctactcaggaagctgaggcaggagaatcacttgaacccaggaggcagaggttgcaatgagccaagattgtaccactgcactccagcctgggcaacagagcaagactccatctcaaaaaaaaaaaaaaaaagaaaagaaataaaacacacaaatactaaaacaaactattttataatttaatgtataatgcatgaattcaaaagtttacagcgtaaaggcagtttttttctagatttgatggcataacataggtttaacttgaatatttttatattaatttagtcttcaaaccatatgggatacaatgccagtttggaatttatgtttgtcaacaaaaatatattttacacataagtgacttaagataaatttaaaaacatgtcaagaattaaatgaggataagctaagggagcagtatttgctatatataaaggcctcaaaccacatttgttgaataaacagtggcccccaactttttcggcaccagggacgggtttcatgggagacaattcttccatggatgggagggtagggtagggagggatgaaactgttccacctcagatcatcaggcattagattctcataaggagcatacaacctagatccctcacatgtgcagttcacaatagggttcgtgatcctatgagaatctaatgctgccactggtctgacagaaggtggagctcaggtggtaatgctcacttgccctccgctcacctcctgctgtgtagcccagtttctaactggccatggactggtactggtctgtggccaggtggttggggactcctggaataaatgaacatatattgttaagattatattaaactttataatacaatttttttttttgagacagagttttgctcttgttgcccaggctgggtacagtggtgtgatcttggctcactgcaacttccatctcccagattcaagcaattctcctgcctcagcctccaagcagctgggattacaggcgcacaccaccactctaggctaatttttgtatttagtagagacagggtttcaccatgttggccaggctggtatcaaactcctgatctcacgtgatacacccgccttggcctttcaaagtgctgggatgacaggtgtgagccaccatgcctggcttataatacaatttttcaagataaataaatctaaaataatattggctgggcacagtggctcacacctgtaatcccagcactttgggaggtggaggcaggtggattacttgaggccaggagttcaagaccagcctggctaacatggtgaaaccccatctctactaaaaacacaaaaaaattagctgggtgtggtggcgcacacctatagtcccagctactcaggaggctgaggcaaaagaatcacttgaacccaggaggcagaggttgcagtgagccaagatcatgctactgcactccagtctgggctacagagcaagactccatctcaaaaaaaaataaaaaaatctttctacgtaaaatcacctattatcatagagtaagtaaaatgataaaacaattttaataaatcttcagaaagattctgtgattttttttttttttttttttttgagacagggtctcattctcattatccaggctggagtgcagtggcacaatctcggctcacttcaacctccacctcctggactcaagcaattctcctgcctcagcctcccaagtagctgggactataggcgagcaccaccacgcccggctaatttttgtatttttagtgaagacagggtttcagtatgttggacaaggtggtctagaactcctaacctcaggtgatctgcctgctttggcctcccaaagagctggaattacaggcatgagccaccatgcccgatcagattctgtgattctatattattttttaagagtcaggaccacagggttgctggactccagagaggcactgttcatacagaatataatgtaaagggcactggaactgaatgaagtcaaggagatttccaggtgcagcagtgcacacccgtagtcccagctagtcaggagtctgaggcaggagggtcactccagccaagtagtttgagaccaacctgggaaacacagtgagaccctgtctctaataaaaaaaaatatataaaaactaaaaaaatcaaagggtctcgctctgtctggagtgcagtggtgtagtcatagctcagtgcatcctcaaattcctgagatcaagcaatcctccctcctcagcctcccaagtaactgggattataggcacacaccaccactcctggccagtttttgttttgttgtgttgtgttttgttttgtttttgtggagatggggccttgctatgctgcccagagtaatctccaactcctgggcttgagcaattctcctgcctcggcctcccaaagcacagggattacagttgtgagccaccacactccaccatgaatatctttagaaggaccattttgagcctaccaaaagggccctcacatacataggctcctctccataactaggagagaaggttgccagaagcttccactacagacagcacctgccaggtcaaaactgtggaggaattagagaaggagctctaccaatgagggctctgaagccaagcagagcttttttttttttttttttttttttgtgagacagagtctcactctgtcgcccaggctggagtgcagtggcacaatgtctcagctcactgcaactttcgcctcctagattaaagcaattctcctgcctcagccttccaagtagctgggactacaggcacacaccaccacacccggctaatttttttgtatttctagtagagaaggggtttagccatgttggcaaggctgatctcgaactcctgacctcaagtgatctacccacctttggctcccaaaatgctgggattacaggcgtgagccaccgcgcctggccccaagcagaactcttctaaaccatcaaccatggagagctcactaggatcacctgtgctagaggaaacgctgaattcattttctatacattatgcagaagatgacatcactcttgccgtataaagaagtgcttcacctatcaagaaccaatcttgtgaaaacattttcggtctgtcctttagttaaatttataaacatatttatagcctggaattgtgactgattcgattgcagctttgtgatgatttgggcacgctgactcttgttctcaggatggtctgtagcacaccttctcccagttgtccaatcaaaccctagttgaggtgcggctttaaggggatttggcagacgtaaacaaagcccaaaatccttgagttaatcatgagagataaggtgtgggttgggctgacccaagcaagtggaaactgtttaaatagcccatgggaactccctgaggtttagagatacagacagcaaaggagagaggatcctcaaaatgacttatccatgtcaaaccctccagactcagctcaatgcaaacatcctacacatggcaaatgaaaaagaaaaaaaaagtcagaaaatgccctgtgataattggtagccaattgaggcaacattggatgagttggatcagaagatgaagctgagagagaacttcaggaagaaaagaggccaggggagtgtctctggcccaccttcaggattcctcattggaaatcctgctacatcttagagatgtttcattagcagaaagccatcagcagagaactgtgtgcgtattatctgaaagaagattatgcagatccaaacctgactgccaagtggaaaagagacagttacaaggctttgtgctgcctgtggtgtgttcagactcaggataccaactttggaaccaactgcatctgccaggttgtctagggcacccttgacataagtgacttcatcttagaaaaatactttattttacatttcaaaaggcattatgccaacaggaccagatgtttgcctaatcaatggagacaacacccaactagataagggcatatgaccctttattatcagccctcatccgaggactcaagggtgataagatgagccggacttcaccagccagccctagccatcttgagagaccccgtcttgctggtgcttgtgatcgacacctggcatctgccacccaaggctgtgctcaaatcaaaaactcttcctgcaagacattgacaactgtctggatcagcccaggacatcttccttgtccacatagctctccctggactggttcattaacccttattcctatccccttttctcttgatgttaaatcttgtttgatgtgtaatgtttaatctataacgtttacatatcgattaagtatactgttaagaatggtctgcaatattgactgacttgtggagtggcttgaacctgtgtgcccatggctctgactgagtgagcaggtggtatttaggagaattgcctgtgtagcttgtggcttttatgattaaaacagcatcagtaaaagtctaaccttgtggaaagactcaaacatacatggacttggttctgcctgtccttgcactgctcatgatccgggtcccccaaagccagtgggaagccggaagcatggtggagagggtgccctgtggccacaaaagctgttcctccagtggccactctggccccactcccacttcaccctggactttgaacttccatgatgtctgggtctccccaagcctctgggtccctaaaagtgatctatgttgaagacatccagaactgagtatgtcatggtcacctcccaaaacacccccagcccttcccagtagcaaggctggaactctgctgcctctgaaccagatctggaactttgatcccaattacatttgagagacaagggaatatcagttctgtatcctcagaaaacctttgcctccccaaacccaaggtcatgaaagtaaaatttgaaagtaaacaagaatttaaaaaaaaaaaaaaaaaaaaaaaacagataaatagtctccagagagaagatattgactcctgctccgttagggtccttcaagacccagtaaatgcccagttaaagggtggagaaatggaaccttgtgctttaacgttctttccaccaggtggcgtgtgctgagcctttgggaaaaaaaaaatctttgaaaaaaagatattgcttgagtggcttgtatttccttcccagcacaaatagaaactttgctttctaggaatgtgaggcttatcccaggagaaagaaaatcaaattcaggtccaaaaatatggaaaattttctttttttctgttttttccccaggcttctgcctttttgctctcaggaattaccgctgctraactggaagtagagattgtccctggcccttcctcatcagtaagtggttgttaagcatttcagtgatgtcacctgttttctttatgtactaagtgtggaagtatttgtggtatggggggaatagtgtttgtttttaacaggtgaaaggttactgttgttttatggttttttgtctttaaggtaaggtctctgtcccccaggcaggagtccagtggggcaaccatagctcactgtaacctcgagctcctgggctcaagcaatcctccctcctcagcctcccaagtagctgagactacaggcacacaccacaacaccaggctaattttttaattttttgtagaaacaggagtcttgctatgtttcccaggctggtcttaaactcctgggctcaagcaatcctcacatcttggcctcccaaagcactgagattacaggtatgaggcaccatgcccaccccaaaaggttactctttttcatgagccggaaatatcattcaggcttgaaacagaagggcttccccagaatgttatttttaccttgccatgtaaaaataacattaaaactgccttacgttataagatgtgtaacaatttacaaaacaaggtgtagtagaaaggatattggagtcacaagtcctggattttcaccttggctccaactcttagatttgtaagattttggtcaagttacaatccgtttcaatatccctaaagtggtgatgctaatagttatttggaaaaccaagtgagaaaatgtacgtgagatcccaagccctaagatgctcagcattactagtcattaggaaaatgcaaatcaaaaccacaatgagataccactaaacacccattaggagggttactaacagaaaacaaataaaaaaggaaaaaaaatgttggaaaataaatgtttgcaaagaagtaggaaaaaatgaaacccttgtgcattgccggtgagagtgtaaaatcatgcagctgctatgagaaagtttggtggttcctcaaaaagctaaacatagactatgttctagcacttctgctcctaagtatatacctaaaggacttgaaagaagaggtccaarcagataatttgtacaaccaagtccatagcagcattattcacaatagccaagatagaaacaacccaagtattcatcaacagatgaatggataaaatgtgacatatccatacaatggaatactattcatctatgaaaaggagtaaagttctgatacatgatcaacacggaaaccttgagaacactatgctaagtaaaataagccagacgcaaaaggacaaatatagtatgattccacttctgtgagctacttagaataggcaaattcacagagacagtaagcagattagaggttaccagaggctggggggatggggtgagaataggaagttattatttaatgcttacaaagtttctgttcagtataataaatttttgcaaatagatgatggtggttgcatagcataatgaatgtaattaatttcactgaattgtatactttaaaatggtaaaaataggccaggcatgatggtgcatgcctgtaatctcagcactttggcagaccgaggcaggcagatcacttgaggtcaggagttcgagaccagcctggccaacatggcaaaaccttgtcgccactaaaatacaaaaattactgagtgtggtggtgcacacctgtaatctcagctactccagaagctgaggcatgagaatcgtttgaacccaggaggtagaggttactgcactccagcctgggtgacacagcaagaccctgtctcaaaaaataaataaataaaatggtaaaaacggtaaatactgtgtatattttatcgcaataaaaaatacaaaaaaagtgattgagtggatttagaccaatattgcattcaagatcaactacagatttgggaatgatatttttctaactgactatatttggtgattaaacttcattttctaagaaattaaggtttcaaggcctggcacatttgcattcaactcatgtgctgaggcttcttctggcccatgttatccttcgaggcacagaagcatcatmacaaaatcctgctgtccctgcacgacattctcttggagccacttctcggtgcagattactgcttagtcttagaaaggataggcacagaaagaatgtagtgagggaatgaatcgraggagaacactcagtgagcaccctcaatgccaagtcatttgtgtgtgttcttggtccctcctttaagcccagattctactctctgcattcttcttgatgccttgatcagaattaatttctttacatctgatatttcaaggctttttatggcatttctgcaatctaccccatgtaggcttacatatgcatgcagctcatttagcatgaggacctaaaggcaagaacctttctctttccctttcccttcctcctttcatcacccaactcttactcccacccatctgcyacacccttagaaaatgtttgccatgactactgcatgtccaagctctatcaaatctgacagcagaatggttttgccaattattttttctcacaaataattgccttttatctattttatttactgcaaactcagttgttatcaactcctacctacccccaagacatccactcgtcaccactacaaaacctcaagtataagcacacgctgacaaatcctgaaaagggtaagatgtaaatggcaccaaagactgaaaatagcctggaaccaggctttaatgcaacacagcaactggctttgttcaccatattaaaaagggttaacaggccgggtgcggtgactcatgcctgtaatcccaacagtttgggaggccaaggcgggtggatcacttgaggccaggagttcgagaccagcctggccaacatggtgaagccccatctctactaaaaatacaaaaattagccaggcatggtggcgggagcctgtagtctcagctacttgggaggctgaggcaggagaatcactcaaacccaggagacagaggttgcagtgagctgaggtcgggccactgcactccagcctgggcaatagactctgcctcaaaaaaaagaaaaaagaaaaaaaaaaggattaataacatgtaatccttgtccctcaaggagctaaacatctctgtacaagaattcttcactaaaaactgctccctattgcagaatactttcttcatagcacaagattaagtcaagaaggaaccattatttatacacattccacatatctcatttaatttttacaccaacccagtgaagtccttctcagtctggcttctgttgacctcttagcctctctcatccatctaacccagcactccattttccaaccatacaaagctacctccagtccctgaacgtaccagctaactctcctctccaatcttcttttttttttttttttttttttttttgagacggagtctcaccatgttgcccaggctggagtacagtggcatgatctcagctcactgcaacctctgcctccccggttcaagccattctcctgcctcagcctcccaagtggctgggactacaggtgcgcgccaccacctccagctaattttttgtatttttagtagagacggggtttcaccatgttggccagcctggtctccaactcctgacctcaggtgatctgctcaccttggcctcccaaagtgcggggattacaggcgtgagccactgcgcccagccctccaatcttctataaatggtgtttttttctgcaaggacccctgcctactcccaacattcttctagctaccatctacttatctttcagacattatctcagaagtccttccctcttgaaaactttccatgccagcttcatgctgccaagactgaattaactaccggaccttcaggataccctgggaccaactatccctctgggggcattacccaggctcttaaaatgtaagggtgtgttaacttgtctgttttctctactggactgagcagtccataagggaaggggccatttgtgtacccagaacttcattaattatctgacgcatgatcaacattcgacaaatatctgttcaacggccatgatcagtattattttcctgtattttagacatgaggaagctggaactaaggaagtctaagaatgtgaccacagctggcatggtggctcacgactataatcccagcactttgggaggccaaggcgggcacactgccttagctcaggagttcaagaccagcctgggcaacatgatgaaaccctgtctctactaaaaatacaaaaaaatagccgagtgtggtggggcacacctgtactcccagctacttgggaggctgaggcacgagaatctcttgaacccaggaagcagaggttacagtgagccaacattacaccactgcactccagcctgggtaaccaagcaagagtttgtctccaaaacaaaacaaaacaaagtgtccagagacacagagcttacaagcagaacacctagatttgagcccagttccttccggctcaagagttcaaaatataagtgaatccctttaccaaagtgtgtgagaatttcatcaatgattattcaaaatgtcccattggagtcatcagttcttcctttattttaccataatattccaccaaaattcaccctcactatccagtgaaaacccttacagatcaagctgggcgagatgactcatgccggtaatcccagcacgttgggaggctgaggtgggcgatcacctgaggtcaggagttcaagaccagcatggccaacatggtgaaaccccatctctactaaaaatacaaaaatgaaccaggcacagtggcaggcacctgtaatcccagatacacaagaggctgaggcaggagaatcgcttgaacctgggaggtagagtttgtagtgagccaagatcatgccactgaactccagcctgggcgacagagtaagactgtctcaaaaaccaaaccaaacaaaacgaaaaaacacccttacggctcagatttataaacagaactcaaagacagaggctacacttacgaggtggggcaagggaagttgagaaaaagatggcatctccttttcccaatgttttttcctctttcagctgtatgttttggggttctaatgacaaataataaggcctgagaattttgctggaaaccttcctacaatgatttaaatgtttgttccctcccacactcatgttaaaatttaattaccagctggcacagaggctcatgcctgtaatcctagcactttgtgaggccaaagcgggaggatcatttgagctcaggagtccccaagaccagcctgggcaacatagtgagacaccgtctgtatttttaaaaaaattttttaataaaaaaataaaattaattaattatccttgtaacagtagtaagaggcgaaaactttaagaggcgattaggccatgagaccctgtcctaatgaatagaataatatccttatcatgggggtggattccttataaaagaacaaattctgcccaccttttcccctctctctgcccccctccctctcctctttgcctttctgccatgtgataccttctgccatcttagcgtgtccggaattgttgggttcttggtctcactgacttcaagactgaagctgccaacccttgccgtgagtgttacggttcttaaaggcagcgtgtccggagtttgttccttctgatgtttggatgtgctcggagtttcttccttctggtgggttcgtggtctcgctgagaggtgacagcgtgctggcagtcctcacagccctcgctagctctgggagcctcctctgcctgggctcccactttggaggcacttgaggagcccttcagcccaccgctgcactatgggagcccctttctgggctggccaaggccagagctggctccctcagcttgcagggaggtgtggagggagaggcgcaagcaggaaccatgcctgcatggggcgcttgcgggccagctggagttccgtgtgggcgtgggcttggcgggccccgcactgggagcagccggaccgccctgccggccccaggcaatgaggggcttagcacccgggccagcggctgtggagggtgtactgggtcccccagcagtgccagcccaccggtgctgcgctcgatttctccccaggccttagctgccttcctgcagggcggggcagggctggggacctgcagcacgccatgcctgagcctcccaccccctccgtgggctcctgtgcggccsgagcctccccaatgagcaccaccccctgctccacgatgcccagtcccatcgaccacccaagggctgaggagtgccagcacaaggcgtgggactggcaggcagctccacctgcagccgcagtgcgggttccacygggtgaagccagctggcctcctgagtctggtgcsgccgtggagaacctttatgtctagctcagggattgtaaatacaccaatcagcaccctgtgtctagctcagggtttgtgaatgcaccaatcgacactctgtatctagctactctagtggggccttggagaacctttgtgtggacactctgtatctagctaatctgttggggaggaggagactctttgtgtctagctcagggattataaacgcaccaatcagcgccctgtcaaaacagaccactgggctctaccaatcagcaggatgtgggtggggccagataagaataaaagcaggctgcctgagccagcagtggcaacccattcagggctcccttccacactgtggaagctttgttctttcactctttgcaataaatcttgctactgctcactctttgggtccacactgcttttatgagctttaacactcaccatgaaagcctacagcttcactcctgaagccagcaagaccatgagcccaccagaagaacaagtccaggaacaactccagacgcgccaccttaagagctgtaacactcaccgggaaggtctgcagcttcactcctgagccagcgagaccacgaacccaccgaaggaagaaactccgaacacatccgaacatcagaaggaacaaaaactccagaggcaccaccttaagagctgtaacactcaccgtgagggtccgcggcttcattcttgaagtcagtaagaccaagaacccaccaattgcggacacattgctggctcaggagtgaagctgcagaccttcgcggtgagtgttacagctcttaaggtggcgcatctggagttgttcgttcctcccggtgggttcgtggtctggctggcttcaggagtgaagctgcaaagtttcgcggcgagtgttacagctcttaagtgggcgtgtctggagatgttccttcctcctggtgggttcgtggtctcactggcttcaggagtgagtgttacaccttcacggtaagtgtcacagctcataaaggcagtgtggacccaaagtgagcagtagcaagatttattgcaaaaagcaaaagaacaaagcttccacagtgtagaaggggacccgagtgggttaccactgctggctcgggcagcctgcttttattctctaatctggccccacccacatcctgctgactggtccattttacagagagccgattggtctgttttgacagggtgctgattggtgcatttacaatccctgagctagacacagaagttctccacccccgcccccctcactagattagctagctacagagtgtccactggtgtatttacaaacctggagctacatacagagtgccgattggtgtattcagaatcccttagctagacataaaggttctccaagtccccaccagattagctagatatggagtgtccattggtgtatttacaaaccctgagctagacacagagtgctgattggtgcattcacaaaccctgagctagacacagggtgctaattggtgtgtttacaaaccttgagctagataaagagtgctgattggtrtatttacaatccgttagctagacataaagattccccaagtccccaccagactcaggagcccagctggcttcacccagtgaatcctgcaccggggccgcaggtggagctgcctgccagtcctgggcagtgcgcccgcactcctcagcccttgggtggtcgatgggactgggcggcgtggagcaaggagcggggctcatcaaggaggcgccggccacgcaggagcccacggtgggtatggggggaggctcaggcatggcaggctgcagatcccgatccctgccccacagggaggcagctaaggcccagggagaaattgagtgcagcaccggtgggccagcacaggtggaagacccggcacaccctccgcagctgctggcctgggtgctaagcccgttagagcccgcggccagcggggctggtcggctgctccgagtgcggggctgccaagcccacgcccacccagaactctagctggcccacaagcaccgtgtgcagccccagttcctgcccatgcctctccctccacacctccctgcaagctgagggagctggctctggccttggccagcccagaaaggggctcccacagtgcagcggtgggctgaagggctcctcaaacatggccagaatgggcgccgaggctgaggaggcaccaagagggagcaagggctgtgagggctgccagcaggctgtcacctctcattaggacacagcaagaaggctcccaccagatgctggcatctcaatctattttttttttttttttttttttgagacgagtctcactctgtcacctaggctggaatgcagtggcatgatcttggcttactacaacctctgcctcccaggttcaagcaattctcctgcctcagcctcctgagtagctggaattacagatgcacaccaccatgcctggctaatttttgtatttttagtagagatgagatttcaccatattggccaggctggtcccgaactcctgacctcaggtgatccatctgcctyggcctcscaaagtgctgagattacaggtgtgagctactgcacctggccaggcatctcaatcttgaacttctcagcttccagtgagaaataaattgctgtgttttataaattacccagtttgtgggattctgttacagcagcacaaaatgaactaagatacttctcttttcgctgatatagaaaaacagccaattcagtgaactggttgagctgcccacctaattatgctgtgtctggagctctttagggctctgggggtacctataaaagccacagttatatttcaagatgagaatattttcacaaagaacagaagtatcatcaggctttgaaagttctcagtggtgcctgctagaaagcagccatgcttcaacataaggagctcagagccatcttggccttgcccattgagtgggttatctattgctgtgtaagaaactactccaaaattaaaagcttaacaaatttttattatcacagtttctgtggatcaggaatttaaaaacgacttagctggatagtttggggcagggtcttttctgaggttgcagtcaggacattggctgaggctgcagtcatctgaaaatttaactggagatggagtatccactattcttggtttttttgtttgttttttgagatagggtcttgctctgttgccgaggctgaagtgcagggtggtgcaatcacagctcactgcagcctcaaactcccaggctcaaccaatcctcctgccttagcctctggaatacccaggactacaggtgcacaccaccacaccagctaatttttaaatcttttgtagagacagaatcttgctatgttgcccaacctggtcttgaattcctggcctcaagtgatcctcccacctcaacctcccacagtgccgggatttcagctacaagctactgcacctggctggccaggaaccacttcttttttttttttttttttttttttgagacagagtttcactcacattgcccaggctggagtgcaatggtgcgatctcggctcaccacaacctccgcctcctgggttcaagtgattctcctgcctcagcctcctgagtagctgggattacaggcatgtgccaccacacctggctaattttgtatttttagtagagacggggtttctccatgttggtcaggctggtctcgaactcccgacctcaggtgatctacccacctcggcctcccagagtgctgggattacaggcgtgagccaccacatccagccaagaaccacttcttaaacaactcattcacctggctgttatgaaaagacttcagtgtcttgctggcttttggcaggaggcctcagttccttgccatttgggtatattcattgggttgcttgagtatcacatttccctatagccctatagcctgttatccaagagagagaacaaggaggaaatctcattatcttttatgacctagtttcagaagtcacatatcatcatttccacaacatcttattcattaaaagtcaggaagtacaacccacattcaaaaacagtattgggctttactttttaaaagaactatcaaagtatttgtgaacatgttttttataagttttctttggtttggttttgttttttgagactacagtctctctattttgcccaaactgggctcagctcaaattcacaatcatcccgtgtagctgggactacaaatatgcgccaccatccccatataaacatgtttttaaatcactgcacccatgcacttaacaaagaatagattcacaaacacaaactccttccttacttataaggggcattttacctctctcagtgaagtgccctaagctatatcccaggtcctgataaattcccacacatcagaaattaattactttcttgactctaatacctgttgatgaatggtttgagcccttcttcactccaaagtgtcaatcattaactattgagtaaaatatttacagagcaccatcaatgtcccaagtactaagcagaaaaaaaaatggaacatagagctaaaaaccagtgcccctagctcagatggctcactgtttagtatgagaaaaacaggtattatgatgcagtatgataagcactataatagaattatgcttcgggggctatccagtgcataaaagagataactasctagattggagagtgagaaggagagacacatacaacttgtgagataaccttggagataagctctaaatgatgagcagatttagccaagcaaaatggaagagaagaacaggctaattgatcctaggcccattcaaagacatgaagatgaaaaaaaacatggaatattttgaatttttacattgtttcttaggactggtgtgcaatagaattcaaggtgggaaatagccagaaatgaggctagacaggggccccacactaaagaatctggaatttctctacagtcagctgggagccatcaaactactttaagcagctgggacaaaagcaagtttgcttttttaaatttttctttttttttttttaattgagagagagtctcattctgtcacccaggctggagtgcagtggttcaacccggctcactacaacctctgcctccccagttcaagcaattctcctgcttcagccttttgagttgctgggattacaggcacacaccctcacacctgacctcaggtgatctgccctcctcagcctcccaaagcactaaattacaggagtgaaccaccgcgcccaggaaaaatttgcacttagaaggtgactactaggtaaggtgcagtggctgacgcctgtaatcccagcactttgggaggccgaggacagcmgattgcctgaggtcaggagttcaagaccagcctaaccaacatggtgaaaccctgtctctactacaaatacaaaaaatattagctgggcatggtggtgggcacctgtagtcccagctacttgggaggctgaggcaggagaatcacttcaacgcaggaggttgcagtgagccgagatcatgccactgctctccatcctgggtgacaggtaaaaaacaaaacaaaacaaaaaaagattaactctggctgggtacaatggctcatacctataatcccagcactttgggaggctgaggcagaaggatcacttgaggccaggagttcaagaccaacctgggcaatatagcaagactcctgtctttacaaaaaatattttttttttttttagatggagtctcgctctgttgcccaggctggagtgcagtggcatgatcttggctcactgtaacctccgcctcccaaattcaagcgatcctcctgcctcagcctcctgagtagctgtataaaaaataatttttaaaaattagcttggccaggtggtgcacacctgtagtcccagctactcaggaggccaaggcaggatgatcacttgagcccaggagcttgaggctgcagtgagctatgattgtaccactgcactccaggctgggcaacagagcaagaccctgcctcaaaaaaattagttaaaaataaaaggtcactacccagtaatgtagaaaatatatttgcagtaaatttatttatttatttatttatttatttttgagatagggtctcactctgtcacccaggctggtgtgcggtggtaccatcatgactcattgccacctcgacttccaggttccagcaatcctgtcacctcagccacctgagtagctggaaccacaggcatgcgccaccacgcccggctaatttttgtatctttggtagacacagggtttcaccatgtttcccaggctggtctcaaactcctgagctcatgatccacctgccttgccctcccaaagtgctggattacaaacgcaaaccaccacacctggcctagagtaaattcaaaatactggaagctgggtgtaatggcttacacctgtaatcccagcactttaggaggccaaagagggaggtctgcttgagcccaggagttcaagaccagcctgggcaatatagtgagatcccatctctacaaaaaataaaaaaatttaaaaatttaaaaacaaaatggaaggcctggcatggtggctcatgtctgtaatactagcactttgggagacctaggtgggtggatcacctgaggtcaggagtttgagaccagcctggcaaacatggcaaaacctcatctctactaaatatacaaaatttagccaggcatggtgcggcgcgcctgtaatcccagctactcaggatgctgaggcaggagaatcgcttgaaaccgggaggcggaggttgcagtgagctgagatcgtgccactgccctccagcctgggtgacagagcgagactccatcttaataaacataataaaaataaggaaatgaggagggaacacccaaggagtgacagtgatggtgaaggagaggggtggtttgaaagactggaaggtaaggaattgatacattagtaacttggttcaatacactggatcgggtgggggtgaggaaggaaccaagggagcccgagttgaggttttagaataaggcaactgaaggaaagggagaaacattcctaatgagataggggagcaaaatgaaaccagtttgggtttggagcagattgagttggagtctgtcaggcctctgagcccaagctaagccatcatatcccctgtgacctgcacatatacatccagatggcctgaagtaactgaagaatcacaaaagaagtgaaatttaaatggcctgttcctgccttaactgatgacattccaccacaaaagaagtgaaaatggccggtccttgccttaactgatgacattaccttgtgaaattccttctcctggctcatcctggctcagaaagctcccccactgagcacctcgtgacccctgacccctgcccgccagagaacaaccccctttgactgtaattttcctttacctacccaaatcctataaaacggccccacccctatctcccttcgctgactctcttttcggactcagcccgcctgcacccaggtgaaataaacagccttgttgctgacacgaagctgacacaaagggtggtctcttcacacggacgcgagtgaaagagtccttgtaggataaatgctaacatggaagcccctctggtttagtcttactaggaagattcatttgagttaacagaaaactaaattatagactaaagctgaaaaattataagattgtgctgtgtttttgttttgctttcttttcttttcttattattttttattttgctttgttttatttttatttttattgtctcctacttcagttgctttattgaatcttctcttgtagacaaataagaattttataattgtttggatttaaatggttattttcaaattgcttaagggtattagaaaataacttctttccttgcaattttttaaatgtccctttctaattggttacatgataatacattcacacaacaaaataatatgcaactgtttaaaacagtttgtattaaaaaaatttagtaaatggagcaatagtcatgaaatactccttagcagaaaaaaaggcaagttacaaaatagttatatacactatgattctaattttcataaaaatatgtgtgcatctgtgtatgcacagggacaaatggaaagcaaaacagcaaaatataattatgtctatctctaagtgctgggatttgggatgatttttttaaattgtcttgttgtgtttttatgcatttgctaaattcaaaacaatgaatatttaatatactagagtttaaaaattaatacggtttccaaatgttttgtcttataaatttattctatacttccagtgtcaaaccttaaaactgaaaataaattcaccaagtcagcagaagttatctttgccttgtgggaataagagtaatacatattatttctttcttttgttaattgtttccataatagaaaggttaataattagaaacgcttttagaaagaaatgttttcagatctcatggaagatgcaaaaataaaaaaggaaataggaggaaacatttatttccttcctctgtcccataaaatttcactttcaggaaagggcctgatgttagtcatttgcacctccatgtgaatttgacacttcttccccagaggtatttacctacctgttatgctctctaattaggaggaaatctgagttctataaagttcagatgtcctgtggtttagcccacctacttcctcaccagactttcagaaataacagtttagtcctcaaaggagatcccttcttcatgatccatccatccatccttctaccagcgactaatagctctgactctacggtttcctcttttggtgatcrcatttccctcatatttgggatctctagtgttgtgtgtgagatttcctggctagtaaactgtttgcgatacagagccacttaataagaaaaaccagagcagcctccagtggctgagatgtgaattcctcctctctttttctttcccccagccctttttcgttcctgcttttttttttttttttttttgagacagagtctcgctctgtcgcccaagccggcgtgcaatggcgcaatctcagctcactgcaacctctgcctcccgggttcaagcaattctcctgcctcagcctcccgactggctgggattataggcatgcgccaccacgtccagctaattttttttttaattaaaaagtatactttaatgtcgaaaatgcaaacttggggaaggcagaaagatcacacacaaggctgtcacttcacacttggagggttgcacagtggcagggcagaggcactcctcacttcccagacggggtggtggccgacgcccagctaatttttgtatttttagcagagatggggtttcaccatgttggccaggctggtctcatactcctgacctcaggtgatctgcccgcctcggcctcccaaagtgctgggattacgggcctttcttatttttttgaagcagagacggagtttagctcttgttgcccacactctggagttcaatggcacagcctcagctcactgcaacctctgcctcccaggttcaagcgattttcctgcctcagcctcccaaatagctgggattataggtgcctgccaccacacccagctaattttcgtattttttggtagagacagggtttcaccatgttggccaggctggtctagaactcctgaccccaggtgatccgcccacctcggccacccaaagtgctgggattacaggcataagccacagctcccggccttccctgctttctttcttcctgttcatttacccctccaacaggtcccagattttctaagtcaacccaatttcaaagatcctgtcccattatcttcttccatacactcatgcctttgtcagataatatgttcagattcttagttcagaaaatgtggtcaccatagatgacctcttcaaattattcctaatacttgcctcatttcctttatgtcaacttaaatgaaaggagactcaagacatgatacacatcacacacaaaaaataaaggagtgaatgaacaaataaagttttcatgaggacaatgttagtatatgcttacacacagtggggtaatcaaaatagtcatttgttgagtgcttatcatgaaccaggtactgtggtaatgccagaggtgtttgaaccaaagcaactccatcttgaataggagctaggtaaaaataaggctaagacctactgggctgtgttcccaggatgttaaggcattcttagtcacaggatgagataggaggtcagcacaaaatacaggtcacaaagaccttgctgataaaacaggttgtagtaaagaagctggcaaaaacccaccacaaccaagatgatgacaggagtgacctctggtcgtcctcactgctcatatgctaattatagtacattagcatgctaaaagacactcccaccagcgccatgacagtttacagatgccatggcaacgtcaggaagttagatgtttagaccctatatactctatatggtctaaaagagggagaaaccctcagttccgggtattgcccacgcctttcccagaaaactcatgaattatccaccccctgtttagcatataatcaagaaataactgtaagtattcttagcccaccagtccaagctgccactctgcctatggagtagccattctttcgttcctttaccttcttaataaacttgctttcatttactctacggacttgccccgaattctttcttgtgcgagatccaagaaccctctgttggggtctagatccagacccctttctggtaacaataaaggatttacatattttatttaatttaatcatcacaagaagtcatatcacagtctaaatgaacaaattgagatttagagacactcaggcagagagccagtattcacactcaggtatctgactccaaagcacatgctcttaataaatatgctttactgccattgaggggtaattttggaggagcctgggacaggcttactgaaccccaccactcaccttcaaaatatgtccttaaattagctaaaccacttcaatttggtttgtttgtttgtttgttttttgagacagggtcttgctctgtctcgcaggctggagtgcagtggtgcaatctcggttcactgcaacctccccctcccaagttcaagtgattctcctacttcagcctcccaagtagctgggattataggtgtgtgccaccacgcctcgctaatttttgtatttgtagtacagacagcgttttaccatgttggcaaggctggtctcaaactcctgacttcaggtgatccatccacctgggcttccttccctaagtgctgggactacaggcatgtgccaccacacccagccataacccctcaatttgcatagcactttaggatgtgtgcatgcctgcgtgtgcgtgtgtgtgatccataagtctcataacagccccgagacatcaacagggcctggtggaatattaattctccatttataggagaggaattaaggcccagtgagattaagtgatttgtcacaggcagcgaaaaaggcctggaaccaatgttcaaacactgtgttactttctcgacttctgctttcctatgctctgaaattccctttccagctacaaaacatttcattccattattaaagttctagatgccagctgaactttaaggaaatgattcactgtggatagctgagacttctacatagctaaggacgtgcttctccaccatccatttccactccttccrttatccctttttctcacctctgtctgcctctgttgctgtgaaaccatttggaatcgtctatttacatgactgccttctacggtgagccacaatgcccacctttatccacatggctattctagctactggagctgggcgtggtggcttgcacctgtaaacccaacactttgggaggccaaggcacaaagatcgcttaagcccaggagttctgggccaacctgggaaacagagcgagaccctgactctcaaaaaaaaaacaaacaaaaaacaattagctgggcatggtagatgatggtgcatgcctgtagtcccagctactcaggaggctggggcaggaggacgcttgagcccaggaatttgaggctgcagtgagctactgctccactacacttcaacctgggtgacagagaaagaccccgtctctaaaaaaaaaaaaaaaaaaaaaaaaaatttaaataaatgaaattaaacacataaataaaaaagaaaagaaaatattctagccactgggacaagttccctagcagaacacactccataagcaatcgcaactcagactgggggcagggaggtggaaagtggggaacagtgggtctatgtttctcatgggtacatgggaggcattgcggtttcattatctccttcaacagttcatccagcacaacatattacacagtttcttgccttcttagaaataaaggagctgaatttaccctttgggtgacaacacaaaaatataataaacaaataagagctaatatttattttgtgcttaccatatgacagacactgttctaattgctttacatatataaattcattaatcagtattaactcattcattccattattttgcaaagctgtaaaacagcaatgctccaggaggtattgaaggatttataattatttctacctttttttagttcttagatctctcccttttcctgcaacttccatttctaatagattgctaaatactacctctccagatttctgatttgcttcctttaatctcctacagttttttttttttttttttcttgagacagggtcttgctttgtcgctaggttgaagtgcagtggcacaatcatggctcactgcaacctaagcaatcctccaacctcagcctaccaaagagctgaacctacaggcacgcgccacgacttttgtgtgtgtgtgtgtgtgtgtgtgtgtgtgtgtgtaaaggcagggtctccctaaattgcctgggctggtatcgaattcctggcctcaaggtgtcctccagcctccgccttccaatatgctgggattacaggcatgagccattgcacctagccctaatctcctatagactcagaaggataaaccaatagctttggaattacatctagaaaaatgtaactatgttcatgtgtgtgtgtgtgcatgcgtgtgtgtgttttgagatgcagtctcattcttgtcgcccaggctggagtgcagtggcacaatctcggctcactgcaacttctgcctctcaggttcaagtgactgattttcctccctcagcctcctaagtagtgggattacagactccgccaccacgcccagctaatttttgtatttttagtagagatggggtttcaccatgttggccaggctggactcaaactcctgacctcaagtgatccacccacctcggcctcccaaagtgctgggattgcaggcgtgagccaccgtgcccagccagaaaaaggtaactatgttctgataaggacatataaataaaatatattagtaataatacatgtgtggtacccaaatagaaatatacagtatatacaatatactcaatgtatctatttcatttattttgggaaccagagtcttttttttttttttttaagatggggtctccctctgtcacccggctggagtgcggtggcacaatcacagctcactgtagcctcaacctcccagactcaagcaatcctctcaactcagcctcctgagtagctaggaccacaggcatgcaccacaatgcccagctaatttttatttttgtagagatgggggtctcactttgttgcccaggctgacctcaaacttctgagctcaagtgatcctcctgcctctgcctcccaaagtgctaggattacaggcatgagtcaccacacccaacctagagtctttatttatttatttatttatwcatttatttattttttgagacaaagtttcgctgttgtcacccaggctggagtgtgatggcacgatcttggctcactgcaacctccacctccagggttcaagcgattctcctgcctcagcctccctaatagatgggattacaggcacccaccaccatgccagctaattttttgtatttttagtagagatgggatttcactgtgatrgccaggctggtctcgaacccctggcctcaggtgatcacccacctcagcctcccaaagtgctgggattacaggcgtgagccactgcacccagcagagtctttatttttaacgttttatgatgaaataatttcaaatttgcagaaaaactgcaaaaacagtacaaggaacttccatatacatttcaccaaccttttactatctctagctagaagtatcccaacgagttcatgagatacaatttctcaagatccctggtaaagaatgtggccattataaagatctttaatctgctgtacatttaatcccaaacttttcctctcccatgaataattaaaatttcgctaatttaactttcgtgacctattttgaatgtggaatcataaatatggagaagccctaatgatatcactgagaccatcaaccagatgtatgacagaagtgaaactactacagactgaggaaaatcaatcatggcttgaagctataccatttatctattaattaaaaatataggccaggcacggtgactcgctcctgtaatcccagcactttgggaggccaaggcaggtggatcacctgaggtcaggagttcaagaccagcctggccaacatggtgaaactccatctctactaaaaacacaaaattagctgggtgtggcggtgcacgcctgtaatcccagccactccggaggctaagcaggagaattgctttaaccggggcggtggaggttgcagtgagctgagaccatgccatgacattgcactccagcctgggtgacaagagcaaaactctgtctcaaaatatatatatagaaagagagtgagtgagagagagagagagaatgagctaggaccattttgtaacagacacaacactgcttgaagtcttttttttgtctactgttacactttaataaggaagtatatctgacctcatcaaagataaaggccactatcataaacttttttttttttgagacggagtttctctctgtcactaggctggagtgcagtgtctcgatctcgattcactgcaacctccacctcccgggttcaagcgattctcctgccttggcctcccgagtagctgggactacaggtgtgtgccaccatgcccagttaatttttttatttttagtagagacaaggtttcaccatgttggccaggatggtcttgatctcctgaccttctgatccgcccgcctcagcctcccaaagtgctgggattacaggcgtgagccactgcctgtagcttaggcattgtattttgcatgtagtagacttttagtagttgagtagctgggactacaggcacgcaccaccatctaccatgcctagctaattgtttttcgttttttgagagccagggtctcactctgtttcccaggctagcccagaattcctgggcttaaaaaatttttaaacttttttaaaattcttaattcaatctctaaatttccctcaaatattttcttctgtggccaaattacaaattatttaagctctttttcagtgaccaggaatttttctaatccttgcaatttgcattatgaataaagaagactggagtgggtaagccataaaacatcactcaaagtctactacatgcaaaatgcaatgcctaagctaatgccatattacataacaggctctaataaatggggatttgagacccaagctcaaggccagcccctgtggctccaggacacaagcctgctcctgtagacccagcctccaggcccacctcagcacagccccgtggcctcagactccaggctgaccactgcagatccagcctcctggccagcccctgcaaacccaggcaccaggccagcacctgcaaacctgggctctacactagaccctgcagacccaggctttaggctggcctccatggacccaagacctaggtgtgcccccacaggctcagactccagaaacattcttatggacttggacatcaagcctatcccagtgccaggccagccctcacagactaaggctcaaggcccactttggtgccaagtcagcttctgtggactcacagaaggcttcaggtcagcacccatggatccaggatccaggcctgtccttgcagatctaggcttcaggcccaacctcagagaatcagttgacacagcggacccaggctccaggcccaaccccacagacccaggcatgatgcccaggccctgtggacccaaataccaggccagtctgccttaggcctccagcagtaagcctgccatgatggcccaccaagaaactctggacaggctgactggcaaatggcttttcctaacaaagtcagcctgtaaagattaaaataagtgggtgggcgcggtggctcatgcctgtaattccaacactttggaaggccaaggcaggtggatcacttgaggccagaagtttgaggccagcctggccaaatggcaaaacccaatctctactagaaatacaaaaattagtcaggcatggtggtgcatgcctgtaattccagccacctgggagactgaggcatgagaattggagaagtggaggttgcagtgagccaagatcacaccactatactctagcatgggtaacagarcgaggctctgtctcaaaaaaatgaaaagatcagaatagatgcatgtttcttcaaatgcgcagacaccaacacatggccatagaaactcaaataatcagggaaacgtgacaccaccaaagtttcaaactaaagcaccagtaacaagaaatggaaatccacaaatgacctgacaaagaattcagttttgacacaactcagtgtacagaaaacacaagagtagagaaaaaatgtaaatgacactatgatgaaacaaacaagacaagtgtatgggacatcctttaagacaactggccacttacatctaataagtcaatgtaatggaagaggaacatggtagagaggttatattctaaattcaaaagggctgggcacagtggctcatgcctgtaatccctgcactttgggagaccaaggcaggcagatcacctgaggacagaagtttgagaccagcctggcccctggccaacatggtgaaacctcatctctactaaaaatacaaaaaattagctggtcatggtggcacatgcctgtaattccagctacttaggaggctgaggcaggagaatcacttgaaccagaaggcagaggttgcagtgagctgagatcatgccactgcactccagcctaggcgacagagcaagactctgtctcaaaaaaaaaaaaaaaaaaaaaaaaaaaaaaaaaaaaaggactgcatattaaaaaagattaaggaattattatcaatttccttaggggtcataatggcatagtggttatatatgagaatgtgtttttttaggagatacataatagggtatttgagatgaaagtattttgggctgggcgctatgacacgtgcctgtagtcccagctactcaggagactgaggcaagaggagtgcttaaaaccaggagtttgagtttgcagtgaactatatggttgcaccactgcactccagcttgggggacagagtgagaccctgtctcaaaaaaaaaaaaaactgttcgaattagtgatcatgacatttaaaaaagaattaatgtggccaggcacggtggctgattttataatcctgtgtgctcagaacgttgaggcaggaggatcacttgagcccaggagtttaaggccagcctgggcatctctcaagaccccatctttagaaaaaaaaaaaaaaaagaaaagaaaaggaagaaagtatttttgcatctgcaagttagtttcaaaaataagtgtgtatttatgtgcatgtgtctcttataacagaagaaaattagaaataaatcacacatatttacataaatacatgtaaatcacataaatatatgtgatttatatacatataaatatatgtgtatatatacagtcaccaacttacaatggttcaacgtaggatttttcaattttacaatggtgtgaaagcaatacacattcagtagaaactatattttgagtacctatacaaccattctgtttttcacttcctttttttttttttttttcgagatggagtatcactctggcgtccaggctggagtgcagtggaggcaggcggatcacctatggtcaagagttcgagaccatcctggccaacatggcgaaaccccgtctctactaaaaatacaaaaattagcttgcatggtggcgcctgcctgtaatcccaactactcgggaggctgaggcaagagaattgcttgaactcggaaggcagagattgcagtgagctgagattgcaccactgtactccatctcaaaaaaaagaaaggaaggaaggagggaaggaaggaaggaaggaagaaggaaggaaggaaggaaggaaattcaaattccaaaatagcttcctgaagtgatttcttggccggccaagaggaaaaaatgaaaacttaaaatgttctttctccttaaatcacaactccaaactgaagagtctttatcctactcttccttatcctgcatcttatgttatttaaacctccctctgccccatctttttcttttmtctgttcccctctttttcctagctagctagcaaccctcaaaactcaattgcctcttaaaattaaacttttctttgaacacaaaaaagttcttatggttgattttaagctcttatcttgcttttagttgagagtcattgtcaaaatctttagaaaggctagacaggatagagagaaatagcaaagaggaaagaaaaaaatatttgatatgatctttccaaccaggggaattctaatctatctttctagtgatagaggtattcattttactgggactgttattaaagagctttacagagccctgacacatttagatacttcactgtcccatatcactcccaatattcaggaaagatagaaagaaataaagaaattctaaaactcaaattaccaaaattcttcaagactctcaaacttctgtggcctaaggtattgccgttggctttaatgttaatgagatcgactgtttctggggcttagcaactccacccatgagttagtaacaggctggctcgggagtctagaaagtttacctctaaatgtagacattaccctgttccaagaagacatggtcaactgttttaagggactagcacaatacacccatttttatcatcaataggtaggagaagctgttcttcaactttatcctaaacaacccttgcatgacttaaaatctggagacctgggctgggcatggtggctcatgcctgtaattccagcactttgggaggctgaggcagaaggatcacctgaggtcaggagttcgagaccagcctggccaacatggagaaacctcatctctactaaaaatacaaaaattagccaggcatggtggcgggcatctgtaatcccagctactcgggagactgaggcagaagaatcgcttgaatccaggagggaggtggaggttgcagtgagccgagatcttgccactgcattccagcctgggtgacagagctagactccatctcaaaaaaaaaaaaaaaaaaaatctggagacccggttttttggaacagacttcagaaaaaaacagcctttgaaccatggtggaaatgaccctatcacgtgctgttaacaactagcacagcagcaaaactgtaaggtgttgatcctccagttcatgcctgagccacccccaagatgactacatcctaaatccagaaatctgtgaatttgttactttttgtgaaaaaggggactatgaagatataattaagcttaattatattaagattaattaccttgagatagaaagatgattttggattttccaggtggaatcaatgtatttacaagcatccttataagaaggaaacaggagtttcacaaataaagaaaaagcaatgcaatgagagaagcagaaaaagagaaggatttgaaaataccatatggctggctttaaaatgaaggaatggatcatgagccaaggaatacaggtgacctccagaagccagaaaaggcaagcaagcagattgcctcctaagacctccagaaggaaggcattccatggactgattttagatttctgacctctagaaatgtaataaaataaatatgtgttattttaagccataagcccatgagaatttggtacagcagcaacagagaactaagaaggctgtctctcaactgaagaaacataaactatcccygagttattggaagattgtctttatcagagaccttaacctgagcattcttaggaacctacagaaacatacagtctttgggaagagataacgtttacccaacaagacgactgtgggggatatagacattcccacctgaggtccacgcactaagaccacagattgctactctttaatctacattcttttgttttttgttttcctacccctcttcttttctctgttgctgatttgaggctattttcacctatttattcattagacccctattctttttttttttttttgagatggagtctcgctctgttgcccaggatggagtgcagtggtgtaatcttggctcactgcaacctctgcctcccaggttcaactgattctcccacctcagcctcctgagtagctgggattacaggcacccgccatcatgcctggctaatttttgtatttttgtagagacggagtttcaccatgttagccaagctggtcttgaactgctgacctcaggtgatccacccaccttggcctcccaaggtactgggattacaggcatgagccaccacgcccagccagacccctattcttaatattgttttgttttgttttgttttgagacagactcactctgtcgcgcagactggagtgcagtggtatgatcttggctcaccacaacctccgactcccaggttcaagccagggatgctgagaaacaccctacaattcataggagagccccctcgctcagcctcaactccaagtgaagttctgctgtagagttctgacactaattacccagagttaatgaagacatcacagattagattcaaagtcctccacaagactgctctacctgcagacaggagctgtcagtctctggggtccccaggcctcctacacttctgattgtctataaatgtaggggctttcctgacctcctcaaattcaggaattcactagaatgagtcacagaactcaggaaagtggtatacttacaattacttttattgtaaaggatacacatagggcaagacccaggaaggagtgatgacctaccatgcccttcccccatagcatagagtgcatttcccttatagtgcatccatgtgtccaccaatcaggaagcttctctgagcttcagtgtccagagtttttactggggttacattatgtaggcatgatagattaaatcattggcaaaatgatcaagctcaatctccaacctctctctcctttccagagattgtgttaactgaaagtcccaatgctctgcctatgtgtttggtctttccaatgaccagattgcatcctgaagctttcttgggtcccaccctgagttgctccattatcataacaaagatacacttatcattctgaaatttcaagaatatctcctctcagaaccagggataaaggccagtcaaagtttttattatggaayatccacaacaagaaatgaccaggcctaaaatgtcaataatgcaagtttgagaaactctgctttaaaactatctaatgaccctgatactacagatttctttgtctggtgccaaactattcttgatgagcagtgtcagaatgttacaaccattagataatcttgtagggtattttggccaaaaatagattattaagtggcctccaatgactatattgaatttgtggcacaaagacctagtaaccattttctttaagctggacagaaacatattaccttgatcaaccaatgcctgctttcagaagagacactaatgtcacctaggatcaattttggcttgatttcttctctagaaaaaaacagatcattagattatttaattcaagtagaagagagactaagcattgactttaattaattaattaatttatttattttgagaaggagtcttgctctgttgcccaggaaggagtgcagtggcacaacctcagtttgctccaacctccacctcccaggttcaagcgattctcctgcctcagcctcctgagtagctgggattacaggcacgcgctaccatgtccggctaatttttgtatttttagtagagacgaggtttcaccatgttggtcagtctgtcctcaaactcctgacctcgtgatctgcccacctgggcctcccaaagtgctgggattacaggcatgagagactgtgcccgtccacattgactttattttttaacctaaatcctacccacttaaggagaattctggattgttttctttcttctccaaacctcttcacttcatgcatcacaatagtcctgaaaagtaaggtgaatcctagagtgtgacagggaagctagacaatgccatcaaggctatgggagtactcacctgagaagttcatgaaattggaggtcaggcatggtggctcacacctgtaaacccagcactttgggtggccaaggttggtagatcatctgagatcgggagttcaagaccagcctggccaacgtggtgaaagcccggctctactaaaaatacaaaaattagctgggcatggtggctcgtgcctgtaatcccagctactcaaaaggcagaggcagaagaatcgtttgaacctggaaggtggaggttgcagtgggccgatcctgggtgatgcagcgagacaatcctgggtgacacagtgagactctgcctcaagaaaaaaaaaaaaagagagaaattgaacaggcaggggtgcaaaatgaagatgactcagatttaatattgacctctcataagaaatagttattcttttaggggaagaatgttgtacttactgccctacagacctctggaatctttcctataatagtcaatattttcagaaaaattaggtaatttggctaataataccaaatttgattttgtgggatcctcagactagggatgtgatctgtggtcttgatttactttgggcacacttggctcctggttgagaagtagaagacaaactctgaatatgatcctttgtttagtacatttgtctgtgttgcagtgttcagatggtgatctccacagtcttaaatgctgaggtgcaatagctgtcccaactaataattcaacaaataatcatccaaaaaaacagcaggaaaaccttatgctaatggaggttgaaacatgtacctttggaatcttggagattgaacaagccattcccataaacttgatacataattgtgatgcctcaaatcagcaaggacctggattgatcaaatcccaaatactaatggtctatccttcagctcagaatgaaaaatggtaaaaaggagaaaaataaaaaacaaaactatctacccctacatagtttgctgtctgctttaacaggactttaccattccattgtcttcatttgcataactttgctaccccaagagacttgtccaagaaggtgaaagttgcaaataactttctcgttcactgtaaaaaattatcaaaagatccagcaactccaaaaagcatcagtatacagtttatatcccaagactctttgagctcctcttctcaaaattcttaccttgctgtttctacaaattctaaactattgtacgatgataattactcaattctaatgaagtctgtgcattgaaagacccatcctaaaccaaacttcaaaatatcaataaatcagatcttgcaattccttctgagagttgctatctgcaaagttagcattctcacttactgtgataaacaataaactcagctttgtgatattaaaaggttatcctgatgatacttgggaagccagcattccacaaggacaatgagaaaattctacagccaacataaagggaaggcagattacaacaaagaaatggtaagaaccccagaagaaaagacttctcattggcaaaaataaatgcggaaaacaatgaggtaacatctttgatgtgctgaaaaacataattgggagcctaaatttctaaactccagcaaaatgtcattcacaagtcagaaaaaatttaaaatttatagatattcaagcacttaagaatttactaacaacagtcctttacaaaaagaactactaaataagaaaataaacctacaaggaatgaacagtataaagatatatataaaaatgccaaagaattctttaaaaatgctggtaaatctaaataaatactgagtgggaaaaaagttagaatagccatcattttttgagtgttttcagaaaccagctggctctcccagttgaagatagcatattaaaagcaagcatttaattctgtttcttcctgaaacttcataaaaatgacagtagattttatatagacagatataagtatctatatatacatatatttatccatatatatttatacatatataaatgtatgtgcatatatatattccatgagaatgaaaagaacagaaaatcttttaatagcaacaaaatgttggaggctgaaaagcaaaaagaaagtcacttggggaatattgacaatcaatgtgatttacaccacagacatatccaaaaggctcaggaactggcgacagtgttacctctggaagcacatataaggatgtgtagcccagacttatctgcaaatctgtttaaattaaacccccagatctctaatcactgcccagtcaggcaactgttcctgccctacaccagcatatgattgtaggtttattctttgaaaaagtaaaacaaaggatctcttgattagggggatactaggcatatttgagcataatgttattctaaagcaggataccccaaaagataaataaataaaaacttaaaaataaaaaccagagaaggcccaggaaacaggacattcagaggcaaaaagaattcccggcatgagagtaaaagattctaatctccagggtgatcaagctttatactagtgtagacggcaaccagtccagatgagggtaagtcagaaggctccagaaaggacttaatgaaaaaaatgatattaagaaaacaactatatttaccaagaaaacatttaagcaattgggaaagaatatgggggctgaattactgagacattcattgaaaattaagcgaacaaacaaaaaataattatttactgatgggaagacagaacattatgcaggagaagaaatcatggcatatgacatgattcaactgtgaataacaattgtatagtttttaatattctaaacactgaatatttatataacaaaattatgatatagttatataagaaaaaataggtggctgagcatggtggcttatgcctgtaatcccaatattttgggaggccaggacaggaggatagcttgaggccaccagcccaggcaacaaagcaagaccatgcctctataaaatctaaaaaaaaaaaaagaaagaaatatatatagctggtcacttgtagtaccagctacttgtgggggctgaggcaagaggattgcttaagcctgggaggtcaaggctgcagtgagccaagattgtgttactgcactccagcctggatgacaaagcaagaccttgtctccaaaaagagaaagagagagagggaatggaggaaggaaggaaggaaggaaggaaggaaggaaggaaggaaggaaggaaggaaggagaaggaaaaggaaggaagggaaggaagagaggagggaggagggagggagggaggaagaaggaaggaaggaaggaaagaagggaaggaaggaagggaaggaaggaaggatggaagggagaaagaaagaaacagaaaaaggaagaaagaaagaagaaagaaaaaaagaaagaaaaagaaagagaaagaaagaaagaaaagaaagaaaagaaagaaagaaagaaagaaagaaagagaggtgcagagaacaataccccaaagtgtggtgctttggcatgctgagcacttttgaattaaaggaaattagaaggcctcaggagctgcctcagaacaaaggacttcctaaccctctcttattgccccccaacccaccctccagcacagggagagtctctcagaaattttcttatctgaataagatgatattttccaaaaaaaatgcaattgtcttaagaccccctccctaagaatctcatcaaataaccaggaaagattaaccagaagagaagagacaagagaagaaacaagaataaaagtcatcaccactctcagacagacttctcgtctattcttctgagggcagctctgagagattacctaagagactttacctgcataataagacaacctttgatcacagtgtagttccacccctcacctttccataacttaccaatcccattcagtttactcacccaatcattttaaaactattgtctgctctttggacccattcatttcccctgaaaattatttactactcttcacaattgctcacatttcccccacctccctctcccctatgaagagggtatgtaagtttcaaccatctggggctgggtgaggtggctcatgcctgtaatcccagcactttgggaggccgaggcaggcagatcacctgaggtcagaagtttgagacgagtctggccaacacgatgaaaccccatctctactaaaaatgcaaaaattagccaggtgtggtggcacctgcctgtagtcccaactactcaggaggctaaggcaggagaatcgcttgaacctgggaggcggaggtggcagtgagctgggatcgcaccactgcactccagcctgggagacagagtgagagtctatctcaaaaaataaaaaataaataataaaaataaagacttacacagaagggagataaagatagaaatctgcatcccaaaacaggaatgatatattcttttcaagcatgtatggaacatttactaaaattggccacataagaagccactaaaaaagtctcaaccaatttcatgaaactgacattttaaaattaattcatggccaggcacagtggctcacgtctataatcccagcactttgggaggccgaggcaggtggatcacgaggtcaggagattgagaccatgctgactaacacagtgaaaccccttctctactaaaaatacaaaaaattagctgggcatggtggcgggcacctgtagtcccagctactcgggagactgaggcaggagaatggcatcaacccgggaggcggagtttgcagtgagccaagattgtgccactgcactccaccctgggtgacagagcgagactccatctcaaaaaaaaaaaaaaaaattaattcgtactgattgcagagaatttgggaaatatagacaatttaaaggacaagattagaaatggtctgaggtggggtgtggtggctcacacytgtaattccagcactttggaaggccaaggtgggcagatcccttgagctcagaagttcgaggccagcctgggcaacaaggccagacccccatctctacaaaaaatataaaacttagctgggcatggtggcaagcacctgtaatcccagctacttggggggctgaggcaggaagatcgcttgagcctgggaggtcgaggctgcagtgagccaagattatgccactgcattccaacctgagtgacaaagtaagacccagtctcaaaaaaaaaaaaaattatctgaaatctagccaagcatggtggctcccacctataatcccagcaatttgggaggccaaggtaggaaggtcacttgaagccaggagttcaagaccagcctgggcaacatagagagaccccatctatacaaaaaatcataataataataactgggtgtggtggtgcctccctgtaatcccagctatttgggagcctgaggcaagaggatcctttgagcccaggagattgaggatgcagtgagccaggattgcaccactgcactctagcctgggtgccagagcaagtccctatctgaaaacaaacaaaattatctgaaatcctgttctggctacagtttacctcttttagtatttgacatgcttcttttcagtctttctcaagatgtgtatttaggaattttttttctatctccttgttgttgcaatactgagatttactgtatattcgttttgtatcctgttttgcaaataataattctactttattaccattagaggagcactagtgtcccttacaaagttatgctaatggaaagaatttctgctcttgcaacagtgtgtggtccttagaagaaagttaatatttaatattaacagtgttaagatggtttcacccccaggtaaatcagtaggaaaatggaggggaatgcattggtggaaaggtgaaggacagaagtggagttgaagcaaaaccagattctcactctacrcaaaagaccagcgtgcctctctccccagttcagagccagcaagagccccactaacaccaccacccgcttggtacctgaaagaactgacacaaagcacacgcaaggacgtggaggaaagcaggagttaaacagtcaacaaaaaaaagctgaagaaggtttgggactgggaagatgcagatttagaaaaataacattatgaaaatgggcacccttgaagaacattctgtgcccctcgtccccctcaccttatttattccatcaccaaataaagtcacagctgtcggtcctctgctatctgaagcattaagtgaaagtgctgtttcacccagcagcagatttcagggtgcaccagcccaggagggatgggcatggcggtatctggtgtgtggttgggaggaagcgctatcctctacttaggaggaagaattacagagcagcagggagcttctccagagattgaagaggctgctggtcccaaccttctgtacgcatcgcacctcgcagatcctgccacggggagccacatccccgaagggacaaagccmggagagtcgcttgagaatgattcatgccatttctgttaaatgcctggcacgcagcaggacttgatacattttaacaactactcttctattttctttaagtctactacagtggtttgaggcacaggctttggtttaaaatagttctaggttgaaatccatgctcaaattctactcattakctctctggcctcagagcggatttaccaccagcactctaaacctgtttcctcaacagtaaaattgaattaattaaatctatttatgggattgaattcgctaatgtatgtaaagcccagcccataattaaatggtagcagttagaattgacctttaacatatgccatattttgatggtcattcttgttttttcttttttcccacattctatttttgaacacctccctgtctgtatatttatttaatcatttctttcagaactattttgaaatctatttttgtcttttttttttttttgagtcacccaggctggagtgcagtggcacaatcatgactcacggcagcctcaaactcctgggctccagcgatcttcccacctcaccctcctgagtagctaggactacaggtgcttgccaccatggccagctaattctttattttttgtagagtcatggtctcactatgttccctaggctggtctccaactcctggcttcatgaaatcctcccacctcggtccgccaaagtgttgggattacaggcatacgagctgcagttcctggccctatctttatctttccatagccttatttttccatctctaatctcttcatcccagcatagtgtatccattcgtgcttctagtaygggcaatatgaatttaaataagtgtataaataagtgaaacaaatatagctcataggtcctttgatggaagtgtatatgagcacaaagaaggaaacggacaaataagagtggatccaggctgggcacagtggctcatgcctgtaatcccagcactttgggaggccgaggcaggcagatcacttgaggtcaggagtttgagaccagcttggccaagatggcgaaatcctgtctctactaaaaatacaaaatttagccaggcacggtggcacactcttatatcccagctacttgggaggctgatgcaggagaactgcttgaatccgagaggtggaggttgcagtgagctgagactgagccactgcactccagcctgggtgacagagcaagacttcatctcaaaaaacaaacaaaaaaaagagtggatccaggccgggcacggtggctcacacctataatcccagcactttgggaggctgaggcaagtagatcatgaggtcaggagcccgagaccaacctggccaacttggtgaaaccccgtctctactaaaaatacaaaaagttagctgggcatggtggtgcatgcctataattccagctactcaggaggatgaggcaggagaattgcttgaacccaggaggcagaggttgcagtgagctgagatcatgccactgcactccagcctgggcaacagagcaagacttggtctcgaaaaaaaaaaagagtgaatccaaaaaggctttacagaggaaacgattctccagcctagtcttgaaacactgaagtttcaaataagatagccctgggtttgaacctgtgtcctgccacacactagatgtggatgagttaactaatctgaccaaatgtcagtctctctcaggtattcaatcagaatgatgacaccaatttaatatatgggtgagataaaatgagctgattggcagggcatggtggctctggcctataatcccagcactttgggaggctgaggcgggcagaccacctgaggtcaggagcttgagaccagcctggccaacatggtgaaacctaatctctacaaaaaatacaaaaattagccaggtgtggtggcatgcacttgtcatcccagctactcaggaggcgacacacaagaattgcttgaactggggaggcagcagttgcagtgagccaagatcacaccactgcactccagcctaggagacagagcaagactctgtcttaaaaaaaaaaaaaagaaaaaaaaatcgccaggcattgtggcatgcacctgtatagtcccagctacttaggaggctgaggcaagaggatcgtttaaaagaggatggtttaagcccaggaggttgaggctgcagtgagctatgattttaccactgcactccagcctgagaccctgcctcaaaaaaaaatcaaaaaaacaaacaaaaaaacaaaacaaaacaaaacaaaagaaatcaagtgggctatagatcgactcatgaaaatgatcctcacggatatgtcagtccccaggtaatttctataattacccataaacagctgtacacattgtctgtggtgtactttaaactgtattttccccgctttttgaaaaaagtgtaatgcagggttgaaacagaggtcttgtcaaagattgagatcagctttacctacaacatcctctcaacctaccaatcttgaagacttttcacttaaaatgacattgatcttcacctgaggtcgggagttcgagaccagcttggccaacatggagaaaccctgtctctactaaaaaataccaaattagccaggcatggtggcacatgcctgtaatcccagctacttgagaggctgaggcaggagaatcgcttgaacccgggaggtggaggttgcggtgagctgacattgcaccattgcactccagcctgggcaaaaagagcaaaactccgtctcaaacaaacaaacaaaaaaaagatattgatcttgtaagtgctctttcacaattccttttatgataatgttttaactaggtttgcaaattaaatccaaattttaatttggatgcgcaaattaaaatctcaaatttctcaggtcaattccttggggttttttgttgtttgtttgattgtttattttcgcttttgtttgtttgttgagagggagcctcgctctgtcgctcaggctggagtgcagtggcatgatctcagctcattacaacctccaccttccatgttcaagtgattctcccacctcagcttcccaagtagctgggactacaggcgcctgccaccacacccggctaatttttgttttttagtagagatggggtttcaccatgttggccaggctggtctcgaactcctgacctcaggtgatctgcccaccctggcctcccaaagtgctgggattacaggtgtgagccaccatgccctgcctctttgttttaaatgacaaggatttcatttcatatttaaactgctgtaacacaagggacaaggaaaagtgaaaagaattttgtttctctagagaaaaaaaaaggctaggcggtacattaaacttggatggcagcctgtcatggaacctggggattggtcacattggccagtactttctctaacccagagatcaaaacctgatctgccaccactgctgggaatggagtcagtcctggtttcagctatagctgacaccatcagcttcaatctgagccaatctactttctgcctttcttctagtagacagcgagagttcaagccagcctagttctcaacagcatcatctgctaacatttatcatctcccccacttccctctcacacaataaggtaggcactggggaaggtagcacagtccctgccttcaaagtgcttacaatcttggtgcttacaataaaaatgccgatcaagtgaatatgtcactagaaggcagcacatgagaaattaatatgaagatggccggacacagtggctcatgcctgtaatctgagcactttgagagaaggtgggtggatcacctgaggtcaggagttcaagaccagcctggtcaacatggtgaaaccccatctgtactaaaaaacaaacaaacaaagaaaaaatatatacaaaaaattagccaggcatggaggcgggcgcctgtaatcccagctacttgggaagctgaggcaggagaatggcttgaacctgggaggcgggttacaatgagccaagattgcgccactgcactccagcctgggcgacagagtgggactgcatctcaaaaaagaaagaaagaaatatgaagatgaatgttttgagagtctggggaaagtgaagttcactatgagctgagctggtggaaatggcttcctgaatgaaggaaatccatggtgccttctccattttgtgggaggcactggtttagagagtggttaaggacataaactgcaaagccaggctgcattgtttgaacaagctcagctctgccagtaacgagctgtgtgaccagggcagagtacctagcctctctgtgcctaggtcgcctcctccctaaaattaggacaatagtaattatgtctccctcatagacttgtggggagtataaaatgccttaagctaaatgaagcacatggcatataatgaaggctaatgggggcttcggaccattgttctttatgacacggtttcttgagaccgaggcatgtacaagccagtgcacagaatcgtgtctatgtaattagttaattctgtctgggaggagtgtgtgtgtttaagacagtgcctgggatgacttataatgtaatctttaggcaaaacgctttgtaattggtgcagctctgagaacacacgcatgcattccaggcggtgctgctggggctcggcggggccgtgtctggtctgcaaggcgcgcgggctcgtggggggttggctggggagcccacgctgcctggcgactcgggccaccgaatgtgagaccgagtccctttatgtcaccagcgcacacgctgatttgaaccctgcttcgacgtgtgtgtcatggcttaaaaatagctgctaatctgtcaacctgtcttgggcagaaacagcggcggcgacagcagcaggagcgtcatggccgtggcgctgtctgcgccggcgatccgcctttcggactgaggcccagcgcagcgcttgcaaagaggtagaggggctgcggcgggccttcgccttttcagctggctctccacgctggggagaggcgcccagctaggggcgacgggggagggaggggaccgggaagcgggcacccgagcccagcgagccagcctctctctcccgggcgccctccctccgcgcgcggggcccggctgccaggctggcgaggactggggcgacagccatggacctgttacaaaggcgaccgcaggcggagggagggagcggcgggccagggcccctggagccgacggatgggattggagaatgcccagggctgtatccctggacagaaaggggcttctgcatcccccgggaaaaacagccccacggagatccttcttagacctgggctccttcacgcttcccccatcccattcatcatctcgtagacagcagactctctaagaggaaaggttgtattgcaatacagtaatggggtctttaggcctgggtgcaaaggtagaagaagatgatggtgatagtgatggtggtgatggtggtagtgatgatggtgatggtggtggtgatgatggctgtagtgctatatttctgtgctccttccggacccagccattgaaaactctctctccctaaactccctaacatccaatcttccctcaccaatcctggtcctaaaacccctgcttctaatgccttgtaagtgcttggtttctcttggcactggagcaagggagagctgggccctgtctaggggtgtgagatggggacagagcatgggcagggacaaagatggcctctcactgctggtcatagagttgaagtccccctggcaggaggccaggaagggagtggaaggggattctgcaggctccaggacctcctgctttcaaacaggcaggaccacaggtgtgagaggatggggagggagggggaaggggccttgccattgttgcctccctgcctgaaggtcccagggcaagcctcaaacgctggtccttcccagctctgcagctcaacaggtaatctgagacacacctgctaagcccctcgttattgacctcgtgttttgtagggtcacttgactccaacagccatacggttggtaattctaagcctctgagcccctggacctggcaggatccctcatttttccctttccttcctgctttctaggcccccaccacccacccctgtcccccctcccctcaagacacacacagacaaaacactccaaccctgcgtcaattcccccaccatccacctctgtcaccctcccctcaagacacacacagacaaaacactccaaccctgcttagattcagaaattctcacattagagctgagatctgatcagtaatttcctaatgctgatccaaggagggtggtttgcctgttgtgcacatagattggtgccttcttccataagctcatgcattcagcaagtatttattttttgcaaacttactcttcctctttattgctattctccactcaccccatcccacccccaccacacccttcccatagcaggtttatctctgaggcagtggcaggtcacgaaggggttaaagtctaactctggcacagagatggcaggcctgacatgtgtcatggcctcagctgctgttgtctccctgctaattctctttggatgggtctaaaggtacccccaaccccatcccagctccctaggctctctgccgatagccccaggcagatgagactcagattccagctggcaagatccccagcagtggggacaaccacccaagtgccgtgtgtgtgtgtgtgtgtgtgtgtgtgtgtatgcgtgctggcagtgggggtggggtgatgaagctgaaacctagcagctgggcagctccctctccccgtaaacaaggacatgtgactctcccacctcgtttcgtggcagagccaaagagctgagcaaaaggagctgctgcagcttgaagaaaaagccacccctgaaggctcctgccagagccaggcttaccttctctccctcgagaatcttctcccgaaggaccagcccagggaagggaagcagctgctctggactcactcaagtgtgtctcacaccccttcctcttccagcagcagctacctggcaactgaacccatcatcaccacagccactcctgcagctgccacggtttctgccacctctaagatgtgccctggtaactggctttgggcttctatgacttttatggcccgcttctcccggagtagctcaaggtctcctgttcgaactcgagggaccctggaggagatgccaaccgttcaacatcctttcctcaatgtcttcgagttggagcggctcctctacacaggcaagacagcctgtaaccatgccgacgaggtctggccaggcctctatctcggagaccagtatgtatcgggcagactgggcccacggtagagcgtgtgtgtgtttgtgtgtgtaagaaaggagaagggtggcagacaggtatgcagtggtgtcattggttcctggttgaagattgaggggatagggcacatgggccaagagtagaggctgcaggtttgggagagtttggccaggattattgaaatgcccaactctggccagtcacagtgtctcttgcctgtaatcccagcagtttgaaaggctgaggcaggagtatctagagtacaggagttctagaccagcctgagcaacaaaaccagaccccatctctacttattattttaaaataaaataaataaaataaaaatacccaagtctggacagaaagactctgttccagtaataatatcattcatgtatcacatatttattattacatgccagtgctacataccaggcacaatagatgacttctctgaccttccatctattgtgcaatgtctctgggaaaaggcagccactggaagccaggagcagtaggtaggaagctgcagtggtttctcttgagaccaagcaaagcggcagtgcctacagagattctgcaatttgaaggctatggagagaaaaacatcaaaggaagagccatccccacttctctccctcaaagttatacaaggatttcttttgcttctttggtttgttttggttttggtttctttcttttatttttttttggagacagtatcactctgtcacccaggctggagtgcagtggcgcgatcttggttctctgcaacctccacctcccgggttcaagcgattctcctgcctcagcctccagagtagctgggactacaggcacacaccgccttgcccggctaattatttttttgtattttagtagagacggggtttcaccgtgttgcccaggctggtcttgagctcctgagctcaggcagtccacctgtctcggcctctcaaagtgctaggattataggtgtgagccaccgtgcccagcattgttgttgtttttgagacagggtctcactgttgcccaggctggagtgcagtagcccaatctcagctcacagcaaactccgcctcccgggttcaagcaattctcctgcctctgcctcccaagtagctgggcttacagacgcccatcaccacacacagctgatttttgtatttttagtagagacggcgtctagccatgttggccaggctgattttgaactcctggcctcaagtgatccacctgcttcagcctcccaaagtgctgggattacaagcatgagccaccgtgcctggcctacaaggatttttttcacacacattatctctcttaatcttcacaacagccctgtgagataggtatcactctccctgggttacagatgaggagactgaagctcagagaagttgtgcctggccaaggtcacacgggttgtaagtagcagagcccgggcttggaggctcaagttcagtgctctttctgcttaaggagtttgcactggacagggcaactcagtttgccctgagatatgactgtggtgcccaggggtgtctgccaccaagctgaggggtctgggccggatgaacacctgaaggtgacgtcataaaacagggtaaatgtggccgggcatggtggctcacatctgtaatcccagcactttgggatacttaggcggatggatcacgaggtcaggagttcaagaccagcctggccaagatagtgaaaccccgtctctactaaaaatacaaatattagcctggcatggtggtgggcacctgtaatcccagctactcgggaggctgaggcagagaattgcttgaacccgggaggcagaggtggcagtgagccgagatcgcgccactgcactctagcactccagcctaggtgacagagcaagacaccatctcaaaaaaaaaaacaaacaacaacaacaacaacaaaaaaaaacacagtcacagtaaatgtgagccatggaatatctggcaaaaacacaagacggttctgggtgtcaacaagagtagagacataggggagttaggtgtggaagtggatgtcagaaccatactatctcagagtgagcaggaccgatgaaatgagcagaacaatctgcctgacattcatttcccctctgcagcatccatggctacatggccatctcctctttctgcctgaataccccagggacaggaaaaccactctctctcgaggttctccaccctttcctcagctagactccaccattagaatgtacttccttgtatgaaattgaaatcagctggccaggcacagtggctcacgcctataatcccagcactttgggaggcctagataggtggatcacaaggtcaggagttcgagaccagcttggccaacacgatgaaatc

SEQ ID NO: 96997 - DNA, 19258 bp, Homo sapiens
ccccgcccacctcctcccaacctgtgaaaggcctggaaggttctgcgcagacgggccagggcctggcgctcccgggcctgcacacggccatagaggaagtcacatatctggtccttctcctcagcggtcaggtcccccgggctgcgaaggtggaaggccagctcactgaactccacaagcacccctgtcccacgccgcacacctgccggaaagcatgtcagatgcaggcaggcagcgtccagggcggtgtggggtggggagaggcgcacctgtcctgggctcgtggtcccactgcagctggcagagagcctgccgcacagaggccagctcccagcccatggagtccaccagcttgaccatgtcaaactccacggagctgctgccttgccctgggtcctcaggcagctgctgggccaagcacacagccaaagggggacacctgtgcccagggaaaaagggacatgtggccaacagccctgattctccaacctcgtctccaactgggcagggcgtgcttacctgtgggccagggcctggagctgggcagggcccccagggcagttcagacggcaatgggtataggtggtcgccagcagctccagccagtggtgtgggtgcagctccaggtagcacagcaaagtctcgatggctgggggcagagcagggctcagcggacgcggggacagcccctccacacccctgtggcttaccccaggttcctcaccctcctccggcatgtccaaagcctgtacggtaagctgtattgggagtgcccgctcatggcccatgcagacccttctgggtcctggggctgcttggtggctaagctgctcagcctcttgaggggggtacttgggcacaggcctctccccacccacggccccttcctgctccgagggcggcctggtgcaggtgcaggtgcaggctgggaacacgcgctgtaccagcctcttcacagccaggaagtccgtgctgtcggcgtgcacatgtctgcgcagctctcgcaggtcttcgccctgcagggcaactttcatgagggtggggtggaccactgggggctcgagcactggcagtgtggggggggggtgccaacctggggctgcaggaagaggtggcagtgggcaggctgcccgtcacgcccggcccggcccacggcctgcacgtagctctcgaagcttgggggcagccccagatgcagcacagcccgcacatctggccggtccagccccatcccaaaggccaccgtggccaccaccacccgcaactggccctgcatgaaggctcgctgtacccgccgccgttcccggctgcacatgcccgcgtggtaggcctcggctgtggttttgggggcacgacctttggggaagacaggcagatggtcagtgggatgggaccatgtgtgcccaaggtgggtccacggggacaccagctctgtccatgccgcacctccagaccctgggacccaggctgcgtgcaggcaggttcggaggagcgcagcgatccgctctgtgtcctcgcgccggttgcagtaaatgataatggaatcgaggttttgaaaacgtttgccttgcagcagcgtcaacagtgcctgatgaggagcggttggcgtgggcagtggggagtgaggaggggtcggcgtgtgcagtggggagtgaggaggggtcggcgtggggagtgaggaggggtcggcgtgggcagtggggagtgaggaggggtcggcgtgggcagtggggagtgaggaggggtcggcgtgggcggtggggagtgaggaggggtcggcgtgggcggtggggagtgaggaggggtcggcgtgggcggtggggagtgaggaggggtcggcgtgggcggtggggagtgaggaggggtcggcgtgggcggtggggagagaggaggggtcggcgtgggcggtggggagtgaggaggggtcggcgtgggcggtggggagtgaggaggggtcggcgtgggcagtcagcagccagggccctgcagggtccccagagcacacacacccacctggtctgtgtccctgtccatggacacggaaaggtgcaggttggtgggaactggggctggcccgtggaggtcaggctcttcagccacagccaggtgctgtgccacgtcactggcagtgcggcgtgtggctgtggctgtgaggcccaggaagcagtgcacgcccatgcgctcccgaagcacctgcaccagaggcggcagtggtgtgaggccgcccagcccatcccggccctggccgcccaccccagttcacatatggctcaccttgcagacgcgcaggtagcagggccggaagttgtgggaccactgggagaggcagtgggcctcatcaatgcaggcaaaagcaactggaggcagctgtgcggctggagggaggcctcccgcccccaccagtgcctcaggtgtcagcatcagcacgtgtacctgggctgcccgaatctgaaggcagcaagatcagaggcacagcccaggtgcccgcccgctgcctccctcacccctaggcccatgaggcccccaccttctgcaggacagattcccgttgcttcctggtcatgcccgagtgtatgcaggccgccttgagacacggtggcaggccagacacctgcaaatgcaggagcgacagccgtcatacgccagcccagccctggcccttccccaagtcatcccagagctgctgccatgtccatcctagtccctcaggggagaggagaaccaggtcctgggtcctagggctaagggtttagagccacctgtgggccttggcccaggagccccagagcagacagactgaagtagggatggctcctttcccagcacatttcccgtaggggtggctgtggtgcctgtggagctgggctgcctttgacctgctgccaagactgggactgaggccacagacaccttgaagctcccaggggagggggtggttaggggacaagcagcagttgcccttgggagtcacaagtgctggttcttggctgtgtacgtgtgcccagggccctgtgtgcacacctggtcatccatgagtgacagcaggggagagacgaccaacgtgaggcaggggctgcgccggctgtagagcagcgctgggagctggtagcacagggacttgccggcacctgtaggcagcaccagcagcgtggagatgcctggatggggcgggagtcagcagcagggttctgcagcctggcctcagcccagcctcagccctggcagccacgctcaccagacaggatccgcatgactgcacgctcctgcccagggcgaaaggcttggtgccccagctgctccagggcctggaacacctcagccggcgtctctgcagacacagatgttgatcaccatgacttgagtcaccccaacccctcagtgaaggctctgggccagaagctgactgctcacctgccaactgccctgagggccccagggagtagagtggcagcacggtggggtccaggctgggcacctcaggtacaggttgtggtgaaggaaccagtggctcaggcccaacagcatctgtgtcttcctcacttgctggggcaggcaggagagggtagaatgggagctccaggtcgggcaagacaaccactggccacaacctctccttcccccaaagggggttggcagcaggcagtgcccttcctctgggctactttttccaaagcagaaaagagtgacagccatcgtcgtccctgccaccctccttcaggggagctagggtagggcctggaccaggggtacctggaaggcctgttgcttggaacataagtgtcccccaaaagagcactgcgccctctccacagtgttggccggacccaccctccagggcagatgtctcacctggccggggacactgggctgcccagtgatcgaactgctcgttcaggaaacaagactccttggttgtgactgtggcaccaccacccccaaaacactcccctttcttccgccacttctgcttccatgcctggggggtgcccacataggagggtcactgggcgggaaatacgggagggctgaggggagggaaagggaatgcctgtcctggcccgtcgctgtcttacctgcttgcggaggagcctgctacggagtgcccggccccgcacgtagtgtttctgcttcatgttgagccgtacgtaattgcccctgtcatggcgggccagccgagggaagatgtgcaggggggctgtgccctcagccttcccagccctagcttgactggaggggctgagtccgtggtacctggggttcgatgggctgctgcagggctgaggtggctgtgcctgtacaggttcccctggagggtcttcctcaactgctacagccccagccccctccgatgggggtccagcttggctgctctcctgctggacctgtgcggggctctcccaggggtcctcgttccatctccgcttctcgcctccactgctgctgggctgggggctccccacacggatgctgacttcttggaaggctgaagcctctgggccctgggagccagcaccaggaccaaggacagccgactcaccagggatcagaagttgtgattcctctgagcctagatcaggcctgcaggctttgggggcccccagaaaatctgggacctcactgtgacatcgctgtaaccagccaggatctagggagcccagccgctggctcagggatgcctgcagatgctggagccggcctggccttggctggggctcagggagctgtggaggctcatcactgactttttctgcaaaggaggggacaggccctgtacctgggggctttggggtggatgccttagatgaggctcttcctagaggccacggtctgcggcccagggctggtccggcctgggaggggaacaacagaacagcaggaggaactcaggcccctgagctactgtagactctaaaacctacctgagtccccacgctcaattgtagagcaggctaattagcacaaggctggactagaaagggagtcaagggcgaaggccccgagaagctccctgaagactcgtgccctggttggcacaggggcccgtgcctgtctgtgtggaaaaaatgacaagagggcgacccggaccggaagcagctgtggacctagcgtggactcactgcctgcccactcctcacctgcagggtgcctttcagattggccttgagccgctgcccgtagtccggcaccgagccctggcggctccgccctggcgtaggctgtggactcttggtcgcagcccgattcagatggggcccccagcagcggggctctggcgcctgcaggagacaacaggggcacaggccagaaaaggctgttgtggcggcagaagcgctcccagccacccctcccgcacctggagcgaggcccggcccttcttcactttgcccagtccccctcccaagttctgtgccccacggaggcctggccgcgactccgtggctcccgccactccgccaaacagggaagtgggaggaggctggggcggcggggcctgggtacctcttcggccgccgcggggagcgactcggagctgcggagcccgccgccggcctggcccgtggtacgcttcagagtgcggtactcccggtagagcgctgcgtgggcgagcgggaggcggggtcagggtggggcctgggcccctgccgacccggtgtcttctcgcccccgccgccccgccgcgcgctcaccgcgggtctcctccggcgccgcctccacgtcgtcctgtaaagggaacgcgtcagccgcgggccgcgccctcagcccctcggcccctgggcagcccgcacctggctcggtcgccgcccgcgctgccgtcggaacgcgcgctcccacgcctgcagccgctcccgcacgtcccgcagccgctccatggcgcgcgcgcccgcccggcctccgcgcttgcgatcgtccagcgaatctcccgcgcagccgtcgcgggggccgacagccaatgcggatgcgcggcgggccgggggcggggccaccgcccctgggcagccagtccgtcgggcctcggacaagcagccaatgggaggcgtcaacgtcatcgcggggcgccgcggcgccgggcggggagcggcggacggtctaggcggggctggaggcggtggctgcggttgcgggaccggtgagcgcgggcggccgggggggtgtctgagcggggcggcgcacgcccctggccctgcctggcctcaaggggcggggcaccggtcgctcggggcggcctggccgagggaggcagtggctgcatttgggagcccggggccgaggccgggagcctgggaggtgccaccgcgggccgggaaggactgggagtccccgggccggtcggagcggcgtcaggccctggtgggagacgcatccgacctggaggagcaggccccgctcgggaggcgaaagagcggagggtccagcgcctcccgcggctcgaggcccggaggagccgggcgggggcgtcttcgcgaaacgcaggcgaccgaggaccgtcgcgttccctgcggccggcgggaggggagggggcgtcgcacggaggtgcctgcctcccttggtgggcaggccgtctgctttggtgttctcccgtgacaagtgctcggttggtctgtcctgtcagagcgagtatgatcgttgagatctgtccaccggcagaactaggccgagggttggtgtctgggacttttcaggaaccggtgccttaaggacttacttgtatgtggaaaagtcgacaaaaagaagggccttggggccagagtgtcttccccggcccccttccctggcttgtcactcaggctgtgaccttgggccaggccgaggccttcattttctaatctgtcacagggagatggctgcgatttagttttgaggatgctacaggcagcagcagggctggcaccctgtgtcacaggtaccttgtggccttgggagtgtttgtgcatctctgcagcttgggtgctgctgaggcagctttctttgccttgtctgagcagtctgtagctttgcaccttctgaatcccacatacttaagacttggtctttccacagtggctctccagggaagagggagaggtttaggccagtggtaagggccaacaaaggtgagggttgctttctttcggggtctccgtgcttggtgaygctctggagaatagtagcttttgcgggggcttgtattttataggctacatcatctggactcggtgttccctgggtctcggtcttttcaacctgccttgttgcttatgaagctgcttctgtgcttccagctctttggtgttttgtggagtccaagtgtagccctggagagcatctgtgaggagaggggarggaaaggtgatttggctgcttgactccwtagagtgtcccgtcaatactaatgctgatgaaggttggtggggagagtcctgggctttattcaggtttcgaagaaggttttgtgaagcagctttgtaatttgagaggcctgaagtacccatggggggccctgcaaggcaacaggcatctgtcaaaagcatacccaagcaagcgagttgttgacgatgccacactgcttgacgcttagtttctctaaagagatcctgtgcatctggagggctggggctgagttgtgagtttgtctgccagttcactgcacccagcccagcgctaggcatctaataggtgcttctctgtgccatggccactgctaactgctgactttgtttcaggcactatgctgggccttcctaccacttgtgtgtggcttggtagtggcctagggtctctcctccctgctgaagtccctctcctgcaggtggccgtctgcccggcccagcaccatgcacacgcttgtgttcttgagcacacggcaggtgctgcagtgccagccagctgcctgccaggccctgcccytgctgccacgcgaactcttccccctgctgttcaaggtggccttcatggacaagaagacagtggtactgcgcgagttggtacacacgtggcccttcccgctgctcagtttccagcagctgctacaggagtgtgcccactgcagccgtgccctcctgcaggagcggcctagcactgagagcatgcaggctgttatcctggggctgactgcccggctccacacctcagagcctggggccagcacacagcccctctgcaggtatggacttatctggagggtcgtcaggccaggggtgtgtaagtgggtcccctgaggaggcttgggtcataaagttagcaagagctcatgcaggagcaggcgcgttgctcctgtcccaaggtggctgggagggggtatgggcgctgcccctccaccccttcctcacaccattcctactcccaggaagcatgcgctgcgggtgctggacatgacgggcctcttggatgatggtgtggaacaggatcctggcaccatgagcatgtgggactgtactgctgccgtagctcgcacatgcattgcccagcagcagggtggggccgcagagcctgggccagcccccatccccgtggaggtgcgcgtggacctgcgggtgaaccgggcctcctatgcgttcctgcgggaggcactccgaagcagcgtgggcagcccgctgcggctctgctgccgggacctgcgagctgaggacctgcccatgcgcaacactgtggccctgctgcagcttctggatgcaggctgcctgcgccgcgtggacctgcgcttcaacaatctgggcctgcgcggcctgtctgtgatcatcccacacgtggcccgcttccagcacctggccagcctgcggctccactatgtgcatggggattcaaggcagccctccgtggatggcgaggacaacttccgctacttccttgcccagatgggccgcttcacctgtctgcgtgagctcagcatgggctcctctctcctttcagggaggctggaccagctgctcaggtgagcgggccccaccactgccctgcccctcccttctgtagggaccctccctggctctgcctgtctgtgacccctgtgtcccctgtagcaccctgcagagccccctggagagcctggagttggccttctgtgctctgctgcctgaggacctacgcttcctggcacggagcccacatgctgcccacctcaagaagttggacctgagtggtaacgacctgtctggcagccagctggcacccttccagggtctgttgcaggcatcagcagccacactgttgcatctggagctgactgagtgtcagctcgcagacacccagctgttggccacactacccatcctgactcagtgcgccagtctccggtaccttggcctctatggcaacccactgtccatggcgggcctcaaggagctgctgcgggactcagtggcacaggctgagctgcgtactgtggtgcaccccttccctgtggactgctatgaggrcttgccctggccgccgcctgcctctgtcctgctggaggcctccatcaatgaggagaagtttgcccgcgtagaagctgagttgcaccagctgcttctagcctcaggccgtgcccatgtgctctggaccacggacatctacgggcgactggctgcggactacttcagcctatgatgaagtagctctgggtgagacacaggccgccctgcagtctctttaggtaggcagggcctttgctgggacccctggtggaggccttcacaaaagcactggttactggtttcctgctgggtctaccttgcttctgggcacacctcaagcctcccctgctttctgcagtgccccacgcggttttccctgcacttgctccataattggctgatcatctgtgggccccggggctggatgtcaggcctccattgccctgctcagtttggctgcatttggctgccgtctggggtcctggtcctttgtgcaaatgctttgggattccagttgtgagctgagagagatgatggcctctctgggcctttcctctccctttactgagagctcagtgcttctggggttgaagttggacagaggcctgcttcagggaagctgggagtccccaggcactcacgcctcttacgtgttccctaccctgccacccagccaccccactgggctgggctcgggctggagggggtcatcaaggtacacatgtgcctggaagttgaatttgtggctgtttttttttctgtccacgttggtcacccttatccttatctctgctgtcacccccaacatggccaccsggcaacaactgccatccagcctgtcgccccgcccttcgcggggcagccccgtcggcactgccggccagtccttgctcttcccacctttcggaggcccaagatcctactgtggccggccagggccagcgagggaccccccccacgcagagctggaggttggggtgatgtcttttcggaagagcttcaagggaggtgttggggcctccccggccaccttccattgctaccccaggattcccgagtgcaacgttcccggctcgcgccccacacacggctcagcgcacactgcgcggcttccacctttactgacggagcatgcgcgaggccgcaccggccaatctccggcgcccacgtcatccgcgcgcccgcggccctagcagtggatctcgtaggcgaccggcgggggcacgcggagtcccggccccgccccctgttccgggccgcagtcagcgggcgcctccgccggaccctcggcgaagagcggcttggagcggttgatgacgaacatctcgtggccgcgctcgtcgcggagctcctctagctgtgcgaacgtacaggggccgtccaagtagtcgttgacgaacagcgctccctcccccggaggcccccgcgccttttttcgcctgcggcgccggcgacagatcatggcgaccaggagcagcgccgtgagcgccagcagcgcgatggccgccgcaatggccgtctgtgtggccacgcccagggcgcggaaggccatgctgcccgcctcgggccggggctcgctgccggcggggcgggcggccggaggcggcggttgcgcgggctgctgcggctgctgccgggacgcgttgaccaggagccggaagggcacgcgggcagcgccgccggcgttggaggcctcgcactcgtacttaccggcgtgcgccagcgtgatgttgctgaggaagagcatgccgctgcccgtgtcggatgccgagtgtccgcccaggcccagcaacccgccttctagctgggcctgggctcgcggccggccctcgcgaggctggggcacctttctccaggtcaccaatggctgcgggtagccggaggcttggcaggcaacccgcaggtcctcacccaggttggctgtgagctccagcggctgcacgtggacagagggcggaatgcagatgaggctgctgtgggatacgtccaggagactctggagcgccaggcgcgggggctctgcacacatgatcttcctgtccctggaggtgagcagccgctggccgccctccttgatccaggcmcccagccagtgcagggcgcagtcacagcgccatgggttctctgtgggagagcagcgttaggcaggtggcttgagggtgctgctaaaacagcctgtgcagttggggttttgcaggccaggacagaggcctctttcccacctcccacagcgttttcacacggagtccaaggccctgccaccccttccttgaccccaagctccttggggcggcaggcccttcaccctcgcccccctcccctttagctctgtgatgcctgcctgttacagatcacttctccgtcggtctctgagaaagcacctgctccttaagtcttcctgcaacaagtgccactgtttttaggaacctgggcgtccacatagacatctcaccagcactgaaacctcacaagtcytctcagccttgcctttggatgccctctcttgggaatgtccccagtcctggtcagctgtctctctcctttgcaattttgtctgcctcccctcagcctaaaagtgtgcagaaccctcaattctgttaagtcaccctgtggagttcctgtcttctgttttccccaggcagggtgcctgagctgtatyccccagcacacccactcccgcagccctccagtgtggctgcaggcggtggtgcagccttccagactgctgcccagttgcctgatgtcagagcccctccacacatgagcctgctscctactgccaacaccgtggcccagacagagacgctttcmgaggaagaggtacctgtgaggcgcaggacttgcagactggccaggggctgcagggcctctcggctgatggtgcccagctggttcctgctgaggtccagcagtgctagggaggmcagccccgctagagcctggtcctccagcagctcaatgctgttttcttgcaggtgaagctcctgcagtcgctgaagtaaggacagcagatcgtgaggaaaaagggcgccgaggttgggggcatgtctctcttcttaccaagctagactgggttgccttttctaactattccagccctacagggcgaggggccataatggagtatcccgcccctttagaccccaggcgctcaccggcaggtgcaagaaggtgaaatccagcagccgcgccagctggttgcccgccaggtagagcacgcgcagctgggccaggcctacgaaggcgccgctgcgcaagccgcgcagccggttgctagtgagcgccagctccagcaggcgcggctgcgcgcggaaggcgccggcctccagggcgcgcaggctgttgttgtgcaggtagagccggcgcagagcggcgagtggcgccagggctcccggctctaggcgggcgatgttgttgtcctgcaggaacagtgtctgcaggccggggaaagaggaggcgcttaccccgytgcgggggtcttcctctccctgggggcaccccgtcctcccgcagctccacacggtgcccacctgcgtccctggcgggattcccagcgggacgacgcgcaaccgcagggcgccacactccaccgtggcgctgtagcagcggcaggctgctgggcagccggcggcgcggagcggcagtagtagcagcagcagcggcagcagtgcgggggccctcagggccatctcccgaggcccggttcctcaccggcccttccgcggttcagccgcagacgcgtgccctcctgaaacacaggttggcaggccagtctcggcagtcgagagccagccaatagatggaatggaggcctgcacctgcgtctaacttttgacrctataaataggttcaagaaactaataaaacgttctggttttctcctttgacaaaaacattttcttaaagctctggggcatcaggttcaaatttagaattcctggtgtcctcagtgtcttcacaggatgtgaccatgtagggagagccacccaaccctgtcaccttctccttctccacccatgcccagcaggtcaggagcttcctgctcaggacgtggatgtgtgtcgcttgctgcccccgactctacccccaggcaagtggctgctgcttggttctagggtgcaagaagctggaagtacagggtatggcttgagaactttgcttaggtgacaaagcccggggtcccattacccaagcatggctaggagggggagagcaggccctgggcagacacgcctccttgttatcctgtgggggcctgggcagagctggcctcagaggagctacgagccccagggaagtcaaggcacagctttgtccagcacctgctcctgctggcctaggggtgggaccagcttaactagaattgggcctttttctcaggtaacctgtcagagaattgggggatgagaaaaataataggaaattcggttcaggagccatgggtctgtgcttcccatgccggtccccagaaaggtgtcctgtctttggggatagatggggccctgggaaagctggggtgggacaggggacgccttgggccaccaactgggtttctggtgtggcttcccaagtgggctctgggagcagtgtgacctctgagatcagcaaggagcagggagtttgctgggggaccatatacatgtacttgtcgtaaagaaatgggaaggctggggtctggtttcaggaacaaggagcccagttttaaaagtagggatctgggctaagccagccagcccacccgaagccagggaaaacagggctgcaggtgtcctgtctcccagcctcatctggccggcctccccaaacatttgcctgtccatcagctcttcctcctttcgagtcatgtggaaagggacaggaccaagtggccttggtgtttaaatcttgccctaaattgtaactcacatgattatttaaagtcactagaaataagtaagcacagcaataaagttttaatggaatagctttggcccaggcagaggcagttcccagatgtctcaggacgcgtgtgaaccccaagaagttgggggcgttatctgggcccttgggatccattcccctgggtataaagtgttggtacgtggctccaggcctggcccactcagcctcccccaggaaggcttctcaagtggagaaggttcttggcctcagaactcacggcgctgctgctcacgctgaccccccactagatgcagatcggtgtagaaaggcctgccagggcagggatgagggccccaagctggaagcagcccagaaatccttttaccagaggacaactccctaatccgctgggcaggggcggggtgtcacacgcaggattccgcgacgactgtcactgcctcctgggcgcccctctgtgcgggagcggggagggaagaggatggaacgccctgtgtctgcctcgggcgcagtgcgaggcccaagctggtctttgggcggcccttgcgcacctctgcagcgctgcgacctggtgcctgtatcccccacggcctcctctgctacccacgagagccggttgattttcggccgggctcagggagggcgtggcctccgcgttccccatccccctccaggacccacgcccttctcggagcgcaccagggtcagagccgggatggtccccgatcccccagcgcccccacgcctggtgaccttgggtcgggcgtcccctcacctgacgctcccgcggcgagcggctcccccgccgtgcaggtggcggccgggcccgagcagtcgccgggctgggagggggcgggggacgctcgcgcacgcgcaccagagccccgcgcccgccgcctgtgcctgacgtctcgagcgcaggccaatccggagggcgccggagtcgggtgcgcggggggcgcgcgccgtggggagcggggtgtccgggagggccgggccgcggcagcaccaaggacagcgccgggtgggggcggggccgagcgcgcaggcgcactaggctgccgcgagcgcgggtggcgcgggctttccggggcgtggagtcccgggggagcggggcgagaggcgcccgcggcctcccgcctttcccttggccccgctcagggcgaccgagccgcgagcagcagcggggccaggtccatggtgagggcgaggcggcggccctgccagcgcacgtgcgagggcagcgcaggcgcgccgggcccgtactcgaagcaggcgctgagctcgaaggccagggcggagcgcaccaggcccacgccgcccgcacgctccggcgccgggtggtacaggcgcccgttggcggccaggggcagcaggcgcgccggctcgaagggcacggccagggcctcgccaccgccgcagtaggagaggcgcggaggcccgtggtccgcggtcagcaggtgcgtgaagaccaccggccggtcctcgcagcgcaggaagttgcgctctctgccgcagggcgagaggaaggggaaagcggcctcgtagcgcccgctgcggttgggtctcaggcgggagaagaaggtgaccaggaactgcgggtctgggggatgaagggtgcgtgtactcagcgcgctgggctcccaaggcctccgggcccaggaccataccgagggcaggcgccgacggtaagaggttcgcccggcctcactcagcggggctcctgagcgcaggacgcccactccttggtgcgctgggcccgtcggcagagtcggggagcccatcaggggctgcccggaagggagaaagaaggggctggagagggaggcacagcattacctttgaagcaggtgatgaaattcttcattttggaatcatccaggaaaagctgcagatagagggccaggccgtgataagtcccagcgtgcaggtgggggcggggaagctcaggaggtcctgaagctcgggaggtcctgaaccggcccgagcccacttttcctgcttgtctgtgcacaccgcatgcagggaggcgcgtgaaaggtaaacctgggggccccgccgacttatccgcgtctatgcgcacctctgctccctggtcagccaattctttcccgcaccttttccctcttttcaagtttgtaatcagttgtaccacctcctccgcggagactacctggcctgctgcctcccggacatgcagctgccttttgacagggcttccaaaaaaaggcagggcggcccgggtgtctccctggcagcggcgagaagtcagcgccggggctggggacttgtaggacagagtccgaagctgcacaacgcagcagggacgcggcccatgtaggagcctcggcccggaccgacccaactccccgtctttccagcgcgctctcctccagctctgaggagtcgaggttgcccaccgcgcaggccccgcccacccaccccctggaacgtccctccggccccgcccctcgagcaacggtcccgcccacagggccacgcccccccgccccgcccagagacctctcccggccccgcctctcgagcaacagccctgcccccgcccacctggccctggtggtccacgtagtagaaatactcgcgggtccgcggctccggactctggccctgcgtgtaggaaacgcccccatccccgctgcaggcccgggctccccgcgaccgcgccaaggccagggtccggagcgtcccgcaaggcggccacattctcctcccgcgccggaagcgaccagcaggtcacgccgggggcggtgctgcgcgaactcgcgcctgcccgcagtagccccgcgcttcgcgttccggcggcgcccgcctccgcgacccgggcccggcgctcttccctctccctcgggcctcgggggctcgcccgccctggccttccgagaggcgtgtgccggtgacgccccttccggtccgccccgcgtctcttcccgcccccggccgcgcccacaaggaacgggaggacgcgcagggtccatgtgcactttattcactcgtgtcgtcgcctctcgggtccatgcgtcggggcgagcgtctcagccgggcgggaccgcaaaggccccgggaccacccgactgaggacgccgcccaggcctcggcagggctggggcttttgtttttaataaataaaaacggaactctaaaaaatatatatataaaaactggggagaaattaagttttacaacaattggaactcaaaattccaaaatggaaaatgtacaaactcggtcccccagcagctctggccccgagaacggacagtcccgggcccggcgccttcccgctcgctcgtctcctgcaggtctgggatggggatggggtagagcttggtttttggtcagaagccaagaaaaaagatcggagaagaaaagaaggaatgacctcaacttgctctgcacggaggacggggacggctcagagataaatagcatttaggttaaaactatgtcattagcaaatttagttcttatatctttccctctatttatatctctatacacggtgggctgcgatgcaggatagattctggatttacagttacacgaagaaaaaaatactctcgcccctcccccaccctgcccccagaatgcctgcccagccctgctccctaccccagaggactttggtttgggggcccccaccccacccaccgagagcctgccaggccccgggcccactgtcctggagcccccaaactcctgagcagtcaccagctggggaccacgggccgagggagggagaggaggcggggacaggtcgggaagctctctcggggctgggaagagctgcaggccaggacgaggacaggagaaagggaaggagagaccggggcggctgggcaaggcccaggccagggcgcgcaggagccacagggaggcagcccggccccaaggaggcagcgtcgctcggctccaggacacagaaggcactttctcggagctgacccgcggccagcggagggcgaggcggtgcccgcgggaactggccgtgaggtggggggccagaggcgccctccccgccgctgctgtgccctggctgcaccctcagaccaggcagaagacgtggggagcgccggggccaggggcctgggggagtggagggggctccagggctgggccgggcgattctggcccctctgccgggagagcgagtgcggagttcggcctggctgggggcggcaggacatccctcctgtccccgggcgcccccgctacagcacaccctccatgaagctggtgtccaggtgctggatgagcacccgcaggaaggacatctccttgcgggtgttctcgaagatgacgcgcgggtcgtcggactggcagcgcaagcagttgggcgccatcaccatggccaggttgctgacatccatcttggtgaccgcgacgttggccggctgcacgaagacctggtggaggagcgagggtgggcgcggaggggcgggggcggggcggggaggggaaagcagcggggacccccggggagggaagtacctgcaggaagcggatgaggtagcacagcaccatgcggttgatgcggggcagcgcgtgcaccacggccaccgccgcctcggggctgtcgtagtgcgcgatgcactgctcgtagaactcgtgcgggatcaggggctcctccagctcccggtaccacagcttcagcagggacgctggggacacagcacggggctcagcggccctgctcggcgggcacccctgggccaaatggggtcccgtggcggacacgcatggaggggtgctgtgggggacaggctgggagggccagctcattctggacagggcccatctggccaggctgggccctgaccccagagggcctttcggctcctaggggcctgaacttgatcctggaggcatgtgggtcacgccagcagagttgtgcaaaacaggatttttctcaggagtcgtctgtgtagccaccgtgagggggtgtctgcagagcaggcacagctgaaggg

SEQ ID NO: 96998 - DNA, 61177 bp, Homo sapiens
  misc_feature (1)...(61177): n = A,T,C or G
ttgggtgtatctatgtgtattttcatataatgagatggactttggtttagggacatttcctgaaaacactgggtttggagtttagaccccaagaagttagctgtggcctcatgtttggtgtttgagtcacgaatgtgggcaagccatggctgatgtgtcagctcacaaacgggaacttacaaagatgatttctcattcattgttgctgttaccttcaaattttcttacctctgttttccttagttttctttttatgcctttcagtttttctttcaccagagtaaaccgtgtggctttttgtttgtttgttgtggtttgcattgttgccaagataaaatgcctgttgtggactaagtgggcccactcaggccagcttgattgtatattggaaagctgatctttccctcttggagggagggagaggacactggttggtgtgtttaaaaactgttctttctgaggcgggcagatcatgaggtcaggagatcgagaccatcctggctaacacggtgaaacgccgtctccactaaaaatacaaaaaaattagccgggcgtggtggcgggcgcctgtagtcccagctactcgggaggctgaggcaggagaatggcgtgaacccgggaggcggagcttgcagtgagccaagatcatgccactgcactccagcctgggcgacagagggagactccgtctcaaaaaaacaaaaacaaaaaactgttctttctctatcacagtggttctcaactggtggtaattttgccctccaggggacatttggcaacgtctggagacattttttgttgtcacaactggagggagtgttgctggcatcgagtaggtagaggccagggatgctgcaaaacatcttaaaatgcccaggacagcccccattaacaattatgtggactaaaatgtcagtagtggcaaggttgagaaaacctgctctacagaaaggcaagttctattatccagaacacaatataacccttggagtcagggtttccctttcagatgtcctaggagttgactgacctcttcagtgcaaatgaggagcacctggaagggagaatgcctgtttctctgtgagctggcagagagcagagggcagggacctctgacacacccagagcctctggagggggttgctttggatatattttaaaagactatgatgcaagttgctgaggcatgaagtgtaaaagctgccttaaccctgatttctttccaggtggtgaaacacagggtgggtctgtcagcaccatttagcagcttgtgaggaatgaattttcagatttgccactcaggtagtgatgtgtcccgcacagcgcttgtgcttgttctaactggccaagctttaattgcaaccttctgggtagttccagcaaggcacagctgccctagtggggtgaggatcaggtgaataagatcaagacatatgaaagcgtgggaagaggcactcctcagcttttacagtgcagaggaggtgctccagatttgttaaaggatcagttttgggaatagtttatggaatctctatttctttcctctctttccccctctactccttttttatatattagagactgtaataatcacctccctacttcctacttggcaatatccactaaagctaaaaacaacagctaccctccggcccagcagtttccactcatttcagagaaatgaggctgatgtccaccaaaaaacttgtataagaagattcacaacagttttattataatggccccaaaccagagacactcaaatatccaccagtagagaatagacaattgtatttccagacaatggatactacacctaaattaacatattacagagagaggcaacccggctgaatctcacggacatcttgagcaaagaagccaaacacaaaagagcacatactatatgattccttgtatattaatttccaagacacactgctaatcggtggatttagaagtgagggtgggaggcgggtggctgtaaactgggaagggacacacttgaactttctgggatgctgtaaatgggtggtggttacacaggaaaaaacagcttcacacccaggatttgtgcagtttaccgtctgtaactgcagtgcctctagaagcctgaactggctcacctttaaattttttttttttttttaagaagtctcgctgtgatgcccaggcttgagtgcagtggtgtgatctcagctcactgcagcctctgcctcccaggttcaagggattctcctgcctcagcctcccaagtagctgggacgacaggcgtgtgcagcacagccggctaattttcgtatttttagtagaggtttcaccatgttggccaggctggtctcaaacacctgacctcaatgatatgccctcctcagcctccctaagtgctgggattacaggcctgagccactgcacctgacctcacctttcaatttcagataaggaactagaaggtgacacgtgaaatctgtaccggacttctaggatgctgttcattacaccacccacctcctctcgggtcctgattacatttttatgtcaaacatttaatttctcagtgccccatcacccagctagtggccatgtgccacccctacatacagaggagggccctgaccctttctagtcctgtgctcagcttccattgagtcttctgaggctgccgagtctttggccctgggtagtggatacatctgtggtggacactaaattccaagcagggctacactcagcctccttttcctgttcccaccacacacaggcagtccatggtctcttaggattgtgcacccacaggaatgcaggcctttgtgtttatatccccctcaacagttcacaagggccagctgaggtccagcaggacttcaggagtgggtagacgaaagctctgtctagcaaaccccattctgttcagtccccaagacccgcagcccactgccccctcctcctcctcatcggaagtcctcgtttcctgtcccatttcaccctgcctctcccccctccgacaacactttctgcttggaccagcagcccatgggggtttcagggagcagtctccctgccccactttctgcattttccctctgctctcaggttcccttttcttcctgatgcatggaccaggacgatcctgagcagctcccctgggaagactgttcccccacaggctggtttcaggggataccaggactgctgcacctccacactcatgttttccactcccctcaaagtccaggctgataggagagcagcgttactgtccaactctgccaaacgtgtgtctccattcccatttggagggtgtgtctggaatccttgtttacaaggtgtagaggtggaagagttcatcccagagccccatggccctgtacacctcactgcagttagctggaagatggttaaagcagtgagtgactttttttctagagctgttgccctcccagcctgggctacaaacaatcagtgcttgaatcttcctgcctacccccaccccaatcaggcctttagggcactaagttggaaaggagcctggacttcagagtcaaacaggcctgggctctactgtggttttaccttactgtgtcatcttgggtgggttaggatactgtacaggtgatgtgtcctcagggtgtcacacctgaggcacctggtgttttgtcttcatgcatgttctttagaaagtcacgtggagggggttttccatctgggctgggccaggccacttaatgggcctgtcgctggtgggctggccggttctgagaagatctggcaggtgactgcggttggtcagccattcaaggctactactggagagtccgggaaatacctcaggtgctctctgcatttccacaggcaagtctgtaacttctgaggtgtcctgcaaaggcaggtagctggcaaatctgtgaatggatgagtgcacagaggaggtcccaggtgagggtgacagcccagcaacacacttccccagtcacacctgctctttggaaggttccagcaaggctgtggagaggacccaagggcctgtgactgccacctcccagtagaccccaaggacctccagcctctgctctcccctcaagggtcctgtcgctcccttggtggccattagctgtggtggccagagctgttctccactctacctcccagggcctctatcagcagctgacggttcctgcggcttgtaatgttcctgctgatctgcctcactcactacccgtcaccgctgatgaactttcccaaaagtcagcccagaactccttaagggaaggggcagcctcgttgtggtagttccagcaccctgtaccaagcaggttcttagtaaatgctgactgttgagtggcccctttctgaaataaattccttgttctcaaatatatcctggatctggtccccttgggtccaatcagcgcttgaaccagacagcaatgactgaccacctctactcaagagtttctggtttatttggagcctctaccccacccaaccctaaggctgggaacccttttgccttccttttttcttaaaggaagttaatcccagcacatgtgaaagatggaccatccatcccaatgcctcatgtcctgggcttcatttctccatttctcccagggcaccctgggagtctacatgcaaacagagatactagaaagttaacttccggaaacccccttgataggccaattcgtccccttttctctctctccatgtgatttttttttttcaaaaaatatattttgtagtttttttttccttatcaccaatacatacccaatgtggaaaactgagaaaaagcaggtttgtaaaaagaataaaatgcttcgccataatctcactctgcagacaacctacaatggcaaaaatcgcaattaattttgcaccaacctaatactaggatttcagtgcacagccttccaggcctacatttaggtttgtttgaaacaggaacatgcggttcaaccgccaacctgagcccgcgtcccctaaggccaataccaccatcctgaccctccttgggaggtcctgaaatgaccccagttccaggggcaacgaaatgcatacgctttcgagggaaggaggggaggaaacgaccctgtggcgcaggtctgcacggccaagggggttccctgagctggtggagcggcgtggcgtggcctaggaagtccctgggcgagggaggcggggcgcggcgtggtgggggcgactgggtggtgcaggcctgcgcacgcgcgcagccgtgggcgggacgggcggcctgggggcttcgccgccaggtggcaggcgtgcgccacgcccgcaggttccagccccgacccgggcgcgcggggccgactagggtcgggtccagtgtgcggtggtcgctccgctccgggccgctccgctctgggcgtcagggcgcggggagctgccccggggttctgtccaccggggaggaaagccacgagcactgagcgcctcctgagagccagccctgacgtgaactcattttatctgccacgacccagaaggtgggcgcaattttcctatgttccaggtgtgaaaagtgaggctcagggagctaggcagttgcccaaggggacacagcagtgacggctctgggacgaagcccaggtgtccagacgcgatggcctcttcccgcgttctcggcgggtacggcgcgccgcctgcctgcggcccgcggggaggtggtcgggtggccgccccggctcctcctcgggcccctgaggatttccggccgggaccccgaggagggccctgtggccttgcggcatccgtggtcacgattccagccccacacggcctcccgccagtccctgcgagtgcccaagacggggccgcccctcccgtctcctcccttctctcccctccccggcgtctcccgccgagggcgctgcaggcggcctggttgggatgagggcgggcaggcggcccacaagcaggggcctgtttcctgactcgtttgaccctggctgtccctgcggaggccccagcagacccagcaaggtcatctagggcgaaattccagtctgagccctgagcagtgacttaagttttcccgataaggctcaagaagggacacagattgtcctccccacaccccgcactctgtcagcacctccactctggtgaagcctctgctgcagacagcccggctcgagaagagacaaagatagacttgggacagataaggacagagacagccagggagagaggggcaaggagctcagaggtgaagatggggccgcgccgatggggaggcagcgggtctgcggccgccgagatgggaagtgggccctggagcgggcttgccgagcctacgaccggggctgggatgttggaggaagacgtggtcatgagggctgaaaaagaaggggtttttggtatggtagaaaaatggattgggctggcagctcgaaggccacagccctgtacctctgggcctggtctcgtgtgtgcacctgggaccggtgggtgaggggtgatgtagagtcaatgagggacgagctcgctgagtctccaggaggcaggagtggagagggcgagggagggagggtaggacctgtatacctacggtggagggggcaggcgggggacagatgctgctgggccaagactactgagtctctcctgcctgctggaggtccctagctcaggacttattccaygcacactctgatagaatatttacgcccaacactaactgtttggcttggcaaataagcaaagccataaagtcacagctggcctgtaggctcccagtcaccatgtgcagctgagtcacaaccacttcccccaccccctggggagcaagcgcctatgctcatgcctgcactcagacacatatccacacagatacccacagatgccgcgtgccactgagtcatagctacctcctcagagagcacgtgcctgcatgtacttgcacacaggtccccacagatgccatatacacctgagtgtgagtcatcatcaccactgaaccctgagggagggcacccagagtgtgttctgccatccttgcttagagatacccatatacacacatatacagatatgtgcccaccacacatcctgttgtacctgctgcatcataccagcagatcaataaatgtttgtggaatgaatgaatgagtaaacaaatgaatgaactaacaagtgaaaacgtgagtgacaaccacactgcgtggatactcagtaaaattggttggggcagccctgcggggtgggtcccaagctctgtgtccagaaggagttgtcttgctccaaatatatcctctgtgggcgggcagggagccagggctgcctcccagaccctgacttcactgggccggaggcccaacctctgaggagttgaagaaaattaacaaagaagaggccctggctttctgtagccaaggctgagctgtgagatgagttggtgggggcatgtgtactctggaaataccacttactcagagacctgagatgcaggacagagtgctctgctgaagggcccagagaggactggttctggattgggcttcttgggaactctgccccaaatgtgcagaatgtgcaggaggcctggttccacttgagatctggggcaaatacagtgcttgggctgagctggtgattgcaaaactgaggccccctattagacagttttccatctaggcctgcccttctggcttgggcttgttcccagagctgctttcctgtctctcccttgaatcttcttttctgaagcccctgtgtctctgccctaattcatcatctggaatattttaatattaccccaactggtcttcccgcctttagacagtaagacctatctatcttgcttatagctgtcagagttatttttctaaaatacaggtccaactatataactttcctgttcaaaatccttccatagcttcccacttttcagcattaaagttggatggcctcagccctgtgatgagatccttcatgaccttactcccctctacctggaggttatgaaagggtaacatgtggatggatagttgttggttatatggatcgatgggtgatgggtggactctaggataatggatgcttatagggatgaatggactagtggactgatctgtagacagatgattagaagtataaatgatcagtcaggcacgttggctcatgcctgtaatcccagcactttgggaggccgaggcaggctgatcacctgaggtcaggagtttgagaccagcctgaccaacatggtraaaccccgtctctactaaaaatacaaaattagccaggtgtggtggtgcatgcctgtaatcccacttacttaggaggctgaggcaggagaatcgcttgaacccaggagacagaggttgcagtgagctgagattgcactattgtactccagcctgggcaacaagagtgaaactgtctcaaaaaaaaaaaaaaaaaaaaaaaaagaagtataaatgattaggagggcatgtagggttggagagatgggtggatggatggttggaaggatactgctcaagtcaaggttgtttttgttgcaaggaacaaagaaaactccaaatgttttcaagaatgaggagtacaattgtgagaatacagtggacaaccttgcagagagcactgacattcaggcctcatgaagattggaactggaaagtcaggaacggtggctcttctctccgtctcccgaggacctcaaggttcctctctttctcacatttctctgtactcattcctgtctcagcaggctccctctgctcgattttcttgctcatggtctactctcagccactcttactcattccttctacaagtttttaccaagtgcttatttatgtgactgtttgtacctcaacaaagctcctacgtgttgaaaaatagcaagcaaaacaaagttgctgcatttatgaagcatactttctaatgaggagagagagacagtaggcagttacatgtgtgctgacgttaaatgctatggaaaaaataaagcagggagcagtttggggaggggttgggtttctgctgcatataggatactcagagggggtgtccctgatatggtcatatttgagcagagatctgaagaaattgagggggtgagccgtgaagatatctgggggaagaatgctctaggaagagggcgtggcaagtgcagtggtcctgaggtgggaactgtgtggcactgtgtgaggaacatcagtgaggctggtgtggctgatgttgtgtgaacatggggaggatggtggaagatgaggtcagacgggtagcagaggacagatcatgaattgtgttacaagccattgtgaggacttagacttttactccaagaaggaggggaggcattagaggatattcaacagagaaatgacatgatcttagattttaaaaaggacctctctggctgccgtgatgagaatagactgaaagggacaaggtgggaaagggagacagacagggagaccacttaggaggcaactgcagaaatccaggtgagagatgttggtggcttggaccagggtggcagtggtgagrgcagtgataagtggtccagtttaggacgtattttgaaggtaatcaggatttgctgatggatgggatatgggtgcgacctccctctggtgaggtggccctgctcaaatcagctgtggacaaggaggatacgtggtatagtgtggctgtctagctccaccctccagcagaggcagcttgacatttgtcttggataatgagggctaaatgcagggttgagagtcacgcccagcagcaaagytgtttctgtctgaactgtaaggtcactctaaatcccactctttcaaggcaggtatattcagcagrcttaattgaaaactggaacatagcttaccattgttaggatagaactggagcttgaagtgacctgacttctcagtgagaccaaacattcacactctccaaggaagaaaatgaaggaagagaatgtttatgactggctaagtctgtcaccatccagtacagagaacctcatttgggcagagttttatggcaagctattgaagttatatatgtacgcatatgtctgacagatctatatctatagaatatatcatatmtgtgtgtaatacataagctactatatatatatgtgtgtgtatatatgttaagattatacacatacaaacacagttgcctttagttgaggaaccccaagaacctgccccttgtccagtcagggttgctgcccagagaaatagaactgatttcacttaatacacatgatatgatcctgaaactttaagcagaaagaaatgtttgtgtccattttccttagaaaggggaggtgggtatggtgggtaccagaacttagacattcctttgtattataaatgagttgtgaggatagtgagtagatgtatgtaacataaataaaggaatgtttaggatgatgactatttaggctgatgatagactagaytacatcagattagatagataggcacaggtggctggacagaatgtgaacatggattgttgatagctagttctctgtgagccaggaagcagaccctcaccagacaccagatctgttagtgccttaattttggactttccaaccttcagaacggcaagaaatacatttctgttgattataagccacccagtctgtggatgtcctgttgtagcagctcagactgactaagacagatggttgaattacattgagaaatggacagttggatgatggctgtttagattggtggatgtgtgaattttaggttactggatggacagcaaatggagggatgaacagcttgataccttatagaagtggtgcctcaaagtcacttggaaactttgttacacacagactgctggaccctactgccagagttttcgatttgatagatctgtggtggggcctcagagtttgcatttccaacaagtttctaggtaatgctgatactcctagtctagaggccgtcctctgagaaccactgccctgtggtatgcctggaagtgtcccatgccagtagagccaaaatggccttgccaagctggaatggaggaatctggggaccctggacttagggatgtcatccagcagggctccaggcatcctgtcactggcaatgggcttaatgtccacaataggcctagaggcccatggctcttcttccagggatgtagcacccttgtttaggacatcatggcccaccatggtctgtccagtcatctctaacccctgccatcctcaactagggttgaataagatccataaggtacatgtacttggccatccaagggcgctggccttggctgtggggcatatagagcactcagaggcagtgccacagccagcctagtgcccaggagccagcttcaaaggattagagatgttccctctgagccctaccctgctgaggggccctggcaagccctcctggtttgtcaaaaacacttttatgtttgttgtccctgttttctcaggcattgtcaacctctcatctgaacargattctgcttatcaacatttaaacatgcttgaatctcacttaccttaaaaaacaacaaaagcccctttctttgactccatgtcttactgcagctactgccccaccctcctctcaaccayrgtcaaacatctccagagcactgtctctttcctcacacctcacatgcctcctgtccatgacagcctggcctctacctgcctcacttcaccgaaacagcactccctaaaatcactggtgaggtgaccttcaggacactaaatccaaagtgcatttttcattctactcttcttttagattttccagcagcatccaaacattctcttgcttctggaaacactcttctccattcattgcaaggcacaacaatgctctttctctgttcaccctctattccaggtttatcctcctttacctggccattgaatattagtgtccttaagacacaggctgggctcttttcttacttaatactcttccttcttggcagttttatccatgtcctcaagctaccatctacttttctccctcccaaataagtatcttcagcttattcacctcttgatatccaagtgctcagcctcttcactgggacatctcaaaggcacctcagcctctaactaaggccaaacaggatattttcccctcctccacccaaccctggtcatcctttggtgttcaccatctcagggaaagataccaccatccgttcagctgggtaactcagaaacctagcaggtcctttgacacctgtgtcccccagtcttcatggccaaaccaccaccagtatctctccgttttcctaagtacctcttgagtctacagttttcgtcatcttcactatcccatcctagtccaaaccatctcttctctgaaccatgacagttacctctgaagtggtctctccactgcccctcttgtgtccctccaacccattctccatgttgcagccactctgcacgtgggttccatctggcagctcagagatggggagatgaatcgcctgggggtaggccctgctcagggtcatggcagaggctgggcctcaggcttccctgccccactctcagccagggccctttccaggacaggaaggcaggcccacacgtaggctggaggccccactagacacacagctcagccaggcctccagggaatggagaagaggctttgaaatttgcagtatcaagtttcagaaaacacagggtcagggtcagcagagcagctggtagtggggaaggccaggcccagctaatttcctgtcagaagggcccagaggcttcagcccctctctgggctggccacaggggaggagatgccgggaatggttcacattcttctggctggggctgcactgaacctcaggggacctgtggggagtgaggaggtggatctgctgaggccagagttgggggctttccgtagggaccaggcatctgttgttcaactcttaggcttggatgaggccagggactgcagaggagatgcaaaaagaccattgcagctgtgggagctgtaggataaataagcctaacttcatgttttacagatgaggaaataggctcagacagggccagatcctcaccaggatcctgcatagtatctcattctaagccctgagctctctgtttctaattgcccaggtctggatttcctggaaggcccagctatggctgagctgtgtgtcagtgggggacatgctggccttggctcctcctgctcacctccaggctaggagatgcacttcttaggtgctctagctgtggggtgggtggccacggtatggagtgggtatgagagggctaagttagctgtgggcccatcccacctctccttggagtgcccaagctcattctgcccacaaagagaactttatgtcctggtccagtgtctaagagggtgaggcagtcctggctttgaatggccctgtaartggcctggccaggctgggtgtgacgtagaggtcagaggtcccctgtactcttaattctgtggtgccaagactggcctggttgacctgtcaggactggggagaagagcacaggatgcagttagacaagcctgggttcaaatcccagttccatcaggcactgctgtgtggccttggagaaggtcgtttaacctcctgaaatcatggactcctcggctgttaaaatggggaggggctacttaacttctttctctaagcccagacgtgtgatcggtgtgtgtgtatgtgacttggggaacccctcccggatcctggaagtgctgcacataccctcactaccagctgggaagcatatgcctgctcctgaagtcagcaccagggcctgggtgccccccacctggtcatcctttctctactcctggcacttgagtctgaggctggggccattcttagatgtcccagacatcaacctgacagtcttcaagtgcccctctcctcctttatcccctctgtctccatcagttaggccctacatcctacagataccacctcaggcatgtctctggagctcccacgtctatccagcccaactgccttctcaggttgggataattacagcagctgctcactggcctgcctccctcccagtcccccttcgccatcctcaccagggagatctttctaaaatacatgtcacaaacctgacttaacttcttttccttgctcctygtgatttcacctttgcccagtgatcttatcctttaatactcggcctaaatgtcatttactcaggaagtcctctcttaccccaaggctgggctatgagctcctcccatctttctgcaggctcctacttgctctcaccctatcatagctctgrttacaccagaaatcatatcttggatagtaggttattttatttggggtccagagtatccaggagcaggcattagcacagaagaagcatcaataaatgtatgttgaatgaaagaaaatgsacagacaagtgcatgggaagatggacayactggttttgggtgaccagctcattcataataggttccatcatacagctgtgaggggagagactgagatttgggagaacatgtgcatggtcagggcttaccctgacaccgcacatactaaaatgctgggcaggtaaataataaccagttgccccccaactggtgagtctcagcctcccagtgtacctcctgctcaggtgaaggctagtgatggagccgtggtagacaagccctatccccacctgctaaattcagctgccctcaggaaatatgctgttaagagatgacagagatgatatggtttggctgtgtccccgcccaaatctcatcttgaattgtagttcctataatgcccacatgtcgtgggagggacccagtgggaggtaatttaatcatgggggcagttaccctcatgctgttcttgtgatcctgagttctcacgagatctgatggttttacaaggggcttttcccccttttgctcagcacttcttgttgttgccaccatgtgaagaaggacatgtttgctttcccttccaccataattgtaagtttcctgaggcctccccagccatgctgaactgtgagtcaattaaacctctttcctttataaattacccagtcttgggtatgtctttattagcagcatgagatagactaatacaagagaggtcacgaaaaacaggtggaatccaggcagtgggtgggcctacgtcagaaagagtctgcatgcgtaagtgccagtatcactagggtgtgtatatgtgagaacatgtatgcccttgtttgtgttgcatgtgtgtgcacaggattatatgtttgcatgtgtgagtgtccctcttggccttgcagcagctgcctctgcatatcacattgcacctatgcccctctgcctcatcttattctccctaggccatcccccatccaatttgcttgttctgagctcctgcccccagtatayagctgttgtacgaatacgatgcaattgcacaaatcactgtggttcattatatagccctattagtttcctattgctattgtaacaaattactacaaatttagcagcttaaaacaatacagatttattcttactattctggaggccagaagtccagaatgrtgttactgggctaaaatcaaggtgttggcagggctatgttcatttctggagctctgagggagaatccattttcttccttttactagcttccagaggttgccacattcttggctcacatctgtcccccttccatcttcaaagccagaaatggctcattaaatctttctcctattgagtttcctatcgggtctttctctgacatttgcttctgcctcccacttccacttataaggacccttgtgatgacattggaccgatccaggataatgtcttggtcagcaaccttaatttcatatgcaaccttaattcccctttgccatgtaagatgacatattcacaagttccagggattacaacatggacatcttcagagaagtgggggattattctgcttacagcaaatagcctgggtctactttaggttgtgagttctttgggggctgagctgtactgtattcatccagagattccttgggagcmattcagtgcccagtatgcaccagatgtttataatttattcaatatatttgttccttccttccctctctctttcacagcggtccacccccatcatggtctgatagccctcccaacctctctggcctccctgcccattgtccctcacaggtgcttcccttagaaaggaatggttccatatctgaaaattagcttaggtttgagaaccattgactaaagagctggccagctctctaagaggaaggaccttgyagaattgcagcaagtatatgtcacaatgattccttcatttttttcccccaaagggacctatggccatttaggtaatcattcactagagaaatggggataacaagacattttgaggagtagcagatgcagagtttgagttaacattaacacttggagcccaaagcatcatcatggcccctctttaagaggccttttggagatcactgtgatgtgatatggcagaaaagtctaggggccttcagatgtccagtgtgtcagcaagagaggccaatgctgagcccctgaaatggcactattccttgagaccaactcatcacttggggcaagtcaacygcatcaggccctttcaattctggaagggccaatggttcatctctacagggatagagacttattctgggcatgggtttgcctttcctcaccacagagccttagttagcrtcactttccagggatgtacagaatgcctgatccaaaggcatggaattccacacagcacagcacttaactgggggacagtatgatagcaagggtcctattgaactatgtatggtttgcggctgctgcagggcacttgggattcttcgtgctcagaaaccagcagacaagaagagtcatcatactggcagggataactgacccggatcaacaggaaggggcaaggctgcttctggataatgagggcaggaggaatgtgtgtggagcccatgtgatccactgtgcacctccaggtagccccactgtaattgtgaaaggatatgyagcaaccctgagaagggtttgattatttagcatttatccccttccctccccctcctctcaccccyagaatgaaggtttggctcacaccaccaggtaagccaccaacatctgaggaggttgttgagggtcgggggaattcgkaatagatagtggacgagggagagaatgaaggccagttatggctccaagattaacttcattggtaggggccgtagttagtcccacagacctcctgctttcttctgagttccccttgggaatagaggcccaagggaaatggggaggaacttctccctgaacctggtggagagtaaagatctgtgtggcacaaggggtagactgtgatgttaacactatagttgtagtatattttagacagttcaaattatgactctttttttaatttttatttttttgagacagtctcgctctgtcacccaggctggagtacggtggcatgaactcagctcattgcaaacaccacctcctaggttcatgtgattcttgtgcctcaccctaccaagtagctgggactacaggcatacaccaccacacctggctaatttttgtaattttggcagagatggggtytcaccatgttggccagcctcttttcgaactcctggccycaagtgatctacctgccttggcctcccaaagtgctgggattacaggcatgagccaccacgttagaccattttagccctgaattttccttgatatgatttgtccattagtatttgttgttgttgttgttgttgttcttgttgttgtttttgagacagggtctcgctctgttgcccaggctggagtacagtggtgcaatcatggttcactgcaacctcaacctcctgggctcaattgatcctcctgcctcarcctcccaagaagctgggacaacaggtgcatgccaccatgcttgcctaatttttatactttttgtagagatggggctttgccatgttgcccaggctgttcttgaacccctgggctcaagtgatccatctgcttcggcctcccaaattgctgtgattacaggcgtgagccactgcacctggcccattagtttaaatatattcatgagaatagaccataatatgtagctggctggagtctcagaaaaccttggcatgccttaatatttgagaatcccatttcatttcttattaatctcttgagagcaaagaaaatcctataaatcctgtcagagaatgtcaagagtttggacccatgttttagatagtgacaactgtcctagtggcttttaaatagccatcctgcmcctgccatttagaatatttatttttgctctcagaagatatttagaaacaagcaagggaaaggagccaaatcatttacagattcatgtaaccaaaccaaaatgaaaccaagataagaatgttcacaaaaatttcaacccaggaatgtagaaaaaattaaattatgcatgcatttattagtcagggttctctagagggacagaactaataggatagatatatataaagggcagtttagtaagtattaactcacatgatcacaaggtcccacaataggctgtctgcaagctgaggagcaaggagagccagtctgagtcccaaagctgaagaacttggagtctgatgttcaagggcaggaagcatccagcacgggagaaagatgtaggctgggagactaggccagtctctcttttcacgtttttctgcttgctttatattctagccgcactggcagctaattagatggtgcccacccagattaagggtgggtctgccttccccagcccactgactcaaatgttaatctcctttggcaacaccctcacagacacacccaggatcaatactttgcatccttcaatccaatcaagttgacactcagtattaaccatcacaacgaagaaagaaacaaaagtgaatttaccagagaagtcatgtcttgcagaaagaacrtggattctggagaaaccagagtactcaatccagaaagacacttgtctttaaaccaaaaaagataaaaaaccttttatcattccaggagaacgtacagtcctttattaaaggtggctttataacgaaaccaaatcctgaataaagttgatataggaggagttaagaaattaggcagatagggtaaggaagtccttggtaaggttttccttttatgaaaagtagctcccaaatrattttcttttctaacaaagagcagcctgtaaaattgagctgcagacataaacaaggaagctagaagtttgcatgggtgaatgccagcagctgtgccaataggaaaaggctacctggggctaggcatatccaacatgacagctccatcttcccttctctttgctagccacgcataccataagaagcagacaagatggcaccagccaagcaaagacctcatttgcataataagattagggtggtgcggccagattccctgggcactacgtaatgtcacacctggtccaaccaatctttgggccctatgtaatcaatcacctcctcaagcctgtctataaaatctgtgcactccactgtgggccggaagtcccatttgggagcccatctctcttgaaggacagagctagctgttctttctctttcttttgcctagtaaacctctgctcttaaactcactccttgtgtgtgtctgtgtccttaattttcttggcaygaggcaatgaacctcgggtattaccttagacaacaactcctgttcaaagtcaagagcttctaccaaaaagggagaggcttggcctgagagaaaatgcaccagggcagaaaatgtgagccatagaaacagagtgctcaaagggctcaggcgagtattgcacactagttccaagagtcacgaattgcttctgatattctttttcaggtcctgcttctggacaccatttatgtcaccctacataacagagagggtctctaaaagaaaataatatttatttaatagggctgtattagtctgttcttgcattgctataaagaaatacctgggccgggcgcggtggctcacgcctgtaatcccagcactttgggaggccgaggcgggtggatcatgaggtcaggagatcgagaccatcctggctaacaaggtgaaaccccgtctctactaaaaatacaaaaaattagccgggcgcggtggcgggcgcctgtagtcccagctactcgggaggcygaggcaggagaatggcgtgaacccgggaagcggagcttgcagtgagccgagattgcgccactgcagtccgcagtccggcctgggcgacagagcgagactccgtctcaaaaaaaaaaaaaaaaaaaaaaaaaaaaagaaatacctgacgtcaggtgtggtggctcaygcctggaatccyagcactttgggaggccaaggtgggaggattgtttgagcccatgagttcaagaccatcttgggcaatatagtaagaccctgtctctataaaaaaattagctgggcatggtggagcacacttgtagtcccagctactcaggaggctgagctgggaggattgcttgagcccaggaggtcaaggttgmagtgagctgtcattgcgccactgcactacagtctgggtgtcatagcaagaccctgtctcaaaaaaaaaaaaaaacaaaactataagaggttgaactggttcatggtttgcaggctgtaaggctgtagaggaagcatagtggcatctgcttctgggaaggcctctggaatcttacaatcatggtagaaggccaagcgggaactttcatgtcacatggccaaagcaggagcaagagagtaagggggaaggtgccacacacttttaaacctcaggagaacttactcactgtcatgagaatagtaccaagttgatggtactaaaccattcatgagaaatccactcccatgatccaatcagctcccaccaggccccacctccagttggggattacatttcaacgtgcgatttgggtgaggacacacatccaaactatatcaagggcattgcaatgggaatacctatataacaccatagtaaactatgtgtgtattcagggaggtaaaggaacacaaaggttttttaaaggaaaaatgaggatcattacataattgttttgagataattatcctggctacaaggatcagtaacaagggtgacactaatccaaggctggacaggcagttgctagacagatgccttcaaaggagtaatttttgtgtaaggttgcaatggcctttgtgcaaggttgcaatttttgcaggtttttttttgatagtttttgttatcaggcatttatgcatgagtactctctcttcatagctttccctggctcaatttatcaggcttttttgttttgttttgttttgttttgcttttttttaaacataagtgactccattttgattctgacaactttaacattgacaaccatgaaaagatttctctcagatctctgactgcagggactgtcattgactattggcctcagctggtatattctgaaatctattactgtgtttccaccaaaaccatgcttcccatggactgctcctagccaatgattgagcatggtggggatcctaggaaggcccattcttggaatatgtgggattcccctgatggctcaaggacttcttatctgccttgctgaacttccttagaactgcactgcactccaagtctcctccactcatctttgcttccctttctttttcacaaggattacaccagcatcatcgtctcttggctcttccagcctccccagagttcctgcctatcaggcatctgcttctcagaggactgagacacattcctgttactccaagaacaattctgttaccaaggaccaatgctgtggtccgtggaccagcagcactggcctcattagaaaygcagaatgtcaagccccaccccaaacctactgaatcagaatctcattttaacaagatgattcatgtatgcattacaatttgagatgcactgatttagatgatttggatttttcagcaaatcctttaaatctcagtttggaaactgagtccttgccaaggtaaatatttggaatcacaaagtaacagatcatctgcgtcctgcatttttataagtcaaagcccagcaaagttaagggactgrttcaaggtcatagattacattagaagaragccagcactagaagccaggtctcttgccacccagctcttycctaccccsgcaggctctgctgtgagcaggctatttgctgtaaatatgcattgtttagtgtggtagcagtggaaataaggctagttgtggtagagtacaaaatatatttgtyctttgttctgggttcctggygcacagtgtctaaaaccctagaaattccctaagtgatagtttgttattcctaacacaccccaccctttaggagtatcttttgctattcataactgcccttcrcaacacctgagtttatgctaacaaggtgattcagggtggggtccctagctaggttaaggatgtgggctggtcatctgaaagaccaaacaagtgaatagagggtgggaactttcagccacccccaacctcgggggagggagggtwactkgagactgggttgtaaaaactcttgaataatgagataaggagtgcctctgggttggtgaacacatcagatgctgggcrggtggtgtgttgcctccctccataccatgcatctcttccctttggctgatcctgaggtgtatcccttagaaataagctggtaaatgtaagtaaagtgttttcctgagttatatgatttgttctggcaaattactgaacctgaggaggggggaytgtggaaaccttcatatttatagctggttggttagaagttctggtggcccttggaacttgcaactagtgtttgaagtgggggcagtcttgaggacagacctgaacttgtggagtctacgctaaatccggggagttagtgtcagacttgaactgaattgttggatgtccagttgatgttggagaactggtatagaaacatgacatgcatttgttttatcagaaatggcctctgaaaaaaaaattagtccaaactcagatgtgctgtaagtataaaatacacactagattttgaggatttagtatgaacaaggaatatatttcattaattttttttggtattgtttactcattaaaatatttttgatatattggagtaaacatatggtaaaaacaaatatattaaaattaatgtctttttttaacttgargatatctatggggcttgcattatatatgtttgatggtgctgctgtaaaccctatctcttcgtcaacactgctttattcactgcttaattcatagctttggctggcattgctgagggcacttctctgttatcagcttgggatctttcagaaattctttatgggatgatagggctacttagtaactcttacaagaatccctgattaaatacctataaatgtcagtttcccttgagaagcaaatgtgccatgttattagcagtttaagctctagctctggagtggagacaatagagtgaaggggtttgggaggtgggaataaaggatttgggtcaaaggggttgggaagtgacttatgctatgtgctcctttgagtttgcatctttcaagagcccattattagaagggttttgtcactgggaccacagaaggaagggccctgttaaggcttctgcaggttgccaagccctggtctttctcccttggaactgtaaagcaaaaaagtatatgagacaggtctcaatcaatttagagatttatttttccaaggttaaggatcatgacccaggacacagcctcaggaggtcctgagaatacaagcccaaggtagttgggttaaaggctcttgtttttatatgttttagggagacataagacatcaaccgacacatgtgaagtatacattgatttggcctggaaaggcagaagcttacaggtcacaggtggattcaaagattttctgatcggcaattggctgaaagagttattatctaaaaggctgaaattaattgaaaggagagtctgggttaagataaggggttgtagagacctaggttcttasgtagatgaagtctcataggtggctgcccttagaggcaacagatagcaaatatttcctattcagacctttaataaaaggtactagactctkagctaatctcttcaggatcagaaaaacaccggggaagggaaagggatcctctacagaatgtaaatcccctccccccgcacaagatacagctttgcagggccatttcaaaatatgtaaaaggaatgtattttgggattaaaaaagctttgatttccttcagggcttgctatctgttgtgtgatgctatactagagtcaggttggaatttggtattttattgtgacagtctattttgtcagtcttaagatctgttttaatgttaatgctggtctgttgtgtctaaactccaaaagggagagggtataaagaggcatgtctacctccttgcccgagcatcatggctggaactcgtttttcaggtttctctggaacccccttggctgagagggggtccattcagtcatctggggggcttggaattttatttttgtttacagaacccagtattctccccgttcacagttaagacctgaggaatgaagggcatccagatactgacgctgtgaacacagcttctactcaacccctaatcccagttgtctccctcctgactgaatctcagggacacggcaatgtgtaatggtagctgttgagaggcctaggaccaaggaaaggcttgagggcccttggctagatcagcatgctcttgagactgaggagaaccgaaagctcaagggaatatgtcactatctatctcaccttgagcctcagtggctatttgggatcctcttgcttggctcagaggactctggatgtcaaaggacttaaaggctctgccctagatgaaaacttgcattctctgttggctacatgaggtaaactcatgggcttaaccaaggaagtactgtctagaactgaaatcactgatcatttgtactgtttaacaattccgtttgggaggccgaggagggtggatcacgaggtcaggagattgagaccatcctggcgaacacggtgaaaccccatctctactaaaaatacaaaaaattagctgggcgtggtggtgggcccctgtagtcccagctacttgggasgctgaggcaggagaatggtgtgaacccgggaggtggagcttgcagtgagccgagattgcgccactgcactccagaactccagagcctgggcaacagagtgagactctgtctcaaaaaaaaaaaaaaaaaaaagttccctgaagcagaaaaatctgctgctcaaacagacttcaatgtctcatgcctaaaattttcacaaattaccatatactctgggtggtggaatggacccagaataggtaagggacttaagcaatttcaaacagcttattagagacagtggtaggagtggcagcacatatgagaatcttggcctcaagtctcttacctaaactctgcagaagtgtgtctggaacccagaagctcatgctaacatgtccagtatccctagttacttcttgagcaaagggcagtgatgacattaggagaatgaaggaacaaagtgggtcatgctttgttttattcttgaacctttagtcccatgtatgaatcctgagtgttaccctcctgaatgctgtgcactacagaatgaactttagttcacagtaaatgagggatgctttttcttaagaaakaaatttaattcaaggtggttagtgaatgtgaggcaatgtaatgccttcacgaaagttaaagtaatccagttacaaaagaagcactgtgtatagtctcaaatagytgaaggtacaatgggctccatattttacaaagtacaaaaaattatttcatatacaaagaaaaatacaaataatgtgcaaaaaccattttcacaggtggcaatttataaaatggaaatgatagaaaagtccttcattcttaattatccccaratttcttatatattaacacagttctatttcctagtgtgtggacaatttkaaatttgaaattctgatttatttttaatctacaaagtatttttattttttaaaagggaaccatttcattattgaaatcttatgaatgcatcagttaatttatattaaattataagcaggctatctgaaaaacaaggatatagaaatcatatatacacatttttgaaatatyagtttagtatttaacatattaacatttcaaaacaaatgcaatgatctagctacctatgacgccagctggtgtcagtggttgtagcgaagatgctgtttctgtttaccatgagcaaacagcatttcttgggtcttaagctaaacaatcacaagttatcaaagtaaagaaaatctaaagacagttcttacttttcatgtgtagaagtgtagtttgggtatccagtcatgccacagtgtgactgtggtcaacacagcccttgtcacaggtgcgtatggtcctaaatagctggcctctgtctttccaacatcttcacttcattgggaattcagtgcaagtgtttgttttgtgagttagtgcattcagctttttttgcatgttattttgaaaaagaagctgtcaggaagcagaagatacataagaacacaaggccctggatcctcagagcacctctggtctagagaattcagtgttttggaagtagtgttttcctgcattgggctggtcattgttgtaccattccctggataatctttttccatcagaataatgctgtgtgctccctctttgcctgctactgaacaatgacgtctcttgttgtgaaccccactggcagagcacggaccatggaarcatcttttggcagcaccagagaactgagcatctcaaaggtcaggcattacaagtagatgtctctcataggaaacctagtccaggtagaatatgagacaatcttggagggttttgatttttgcttgttaaacaggtctccgaggaaattatgacctcagagaacaaaaaaggatctatagctttcatgaagaaggacccaagtaggtggtagccattttgcctgggtgaggttcacagttggctcaggagacatcttctgatcattaaccactaagaccctgttagaaaaatttagtgcaagatacagggagtgcatggggctgttgaccagacctgtgtgaaacacctattcaggttaagtagatatagcaacccctgcaagaggggactgggcaggagaacctcaggccctgggataacttgttgtcagctcctcaaggatccatgcttctttttctatctatctggcagcakgagttcttctgtttcttctgcgtgggttgaccatgggcatcaggcatcagagatacaactctggatcttgtccatccattgctgggcactctgtccatcctgggcgcagaagttatacacacgtttgctggtcttgagctacaaaaccaaatgacagtgaaccagagatgaagggcagggctgttttatggatttgggtaagtggtaaatcagttcctgtgacctttcttttccatactgccccagaacgtctgtatgaatttttcttcctcaactaccatactgttattgcctttacttttstggtctctagagtcataggggatgttgatagaagggtactggcaggaaagggagacacactgggagcgccttattttgcattttcttagtgtcgtctttgactaaggaggaagggtcagcaatgaatggtgcctttaacctttcccatgcactgcaccaatgcactgaaggtgagggagctccttgtgctccagggggatgcctgagattcatscataccataaagttggccttcgtgtcccctttctttagttggagccatattggaagcccactgtcaggaaaacggtctcatggcctgagcagggccayagaggatgacctatcctctttataaagccctgcttgactccagggactacataagtctccttctattatgtggcctataaagtgccccatggcctacctaagggctgctgaagatgttagcgtagacacttatcatgtgtgactaaggacagtcttttgtgggtagtcaagcacgaagaccactgaatactagggaaatagcatctgttcttgaaagtaggtggtgactgaaataactaacaacatttaacaaggagttcatctgtttccatgtgcgctggactccttttgcacaaagcaatatgtagcttttctgagacatacagacaggaagagaggatagccttgggggtcaataatgctgagttcaagctctggaacaattcccatagccaagggggtctgtcatccmtctgtagtcaccaccaattactctgagggctccatcattcttggagacagacagaatgatgtgcagacagagccaggaaaagagaagtaagatcaacttacatcaaagaaagccttgtcacttgtgtgctttggggctcccatgctggggccagcagggatgaccatttctacttcagccagatcaatgtggcctttacagcttgtgtcctcacctgagtcatagtagcgcagctggaaccaaaaggatacaagtgagatataagagacagaaagagaaaatgccatggcttttcaaactgcatttgaataccttcctctgtaccttggttatatatgctgaactatgcctcgaagaatacacaaaaaattaattaataatacttgttgcttctaggaagaactaggtggcttggagaaagcattgggggaaagacttatgtactgtttgaaaatcaaacaaataaatgtattacatcttaaaaaatagaatcaaggctgggcatggtggtttatgcctgtaatcccagtcctttttgggaggtgaaggtggacggatcacttaagcccaggagttcgagaccagcctgggcaacatggtgaaaccccgtctctacaaaaacatacaaaaatcagccaatcgtggtggtgcatgcccgtagttscagctacccaggaggctgaggtgggaggattgcttgagcctgtgaggtcgagctgcagtgagctgagatcctgccactgcactccagcctgagtaagaccctgtctcaaaaaataaaaaaaaaaaaagaagtcaagtaacaactgtaaaaagtatatgtaacatataaaaagagggctaatgtttagtaatatacagaattcccagaaattgataagaaaaagataaagtagaaaaatgctcaaaatatctcaacaggcgagtcacagagaaatacaaatgatctataaacatctgaaaagatgatcaacctcattaatcaaagaaaaataaatgacaataaatgagatttcacttttggattgagaaatattaaaaatggctgatgatatccaataaggtactagatcatctcaaatactgccagtgtgaatataatttgttagaaattttttggagaacaatttggcaatatcaactaaaatttagaatgtttatgcctattgaaacatctttccaggccgggcacggttgctcatgcctgtaatcctaacactttgggaggctgargcgggtggatcacttgaggtcaggagtttgagaccagcctgaccaatatggtgaaacccygtctctactaaaaatacaaaaattagctgggcatggtggcaggcgcctgtaatcccagctactcgggaggctgagccagagaatggcgagaacccaggaggtggagcttgcagtgagccgagattgcaccactgcactccagyctgggtgacaaagcgasactctgtctcaaaagaaaaaaaaaaaaaaagaaaaaaggaaaaaagtcaaagagactgctagggaataagccttattgggccataatctgtggatttcactctctagtatacatggcaagaaagtggtgcttctgatacygtggctctgacctgagacttttctctgtctctcctctcaggcatggtatgagcagggctaagtggaaaaaactgtatctathtttcatgttaaagaagtccagaagactggtaagaatgcaagtgtaatttgatgtaaattatagaaaaattatgacattctcctatgttatatttagaagcttaatggaacttttttacacagtgtaggctctatgatttcagagtatagctccctaacagggcttccatttgtatatttgaacataaattatctatctatattgtcccacaaagactctgtaatcgttatgaaactccttgagcagaggaaaagctggactccaaatacagtcttcatttggaaggagtcttttagatgcaggtccaaccaaagcactgtacaggagtaacagttcaggtttttcctaacagattccattttatagataaatgcattgagaatcaaaatgtgtaagcctcagcctcaaggctgagtggtcagtcccaaggtggagttaaggcctgcagtcagaacacaggagaccatgcagctctcagtaatgcagggtgcagagttgctggaggtttgggtaggaactgctctcccttgaaatcactggagtaaagactatgatgctaaggattgcagaggctgctacaggaatagctaagaacctaacagtagtcaaaagatttcttgacatagtcagcaaggaccagtctagtacttgcccacggtgaattccaagtttgggtgggcacatccccttctgccrcttttggggcccctttactcccctgttgctgccatctttgaagggtaacagtgcctcctttagtaaccagtacagcagtgggcacagaggtggtgttcgataaatgtttgtagaataaattaatgccctctgttttgaatggatgctttctgctgcgaggacgaaggtaacttgtattctggggagtgttcacaggcacaggcttatatgtgcatgtggtatgtatgcaactggctgaaaacctcaggaatcccctcacctgggtgttaagatcaggcagcaagagatatttgagcattaaaaaaagagttctattgctctatgctctgggctcaattgttgctgcctctgcctgcatgtaccaggccgagctacttgggaaactccctcagaaggctattgcccttactcagggacatctggggcccttgaggagcctccagactacatatgagaggcactaaaaaagcagtctgtacatgaggaatctatctgtctgctagagccacataatagccaggractgggactagcctagacagaagtaatttcttttggctttaagagtattacctgatgttttgttacatccaaaacaaaccaacggggcttccaacctttcagcaaagcccctcttttataaagtgttccctcaaaggacctagaagaaatgatgacaggagagttaattttgatttacacttacaaaatgctgtaaaggggaggggatatctgttgtttttgtcaagtctctatttcccctagatgattcaaaaatggcctataagagttctccctggattttttctgctagacctctggggaaagactgctgctttctgctgggattaccacatctgtgaggcttggaatgatcagtagccatcctttgtgccatgttgggactgacataacacagagagagggcaaagcagagccaggaagtggatagaagatactgtgtgagaagctagcatacccttggctgtcctagcttatgtgagtaaattcctttttgcttcagctagcataagctggatttctgatgtgtgccactgacaaagtgctggctgacacatgttccctcaaacgttctggcagacaggagataagagccatcaggactcaactacaaataactacaacctcttcgaattatttttagttgtaatttttgttttttgtcttttcaaagaaacatctaaaacattacaaaaattaaagcaaatccattycaagtttataaaaggctgtactgcacaggcctagcttattgagggacctgtggtttagcctcaggtgctgtggggaagtcttcagcacagcgagcagggttcagcatgtcacctgttttcatcattcttggatgtatactggctatagagcgtggctgctcttcgctccactccattggatggggagatgctggaattctgttcctcccccatgctgctgtctgggagatgtagcagagacctcttctgataggaaggtaggttggtagacacaattcctggggatctcgacaggtgtctttgggactgaaaaagacaggacaggagctaggaaacctttacagacacttaaactactgactgactggaaaatttcatttacaaatatttatctcaaggaaaaaactggactaataagcaacaataatgtacaaaggtatcaatctcagagttagttatcgtggtaaaaaactggaaacaacctacacgtccattattagggacattaaacaaattatggcatttccatacagtggaattctagacagccattaaaaaatgatgctgctatgaccaggcgtggtggctcatgcatgtaatcctagcactttgggaggccgaggtgagtggatcacttgagtccaggagttcgagaccagcctgggcaacatggcgaagccccatttctacaaaaaatgttttaaaaatgagccaggtatggtggtgtgtgcctgtagtcccagctacttgggatgatcaccagaaccctggaggttgaggctgcagtgagccatgatcacgccactgcactccagcctaggtgacagagtgagacactatctcaaaaaaaataaagatgttgatggttttttttttgacagggtttttactctctcgcctggggtggtgtatcgtggcattttctgtgcttactgcgcctttggaatccaccagtgtgcggnnnnnnnnnnnnnnnnnnnnnnnnnnnnnnnnnnnnnnnnnnnnnnnnnnnnnnnnnnnnnnnnnnnnnnnnnnnnnnnnnnnnnnnnntggcatgatctcggcttactgcaacctctgcctgctgggttcaagtgattctcctgactcagcctcccaagtagctgggattacaggcacacactaccatgcctggctaattttttgtatttttagtagagacagagtttcaccatgctggctatgctggtctcgaactcctgacttcatgcctgcctcggcctcccaaagtgctgggattacaggcatgagccactgcgcctggcagacactggtttatacacagtgacagttggaaggacacgtatgccaacgtggagtgaaaaagcaggtttaaaatagtatgtctagaaaatctcttttatatgtgaatttataagggtaaaacaagtttgatagcatagtggtttacttctaggttataaattatgggtgatyctcatcttttataactttctgtgtgttctttcaaaaaaatgaacattattactttcattattagaaaaaatcaataaactattatttttctaacaaaaaagcattaaggcatcacccacctgttgtctgtctgataacagctcctgaattgctatttgagggtaagagatagagccccagatgttctttttttaccacaaaggttttcttctaccctccattcttcttgacctttctgtaacatctgacctgctggcctcttcttcctgaactgttcttcagaacactcatctgtcctaatttcccttctgttgcatttggagccagtctgatgtgggttcgattggtggctctaccagttgccactgtatgctctctgtgcctgttccttgtgtaggagagggaacgccattccctcacagtggattaaataggatacgaaggtgtgtactgtactaagcacagacccttccacatattatgtgcttgataaatgtttcttaaatcagaaayaggaaatggggtatgagaagcagaaaacagagtatttggttttaaaatatatatatacatttttttgagacggagtcttgttctgtcacgaggctggagtgtggtggcacgatctcrgctcactcactgcaacctccgcctcctgagttcaagagattctcctgcctcagcctcctgagtagctgggattacaggcatgcgccaccacacccagctaatttttgtatttttagtagagacggggtttcaccatgttggccaggatggtctcgatctcttgacctcgtgatccgcccacctcggcctcccaaagtgctgggattataggcgtgagccaccgcacccggccgttaaaatatttttatgataaatgtttcttaagtcagaaacagaaaagggactgtgaacaacacagggtagcatattttgttgttttaaaatactttctgtggagcaaacgtggtcttggcattcccctcctgccttatgtggtagaagatcagctgaaaccacacgggcactgagatagaaaagaacccaatacttttccttggattcggggtgctgagacataagtattatgtcactgtggtgaagtgagacactcaggaagtattcagtcatttggaactttctgccctggacctccaggacatgacccctcccctttccacccttccttctggccataaacccagctgggtcttgtcacctgtggcagcaggctccacctgacttagcaccctcagaaagctcagaagtggctctcaaggggcattgccaactcacgcgatctgttcttggttcttctttaaggtccacggttaccctttcccacagctgctgccacttctcaggggcttggttcaatttgtgctccaatttttcaatttcctgcaaagaaattaraagttttctgatcagtatttcatagaaatcaggatgggccccaaagccacactgcttctgtactaggcccagatgagcagcatggccagagggcagttgaggaaagtggtggacatgggcctgtgaggtctcccagccaggaatagtggtgagagctctagttggtgtgccgtactgtggcaaagatggtttattaggayctataactaggcctttttgtacaggatagcttacatactaggatgtgaaatatgtatctcagacatctgcacccttgggcagcccatgggaaatctgatagccaaagcaagaggtcaagcactggcccgtggcccagccctaatagctgaggtagatgagaagccagtccttgacaggaggaacccctcaactctgatgattcaaaccagatgtggaaagaatgaaccaagaaatgcccaaggaaacagatataccttctgacagggaagctggaaatcagggcagctgcctctgtgactgtatgaccactgaagcatactcttcctggtcaggaagccagatggggaagactctttaggaactgtctggcccatatcagggctcaaagctattcctcaggctggctactgccaggaggggttggttccggaacattccttgcagaagatggttgrcagcactcccatcaggccactgactacccacacttctgaccagaggaagtaaagcacccacagaagccacagccaagacctgactaaggctgctcgggcaactaaaacagctgggaagctgcyggaaggagtaaattgctctatttgcttgattgctttcttgtaacgctggaaaatcactttttttttttttttttttactgagacggagtcttgctctgtcacccaggctggagtgcagtggcgtgatctctgctccctgcaagctccgcctcgcaggttcatgccattctcctgcctcagcctcccgagtagctgggactacaggcgcccgccaccacgcccggctaattttttttttttttttgkatttcttagtagagatggggttttactgtgttaaccaggatggtctcratctcctgaccttgtgatctgcccgcctcagcctcccaaactgctgggattacaggcrtgagccaycgcgccaggctggaaaatcacttttattgagactcttttccagtagtgaagcctggtcccccactgatgatggggagcaaatctggtttcttcataaccataaccctagctcagagtaaggagagccatgttcagaagttacttagcctgrttcctttgccctcatgcctccagggcccctggtgcccctaggtgtgtgtctacagttgacttacactgaaaaggctggtgagagcatcaggctgagtacagctgacatcatcatagcatggccacactgttctcctctggctccgtggcccagcttctccagccaggtcagagtcttcggaggggaagtgcttgggggttagcatcatccagtcataggaagggcctgtggacagggtctcttctatgtagtaatcccacttcttgaggctagagacgtttacattgggctttaragcctgttaaagaaaacagaaatatagtttcatcttgaccccaaagtaccccaagctcactgtcaggcaaacccctaacatttatagagtccaggggaggaagagtatgaatggagttcaaataccatatttctaaatatttaaaaatcatamatcaagataaattattaaataaaacattctccaatcctccctcctacattgagaaatgtaacttcctaatgacgtagaaggtcaagttcaatagagaattcttggattcctcagaattttatactaacaagtggtagcactggaggagctggccccagccccctgtccttggcctctcttctccacccacccctatcttacattctaagggtcttaacatgaatcattatgtataccccagcccacaaagtcaaactctgtccactctgtcaaacctgctactttttgccattctttgggccttggggtccatgcactgacttaggagactgacttggagaagtagcctggtgagcagcctgaatttgggcaaagaattctgaagtacccagacagagtatggtttagatgaaggaggggcatctaagcatgtacctttggtttcttgtactgctcacctccatgaggaggatgcagctggaggaaggccagactagggttctatgattggggcccaggggaggggcctctcttggccctaagtaatggtrgaactgcttatcagaccagtctgttscattccagggcgtgtgttatgtagatgtgcatggtggggcagttgccccgagatatgttatccttcttgggcttggctccgartatctctgcttcctacaggggtccttccatggctttggtacagatgaacttaaagaaaccttttctaaagtattttaaggtttttcagcttagaccacctgttgatatttcaaattttgttagttctttctttctggggaaaggtgccttgctttgattctctgcaagttttcccttctaggttttgagagccagctcctaatttttgtggcaagaatttagggaacagtctccatttgtgtcacaacccaaacctatagtgtctcaaactttgaaatagctttttggtatgaaacctagtccaatgtttataaaaagcttaaactgcttatatatgktaaaactaaggaaaaccttaacacaaaatttcagaaagtgaaacataaatgatttcttactctacctctatttccaatggtgaatataaataattaaagaaaatgggactcctcttgtgcattctgtcaatacattcccaaatacagactccttttttggcatgcttttctcctttatcatcaaataaagttcctgtarattaaaaaaatccaacaaaacaaaattaaataaattcacactttgccaaaaaacgtatgatgcatgcagcagataaaaaagtggaatattttttatggctttaaaaacagcaacatttgtgtgaaaaccttagaaaataactgcaaagctaaagaccggaatgaatttcatcgctacagggaaacagatccagatggaggaaacatctgataaagtttgcctaagcagccagcagtctatcaatcatgactcttccaaccctcatcctgcatctatatctagattcaaagaagtccatgcaggaggcagtctacacttttcaagagaaaatggaaggacttcagagttgatttgatgaagctcagtaaaaaacataattttatgtttctcttttaagttgttggctgtttgtttattatgaagccatttaaagagttttcttgtttagcagtgtatatatactgcagatcatggttactgagactctagatgacagaagcgtgtagtctgtgtccttgggtgacttaaaaataaaagcagaacttttatacctttttcaaatagtcaatctattactaacatgagcccactttgtttttaatagggaggaaaatgtgttggggtgaggcaaaaagtagttctttaaaaggccatgaagggtgtctcagcagtggtgtcttgcttggaatgaagtgacatagtcaaaatcaacatgcattttaccagtttatcaaaaaaaaaaaaaaaaaaagactcaagcccaagatggcatgaaattctataatatgtggggcccctaagactaattaacagtttcttctctaccttttaactgcagggtccagtgcagtagttctcaaccttggacatggatttaaaaaaccaagggctttaaaaaaatcccagtgtccaggtctcacctcagaccaattaaatcagaatctctggggatggcccgagatattagttattttaaaagttcaagtaactccaatgtccaaagttgcaaatgctctaggggttgcagtaagattttgaaagccaccttgtatattgctccatttggcgcctygaggcatggattagactgaaaggctgtgtggtagtcagcccaagttgaaataggctctaggcacctttgtagacagaaagagaatgagctgaaaccagaagaggagatgcaatacatggccctctgttccttagggctgttgtaacatcttgtaattggaaccaagtccaatggacttttcttacagtatccatatggctggcttagggcaacatgtacacatataaggaacatcttaaaaacagtccaaatcagacagctagtgccaaatcctatcaaattataaccctataatccagtatgtaataatcaacatattaagcttttaggacacaggagaattcattgtgtttaagtttttctgataaaatcttaaaaattatgactcagcgtggtgcggtggctcacatctgtaatcccagcactttgggaggctgacgtgggcggatcacttgaggtcaggagtttgagaccagcctgccaacatggtgaaaccccatctctactaaagatacaaaaatcagctgggtgtggtggcgggcacctgtaatcccagctactcgggaggctgaggcaggagaatcacttgaacccaggaggtggaggttgcagtgagctgagatcgtgccactgcactccagcctggcgacagtgtgagactccatctcaaaaaaaaaaaaaaattatgactgatgaattctaccagcagtggttgagattacttactctccacttcgtcattttggcagatagagggtagttaccacaggtgttcctaaacaaggtttcactgtaggcctgataacgagtgcatctaccagaacacaagaaggaacagacttcaagtaggcaacctagtctggactagggacacgaaactaggcttccttgatgttgattaggtgggtggcctaacatccagagaggaggctgggtagatgatttctactgaggcttcggcaatgacattctaggattcgaaatgcatgtttatgtgttgttgtttttgagacagggtctcaaccctgtcacccaggctggagtgcagtggtgtgatctcggctcactgcagccttgacctcctgggctcaagtgatcctcccaccgcagcctcctgaacagctgcaactacaggagtgcgccaccacacccagctaatttgtgtgtgtgtgtgtgtgtkttttttttttttttttgtagagatggggttttgtcatgttgcccaggctggtcttgaactcctggggctcaagcaagccgcccacctcagcctctcaaagtgctaggattataggtgtgagccrttgcacccagcctgtgtttatgagttttaagaggaaacatgtttcataggatggaaatgcttatattttcaaataatcatgataatctttcaatatataccaaacatatctttttatccgcatcattgtatttaatcttttcaacagccctgtgtgataggcagggctgtttagtttttcagatgagaaaactgagactcagagatgaagtaatttacccaaagttactgacattttctgatccttgatctacggctctacccgtgggaccagtggtgggtctcagacttggcagcataatgggctcacctggggagtttttattttttattctttatttttgagacagggtctcactctgtcacccaggctggagtgcactggtgcgatctcagctcactgcaacctctgcctcatggggtcaagaagttctcgtgcttcagcctcccaaatagctgggattacaggcacatgccaccacgcctggctaatgtttgtatttttagtagagatggggtttcgccgtgttggccagactggtctcgaattcctggcctcaagcaattcacccaccttggcctcctcaaagtgctggsattacaggcgtgaaccaccgtgcctggccttacctggggagttttaaaagctgttgatgcctgggccttaccatcacagattctgatttaagtggttggggatgttgcctggaccttggaagttttaaaagctccccaggtgattctaatgttcagtcaagtctgagaaccactgcactagaccttgttgcttctctaatgaagagaaccatcatctgctataggagaagccttggtctttggccacatctgcatgctgctaaggtaatttgctgatcagcttaattcagcaaaacaaactgctttattaaaaaaccaaaaacttagcctgggcaagatggcagaaccctatgtctacaaaaagtacaaaaattatgtgggcatgggggcacatgcctgtggtcccagctactcaggaggctgaggtgggatatcgcttgagtcccagtggcagaggttgcagtgagccgagatcctgccaccgcactccagccggggagacagaggagaccctgcctcaaaaacaaaacaaaacaaaacaaaataccactgcccccctgcccacgaaacaaaaaaacaaaccaaaaaaaccccaaaaaacacaactactccaaggaggcaaatacctgcgttttactcccaatatttgtacatgttgttcctttcagtgataaagctgagtgacatggtgacccctgtaggtacaggtcagtccacttaagaccaggcctggccaggcgtggtggctcacgcctgtaatcccagcactttgggaggcagactgcttgaggccaggagtgcaagaccagcctggccaacatggtgaaaccttgtctctactaaaaatacaaaaattagccaggcatggtggcacaggcctctaatcccagctactagggaggctgaggcaggagaattgcctgaacctgggaaatagaggttgcagtgagccaagatcgcaccaatgcactccagccttggagacagagtgatacagtgagtgggactccgtctcaaaaaaaaaaaaaaaaaaaaaaaaaaaaaaaaaaaagaccaggcctggggcagttgtaaccagttatacttactaccttcccaataagcagtatgcagatgcttaaraaattaaggtttctgattgtgatgtgaagaataacaattccatgagccaacaaaggtctggaagtataaacagggtggaaaatggtctcaccagtgctctttcccttatcaaaagtatgcartatcatactagacaatttcaataggatgccctggaaagcggtatttcctgatttcagatttaaaactgagaacatcagtaaatattttcttggaattaagagtcctctttgtggtactgagtgcatataatatattgaacagaactgattttcgtttgcttaacaaaaatggtcatgtgtttcctctcccccgtaacagttataaaagtaagaatgtaaaattcccttgggaaatgtttttaccggggctgactttcagaatctactcattacaactatcattgctattaaaaaaatagttcatcactatcattactaatgcgagtgatgtctaaaatttattgagcgcttactatgcgctagtgattgggctaagaggctaagtgactgtgtgaagtttacaactttttcctcatgtgatcatcatggccctgacaggtgggatggtattactgtccttgttttaaagatgaggaaactgaggctcagagaggtacttaacccctccccaaaatactcagttggtaactggcaatgctgggattttaccctggtctgtttcgtctagagcacagggtcttagctgtattcaagctgcctccaagggcaggcacccttcctaccagagtgcatcagggttggaaaaactaggagtcaaatgtttcttctcaaacagtgtgatcactttgaggtatcaaaatagtaaacatatttaattttagaaagatgctataggaatgaccacctgctaagagctaacgtggcacgtaatttcagaatttggccacttatccactcctctacattcatagttcagagttaaaccttaactcagcttgtcagtcttggggatagttacattattagaattttcattaaaaacatgcagaactaacaaaaaagatgaaacaagggcatacagacacataccgtgctctaatctttcatagtctgaatccaggagaaatgttttaaagcgattagacacatagtggaaagccaagaactttaagtaatagagattgaattcaaactcagttggatactggttgtgaacctgaaacacacaaggcaaagaaaagagtaagaatcaaacagaacaaaaagtggatgccaggccactgaaggcttaactgaaacatgcaggagaccattcagtcattcactcaacaaatacctgaatccctaccataagtagagatgggaagggaaccagcttttccgagcacctactgtgtgccagacaccagacgagggttttttttttttaaataaacataatctcatttaatctctacggtatagcaagagaggcattattatctccactttacaattgagaaagcataggatcagcaagattaagacatttacccaatgacattaaacagtagttagtgagcccaaatttaaccctggcttattaggctccaaagtctctaccccactcactacattatactgtgtttggcaattgatagatatatattaacataagttatggttcttgctttccaggcaactgtggtgtaatagtgtgacatacaacaagaaaaaytgttcttacagaagtttggcaatgaaaaggattgagaagagaaggtggctgcttaaggggacagcaagagatgttttctggtcaaaagaaatgtgtgtgtgtctgaaggcaatccagaaggagccartagagaaaacaaattttagaaaaatttgttagctaataactaagagaataagatcctgggaaagcaagaatgaatgaggctcgggcctagatttagggaacagctttggaaacagggagggatgaaaggtaagcaagagaaagatagttcaagtgccaagggaaagggcaggagctaatgccttttagccctaatttttcatcagtaaattaggcagtgaggtcattgggcacaggaataggaatgagtgaatgacatgggaggcagaaggctgggcaaagcttggaatggtcattgagctatagcatgctttaggcaaaccgtatacagactgtggagccatcttacattggcagagggtaggctgatgaccctgtgacactccctagtctgcctcgcaatctcacctctatattgctcaaacaatctctcatgaccagctagaaaattttgtttggctgaagtaagttccaatcataattgtacttgctcaaaagctggttcaaattaacactaaatttaggcaagctgtctaaaagtcagcgttctcctccatgtttaatttggcaatacggacctgtacttagtcagctgggtcagccaaagtgagcaggcatgtgtgtgataatgttgattgtccagtggaccaatgggaatttaaagtcgtgatctggatatcattgatttatcaaaatttatcatctggttaggaacctggttttctgtgatcattaaagggttttctacattttcttaytggcttttgaattgaagtaaaattttagcttgtaastaatgtaaaataaaatggattttaggaagatgcattaaaaaagagtttgactcctatgcagtgggcctgcaaaccacggaactgcttccttgatgtgagccaatgccttcctgttgcatcagatctccacaggacagcagarctttccatgggacatggctctgaatagctaggtagcgtgccatactccaggtttgtagaactgtaagcatttgtattacgtagagttttctcatcagtgaaaatgaagggataagaaatcatgggtttcctatgatcatgcaatacaagcaactaattataaaaactggctgggcgtggtggctcacgcctgtaatcccagcacctttgggrgaccaaggtggaaggatctcgaggccaggagtttgagaccaacctgggcaacayagtgagaccttttctctacaaaaattaaaacaaacaattagccaggtgtggtggcaygtgcctgtagccccagctactcaggaggctgaggaggaggatcgcttgtgtccaggagttcgaagctgcagtggagccacaattgtgccactgtactccagcctgggtgacagagtgagaccctgtctctgaatgaatgaatgaatgaatgaataaatgataaaggctcaacttgaggagtttataattataataaaacaagcagatgtgacacataattaaggatcaatattaaaaaatcttttatttccttgttttgttagccctctatgtgtgtctcagtagtcaaccatgtcccttaatacagcaattctcattcaaacgcttgcctctactgatacttatgcacagcaaagaaggccctgggtttgactctctagtaggcctggttctctggtcttcctggctcctttcttaagcattgctcagacctcaagtttccccctcaacctgtcctgtaatgccatacagagctctccagtctgagctgttgctttggaatcaacagccccaccccaaggagccagtgatggagaggggggttactcagattgtggatgctgggacagaagaaggggacagggcaactaaggatggaacttggttccctaccatctgaatcctggggatgagaaatctgcagtgtgctcaggcagggtgagctccaaggacaactgccccaacagcccttgggataaaccttcagtagtcacaggccagcccctcactcactgtttccaagggaggaagagttctttccactgaaccagtctacaatatgttytaaaatttcttttaaaaatctttattaaagcctcaagggccaggcgtggtggctcacgcctgtaatcccaacactttgggaggccgaggcgggtggatcatgaggtcaggagattgagaccatcctggttaacatggtgaaaccctgtctctactaaaaatacaaaaacaaaattttagctgggcgtggtggcgggcgcctgtagtcccagctactcgggaggctgaggcaagagaatggcatgaaactgggaggcggagcttgcagtgagccgagatcgcgccaccgcactccagcctgggcaacagagcaagactccgtctcaaaaaaaaaaaaaaccaaaaaacaaacaaacaaaaaactgtattaaagcctcaaaataacatttctctcaatgactattcttcatagaaaccagatacctcatacatacttgtatcttttcttgatgattctgayatttaatctactcaggaatacaattttgaagacccacttctgaggtaacagtagaatggaaatatgatcttaagttgaacttacaggcatttcagggagatcatgtgctcagattaaaagtgaaacgtctttacaagtcaaaaaatgctttcgtagcccagtatattggcctcaccacaagccctctacagttatgctagaaaggttagacaattttccaaggcctcttgtacccactccactgggactggaattggtgcttggagaaagcatcaaggtgtatacgcttgggggcactatgcatgtgtcctcctgtgtgccacaggagcacctgcagtcgctaactggggttgaaaaacaaacctcccccaaactggggttaacgatcaggtctactggaagtggaagagaagatgcagagcaatttgttttttactcttcagcaataaagtaacaagcatgtaaacatttctttggtggaaaargaaaagtcagatagacctcaagcctgggttgattagtacctagataccacgtttagaatccgacattaagaaacataaggaattttctgagatgtctttcttccatcatgtaagaagaaatgatgagatggctgaactcttacggtgcttagatttctaggaagcaagaaaaatcatactttctccattgagtcctgcaccccagtgactcagtttgtccagttcactggcttcttttcctctttgcaaatggaactcacctagactcttgtgattttaatttgcattttctaatgaagaatgatgtcaacttttcatgtgcttatttgcatatctttggtgaaatcagtacaaatgttttgcccatttcaaaaataagctgttggccgggcatagtggctcatgcctataattccagcactttgagaggctgagrtgggtggatcacttgaggtcaggaatttgtgaccagcctggccaatatggtgaaacaccatttctgctaaaaatacaaaaattagctgggcgtggttgtgcacacttgtaatctgagctattagggaggctgaggcgaaaggattgcttgaacctgggaggcagggttgcagtgagccaagattttgccactgcactccagcctcagggaaggagcaagattccatcctaaaggaaaaaaaaaaggttgttttcttattattgaattttaaggtttctttatgtgttctagataaatccttcagcaaatatatggtttacacatattttctcccactgtgtgattggtcttttcatttgcttaacagggatttttaaaaagtatttatttatttatttaaattattattatttttttgagatggagtctcgctctgttgcccaggctggagtgcagtggcgcagtctcggctcactgcaagctccacctcccgggttcatgccattctcctgcctcagcctcccgagtagctgggactacaggcgcctgccaccacgcccagctaatttttttgtatttttagtagagaaggggtttcactgtgttagccaggatggtctctatctcctgacctcgtgatctgcctgtctcggcttcccaaagtgctgggattacaggcgtgagccaccgtgcctrgccaaaaaaagtatttattatgttttttagaggtggggtcttgctgtgttgcccaggctggtcttgaactcctgggctcaagtgaacccaccttggcctcccaaaatgctgggattataggcttcagccaccatacccaggatcagccttgtaatatttgtagaatctgtagtgacgtcatctttctcatttcttatattggtaatatgtgtcttttttttctcaagcagtctagctagaggtttatcaattttattgatattctcaaasaacagcttttggtttcattagttttctttattgttggccacaagattttggggacctaaaggcaagtgtgcttcamataaatttagccttattatattatgtagaattgggaatgataggtatttcagctaataaattaattctatgtcagcatttccctaagtatggtgatgaatagagttttaggcttctctcaggtatcatctggattttgttgttcaaaataattttgtatttattttgttgcaggttaaaaagtatacagacttaaaagactaaactgcatgaagcattttagttttgtttttccgttatggagtgaaacttgccaacttcacttatttataagaagagaatctgaaatggaatttggagaaacatgaatttatagggtctttttttttgcccatgtgccattaagtactttgtaaaatttaaaggcctataaaaataagctatgactcaaacccctggaaagatcaacattttggaagtaaagtttaatacattaaaactggattctgctttcagaattataaatattgagctacaagagacactatacatcaacacgtgaaaacctggatatggttaaacagaccctaggagagtgtatagctaatattaatttttgttatttcacaaattaagatttaacaaacattgtgtgctttgtgttacatccttccatattacatggccttaaatattaagctktgatgcaaaattgccttgttataaaacagattggattatgttcatttttgccagtttgcagttgaataggcagcagacagcagaaactcttgaatataccaacaatccattagctacagctattttgccaatattactggataaattttagaataaccaacctgtgtgggggcagcttagctgctcacatatgtgctcacaaggaaggctcatatcttcaaaaggcaaatagcttttttctttggggtaggacctagcatagtgctgtcataaggtaaccatgaggagaatcacataaagccagaccaaagtgaatcaatttacaatttgaataaactttgaaatcacagtaaaaaatactgaaaaagttctaagatgccctcaaagatttactctaatgccgaaataaaggggatgctttcttcacgttttcattcatactattcatgttttctcctgatattatattttaaaaagaaagtttacataaaaatttaatctttgtatattggattttttttaatttggctcaactattttaagaaaagggagtcctgtaatgatatcatttgagctaagccaatttcttttagaagcaaaaaatctgccagatgttgctattatgaaacagtgagctagcatttataattcatttgacacctggatatactggcgtaaacaatggctttttatatgatgaggcagttctaatttaagttcagtgcttcatctgttttcttgtaactttattagtactaatggacaagcctaggcatatgtccatggactgccttttggcattcaatgttagaaatggttaataagcagggaacacattccatctgggaaagcttcacttgctgctgtgtaattttgaacctgtttttttgatgtttctgggcctagttctgttgtgtgtccctgagagactgagggcagcactaattcgaattatctggtaaaagccagagtcatgtaaagcactagtgttcacttgaaaggcattcaaagaaggcattttctaatgcctaaaaccagtatgtcgaagatgatgaaacactaccttataattaagtcagcaagagtcagaaaaactatttgctaactatagtcttcttagattcctctgtttttgagtgaataaacaatcccttttcagcacaaaataatttgcatcaccaaagctgatacctctggtagccaagcatgctttacttactgcaattaaggtcatatgcttgctttgctatgacttgtctgcacttaggttattatgtatgaggtattaagtgaaaggaggattcaggcaaattcttaaaaatttatgttttaatttaaaaaattttaatttggcacagccagatttgaagtcatactgatagggtctctagatcctgaacaatattactttttacagtttgtgaagcattcacctacaaataatcgaactttaattaaaagttaacttctgtttttgatttcagaatcaactggtttatataaaacatttgaattttaactctttacttgaaaaaaaaacagatgaatcttaaattcagctgattagtaaataaaacaaaacagcagaaattaagcatataccccaaattgttttaattaacttagscttttgtagttttagcatctattgtattctaaagataataggaatgtaagttrtgctacatcttagtgtatgttaaattgctttaatcataccacttaaggggtactcacagaatacaggttaccttccagcatctagacctctcccactcctcccccccagccccatccccaataataaaatagaagaatttcattccaagtaaggattattgtacttgggagacaatgatgttcccatctttgaggacagtgtatcttacatgagaacctcctatctcttactgattgtgagtggattatttcgctgamcctaatgtttaggtgtgcagaattctgcaagttgaacatagagatttaacatattaagtagtccatttaacttaagccagatttggctgtacaagctcattcccctggaatcctcccacattaaaggaatttttaagaggtaaaaaacccaaaagggagtggggagaatgggaggaaacacagcactgggccaaagcaattcagcaaatttttgaaagatggaaaatagaaggaagaatagcagtaaatgatagaagaggagaagctatactgggattcctgccaggaggaaaatgatttgagaaggtaacgatttgctgtgtaaacccagaaaggctcagggcacagaggcccaagtattgagtaatgcaggggtgaaatggaggctatcgtgggactagctggaagtctatggaggcaggaaaggaccccaggtcctttcccaccccatgtagtcatatgattacccttttcagagcaacagatcggaggtttattttctgaaaaacaaacaaacaaaaaaacaaacctgataagctctagacttgggaacaccagacacaactgggttagtggaaacactgaaaatagcatggaaaaaacgaaaagcctgcattactgaactgggatttccctggacctatttcctgccctgtttccataaagcaagcagccagacctacaagtactttytgggccccagacaaattcttctccgtagaaacaaggtagctgctgttttctttytctggaactctagtttactgagatgttggacttactaattaaagattattattttttcctccagatttattgaaktrttatttaaaaataaaatttccctactttaagtgtatagttttattagttttggtcactgtacacagttgtgtaaccatcaccacaatcatgatacagaacagtttcctgacgctgaaaagtttgcttatgccctttgcatgatgattgatcccctcccttggtcactggtcccaggcagtcactgatctgctttcagtcactatggttttgccctttttagaatgtcatataaataaacttatgtagtagtcttttctgcctggcttctttcactgaacatagtgatcacaagattggtcagtctttgtaatataaatatttcattccctttgtgtgctgagtggtattccactgaattaatatgccagaatttgttcatctcttcatcggttgatggacatttggtttgtttttcatgctacccctttatagtcacactcatttccttctcccccactatcttgaatctggcaaccaataatttatgatcttgtcattttaaaatattagctgggcatggtggctcacgcctgtaatcccagtactttggaaggccaaggcagatagatcacctgagctcaggagttcaagactagcctggacaacatggcaaaaccctgtctctaccaaaaatacaaaaaattaaccagctgtggtggtgtgcacctatggtcccagctacttgggaggccaaggtgggaagactgcgtgagcctgggaggcggaggttgtagtgagccgagatcacaccactacactccaacctaggtgacagagtgagactctgtctcaaaaaaaaaaaaaaattatatacatggaatcatactcagttggaccctttgagattgccttttttttctttcaatataatgtccttgagatcccttcaaggtgttgcatgtgccagtaattcctttttactgttgagtagtcgtccacggtatggatgtatcccagattgtgtagccattcacctactgtaggacagacatttgggttccccccagttatattcaaatyggatatgtggaagggtaattctttaggaaatgtggagccactgaaggtttttgtttgtttgctttgaagacttttgtggaggggaataaaaggattgtatctgagcttttggaagattatgccagcaattctacttaggatattctagattttttttttttcccccaagacggagcctcgctctgtctcccaggctgcagtgcagtgggggcttctcagctcaatgcaacctccrcctcccgggttcaagcgattctcctgcttcagcctcccaagtagctgggactacaggcgtgcgcccccacgtctggctgattttttgtatttttagtagagatggggtttcaccatgttggccaggatggttttgatctcttacctcgtgatccacccaccttggcctcccaaagtgctgggattacaggcgtgagccaccrcgcccgaccaggatattctagatggtcttgatgaagggtggtaagagcatgaacaagacttgtggtctttcaaattctcatatattcattgagattatctatttattgtctattatattccagagactgaaactgtaattgtgttagatactagggatatgaagactagtatgacatagtccctgttcccaagaattctcagactaagtagagggcaatagttacatacaaataaacatactttagtgctatagatgttatcaaagaagtctatacctgactcattagaaatacatataaagtgggagcgtgagggtcagcaaaagattcaaagaattatgaactaaaataacatgtgtagtgctcagaacagtgcctggcacatagtaagcagtcgacacaaattagtaatyattgttagtaatggtggtatacggaggcaggaaatagtctagtccaattgataagcataataaaaaagcaagataagaagtgctttcatgaagaactcatatgctttcacctgcctagaagtgagaagagatagatgcttgctcctctcctttggcctcaggtaagctttctgtttcagagacaatggtctccaaacttctccctcatctatttgccaaaaggagtatgaataaaagggccaatattcaaacagaamacaaatatagtatactctttgctgcaaagagtttaaaggtacatgcttaaccttgtgaccagctcctccagttactgcttggacagatcaattgaaattcgtcaatcggtcttgtctttaataagtaaattagagcagtaaaaaacatagcttcctgtgtgtggggtgaaaggttggaaagtcactgctcatgagtatggagtttctttttggagtgataaaatgctctaaaattgattgtggtaattgttacaaaactttgtgaatggattcaaaaccactgaacactttaaataggtgaattgtatgatatatatagttcaataaagctgttatttacaaaaattatgtagtgatctggaaagttgatcaagtgattactagaataaaaacaaaataaaacataaccacatactaacttggtgtcatcacagttagtttcaactctggttcctgaaaacatagttctgcctttctttccaatcgatatttgaggccagtgtgtttcaaagaggctcaccattcccacaaatgtttgacatgccagaacccattcatccaaccctgggattgtggtcaaatgaaagctggaaataggcctgcttttcctaggccaattcagtcttcaacttgcaagctcagtgccatccaattctcaaacccaatcctgaccaaggccccatccagaggtctgtatctgatgtgcctgcgatgaaggcaggagggagcctagagcagtcacatctcccctaccctcactgcatttgaatggatatacctgggctcccacttataagtgagaacatgaggtatttggttttctgcttctgcatcaatttgcttaggataatggcctccagctatatccatgtcattgcaaaagacatgatttcattcttttgtatggctgcatagtattccatggtatatatgtaccacagtttctccatgtggtagaagtgaccagtgttctcaagcctgtatgcctgtctggctgggccctgattatttctccaggggttaggctttacctcttatgttcccaggcacaagctggggtcctcccaaactgggcagaccatgtgctcgatttcaggacccgtattacctagagattttgttcttaggtaataagcccaagtttgcttctcttctttgaagatggtcatttagagtgctggctacttcacttggsgcaagcccaacagccagcttagctgtcctagtttcagaaaccaactaattttttttcttttccattcctaggagtctactgctaagatttcagcatgtcctgtggctgagttaatcagagttatgacaggaaggtaccgggcacaccatcgcaatgctccatcaatgctagtatgttgtgttctttccttcatatcaagtcaactcaagcttgctctacttacctggtgtacacagtctaagaactgtaagaagactggagcaaaaccactcccctgacagttgagggtcaagctgctcctctgactgaatttgtgaccaaaagagagccactctttttcaaccaacatctggaagccttcaagtgtcctataaaagggatcactgagtaactgaaccagggatgtcacctagggcataagcaggatggattgtcattaattttagttctgaaaaaggcctattactaagataaaagcacttccttctgatgatagctaattcacaaatttacctggacagcaaatttgttcactaaccattccaggatggccaataaaattaattttgtaaacttgccagtaaaaactaaagctcaaattcattttggctacaagtttactttcagggaattgagactttaatccttaactggccagtttgctgacagcaaccttttcctaagttaatcagaggccagaggatcagttaaaatcaattctactttttggcagatgcagattaatgtcttaatgtagtctgaactcacacttttcactctggagtgagttaaggcggggcttatagagagccaggggatggactgacaaaacccaggaaggatggtccacgcctcacactgctggtcaagggctccatccgcaagcctgcatggtacatctgtggatgggagagcttgatgcccggagccagagctccaggctgcgtaggggctaagagctcatggtacggagttttctgatggataccaggtgctgtttaacacaggactttctctgtccataaacacattagtcattatacaaaagagtcatctgaagaatttaaaaatgaccaaatggaaatataaatataaaatatcaaaaaatatgtctaatagtttacttgtgcagtgatgtcccagccttcctccaaacagaccaaaactgaggaaccattctcaagtacttctgatacaaccacagccagctgcattatcctgtgaagctaagagacaggaaggagaacacaattagaccaagcgctttctgagtgcagaagtcagagagagttgctttcaaccctggataatcaaacgacttagggataaagcgcttgcacaaaagaaccacataatgttttaaatacctaaagttctttcaaatcaagattaaacaatgacacttttgtctggatgcaatgactcatgcccataatcccagcactttgggaggccgagccgggcaggtcatttgaggttcggagttcgagaccagcctgggcaacatagtaagaccccatctcaatgaaaacaacaacaaaatgacacttcaaaaaagtagacacattttaaaacaatacattctagtaatacataatgaaataaaattaccttacatgattcccccaaaagtaggtgagctataattccatagagtacaaaaaacagagattctatgtggacttcccaacaaaagacggaaattcagatgaattttattggatttaaaatttgtttttccatgatgtagtaagttttgtttcagacattttttttttttttttttgagacaaagtctcgctctgtcacccaggctggagtgcagtgatgcaatcctggctaaccacaacctctgccccccgggttcaagcgattctcctgcctcagcctcccgagtagcttggattacaggtgcataccagtgcacccggctaattttttgtatttttagtagagacgaggtttcaccatgttggccaggctagtcttgaactcctgacctcaggtaatccacctgcctcagcctcccaaagtgctagcattacaggcgtgaaccaccacgcctggcctatttcaggtattcttaattttttgggaattagatagtggtgatagttacacaatgttgtggacataccaaaaagcgttgagttgtgcacctttatcataaggataaattttatggtaagtgaattatatgttaaaaaagaaactcctggctgggtgtggtggctcaacgcctgtaatcccagcactttgggaggttgaagcaggagtagtgcttgagctcaggagtttgagaccacctgggcaacatggcaaaaccccatctctacaaaacatacaaaaaccagccaggcgtggtggcatctgcctgtaatcccagctactcaggaggctgaggtaggaggatcgcttgaacctgggagatcgaggctgcagtgagctgtgattgtgccactgcactctagcctgggtgacagagcaagaccctgtctcgaaaaataaaaataaaaaagatactcctatttgtctatactgtgtactaaatgagaaaaaaactttcaatatatttgtgctaagtttttaaagccacatcaattggctcaaagtccttaataaacaattaaggtatgagaatagtatatagattttaaaaccagatgtataacattgtaattttaaaaaatattttaatgatcatcagacataatttgcaatttgaatccaactctgaacaagaacaaaaatgaaaaaacccatctcttaaacagagctaggctactttaaacacaggaataaggcaaatgccctactcagtaatgagaagctcctcatgtaactgtttctacaacatagctatcaccaggcctgaattcttttgggctcagaatttgttctaagaaatggctattattaaaaagtcaaaaaataacagatgctggcgagcctgtggagaaaagggaatgtatatacatttctggtgggaatgtaaattagttcagccattgtagaaagtagtttggtgatttctcaaataacttaaaacagaattaccatttgacctagcaatcccattactgagtatatacccaaaggaatataaattgttctaccataaagtcacatgcacacacatgttcagtgctgtactattcacaatagcaaagacatggagtcaacctatatgcccatcaacggtagactggataaagaaaatatggtacatatacaccatggaatactacacagccataaaaagaatgagcttatgtcctttgcagtaacacagctgaagcaaactaacacaggaatggaaaaccaaatactgcatattctcacttataagtgggagctaaacattgagtacacatggacacaaagaaaggaatagacgcctggggcgtatttgaggttggaggtgagaggagggtgaggatagaaaaactacctatcaggtactatgcttattacctgggtgatgaaataatctgtacaccaaactcccaagatatgcaatgtacctatacaacaaacctacatatgtacccctgaacacaaaataaaagttaaaaaaagaatttgctttaagagttaacttttaagatgtcaatatcccaagtgggcaattattttccactgtctttagtccctatcttttggtacaggtccactttctagcaaagagtagagcacagaatgtatcagaaacatggatagataagttgggtggaggggtccgtttggagctggggctcatagcctggggacagaagggagtatcgaccagttccttccacgggtatgcaaagcaccctaaattgccttaataataatgaacacagcatgatacatttatagccaaatatttatgtggcggcatttctctttggtttaagtatcttgagaacagtcacagccctgagtactgacatcatttcctttttttttttttgccttttagtccaatgtgctgtgggaaacaagaggcaggatgcttggaggtagatggaggcaggggactgggaatttctgcaaggtgataacaaataatgggggccaggcgtggcagctcatgcctgtaatcacagctctttgggaggtcaaggtgggaggattacttgaggccaggagttcaagaccagcctgggcaatataagaaataaaggggcttaaagacaaggccctttaatttctcaataaaagttcaattaagaatatcccaaagttgactgaactgaaagatgatagacactgtgtttttttttcaagccttaggtaggcttgggggcatccagtgtgcctttggtgggtagtgtggggtggatctaaaatctagagacctgggataggcagacaaatgaaaggtgagagctcttgggagtcatgcagaagttgccctctgccctggatccttactgtattgacaacagagcaggagccctgtaaatacatgctgattaaatttacatcaaagatttccatctaaaaataattttctccttagtgtcctatagataccaaacttttaaatacacagagataaaaacccagcgatcaagacttctactccctcacctcctataccagatgatttccttagtctgaaaggcctttactgatggcacacaatgaaggaggagaatgttggggagtaggggaacaaagtattttttttctcaaatacagttctgtatatctacttgggcctctgtttctttgagttataaagaaagaagctgcttcagacattacctgtgggaaccactcagaatctcccagcgctttcaggaaggtcacttctgagtcagtagggatggtgcttgggatacaagccctcatcagcttcttaaaactggctttcacttgccggatttcatgaaattcaacaggaacaaactcacaatttaaagcaaattctaccttgaagttctgcggatgaagattcagagaattaggcagatgaagtgctataggtaaaagagtgatgtttccaatggggcagtgcataatgacaaagttatttggggccaaatagctgcagaggctgccaatgggtcaagaaagtcaatcttgtacggcaatgtgtcagtgttggtgggaagagccattcagtacaagctagtggtttgcccagaatggcaaatctagtccttactagaggtagattacttagcctaagaatgcgttcattctgagaactggaagagcctactggtagactggaacttgatggagctcataataccaaatataagtcaattataaggccatgaacctggaagtttaaagagaaactaatgatacatggacagtatgattactccaacagtgtaaactaagtcttcccaagatgtatatggtaagggataggtaacacactgttggagttccagactgtacgtgtattaaagtttgtagatatgcacatatttgtttcttattatgcaagtaaaacatattcataataaaaatgaaaaaaggtagagataaatattgagaaagaaatagaaatcactttcttactgccccaagactaccaacattgtggttatttttttgtttttttgggatggagtcttgctctgtcacccaggctggagcgcaatggtgcgatcttgactgactgcaacctccgcttcccaggttcaagcgattctcctgcctcagcctcccgagtagctgggactacagtcgtgcgccaccatacccagttaatttttgcatttttagtagagatgggctttcaccatgttgcccaggatggtctcaatcttttgaccttgtgatccgcccacctcggcctcccaaagtgctgagattacaggcgtgagccaccacgcccagtcctacttcttaaaagtcaataataaaaaattacatggtcgggcacggtggctcatgactgtaatctcagcagtctggaaggctgaggcagacagattacctgaggtcaggagttcaagaccagcctggccaacacggtgaaatcccatctctactaaaaatacaaaaagtagccaggcgtggtgacaggcacctgtaatcgcagctactcgggaggctgaggcaggagaatcacttgaaccccggagatggaggttgcagtgagctgagatgacaccactgcactccagcgtgggcagcagagtgagactccaccttaaaaaaaaaaattacataaaaaaaccacgaaaggctttgttcatttctatctttgggataatattttttcacttaatatatgtatcaacctatatt

SEQ ID NO: 96999 - DNA, 18246 bp, Homo sapiens
  misc_feature (1)...(18246): n = A,T,C or G
ctcccaaagtgctgggattacaggcgcccaccaccacacctggctaattttttgtatttttagtagagacggggtttcgccatgttgggcaggctggtctcgaactcctgacctcaggtgatctgcccctgtctcagccccccaaagtgctgggattacaggcgcccggcctacatgtttattgtttaaaaaccgggaaagtatagagaagaaagtaaaggctccccacccctagagataaccgctgaaagtatttggtctgtttcctgcccggctttttcctacacacactttttggcgccttaagtcgggctccccccggacaggaggggcccctcccaggcgctggtgtctgcgcccgccccccgcagccttgtccctgctccggggggtccctgggtctctggggcatatcgttgcttcactgctcgctcgagcctccagggatcgggccgccggggcagcgcagagaggcggggacaggcgacagcggcgcagagtggctcctcccggggccggcccaagcgggggtctcggtgcctgcgaagcggcaggggtcgctcggggcccagtgccctctacgtcccgtccgggtcccagctggggcggggcgcgcccagtgtttccgggaggagcggcccgggcgcgcggcaggtgcggcggcgcaactcgcgggtaggcgaccgctggtcccgccgctgaggcccctccactgccgcccgcccggcaccccctccgggccgccgtggcccgcgccaaacctgagcgtctcggtcgggaactccggttaccccctcggggcgcaaggcggcaggggtaagggcggggttgtcccccagagtttcggggagcacaggaggctggccgccccaccccaccagcccatcctcccacctccctggggccctgctgccgcgcggcttccggctggggtggactcaggtactagccggcaagccggagggcgggcgnnnnnnnnnnnnnnnnnnnnnnnnnnnnnnnnnnnnnnnnnnnnnnnnnnnnnnnnnnnnnnnnnnnnnnnnnnnnnnnnnnnnnnnnnnnnnnnnnnnnnnnnnnnnnnnngggagaggatcccagctccccggtgggggaaggcgggtgttggtggggagcagctttgggaaatccgggatcaggacattgtgtgaaggacaggtggctctggttagggggcggggcgtccctgcaaggaggtgggaagggaggccccagggagttctgaaacggggaagggcctcagtgttgtggggcaagggtgttaggtctcgaatctggaagtgttcctgagtggggcgtcagaggcgaagggctccgcaggctgggaccttgcccctgcactctgtgggctcagttgtggggagggaggggccggtgggcaggagggagaagtctgccctgcctgccagctgtcatgaggctgggccacacaggcccaggccaggggctaaggacttggtcaggactggctgagccctcacttgggatcagatctccagttgcagagtgtgaggggctcctccctcactgaccccaagcctgctcctctcagctttcaggaccccaccttccttatcaccaggtcttctccactggcccctgagattgccatcacctccagctcctcctctcctgaagttggcagcccctcctgggttccagcctcctgagatgccagacccactggggcagtacccacaggccctgagcctacatcaaccaccccagtgacaccccaagcctgcagcattttccacccccagccccctggtcccaccttgccttccgcccaccttcccacctgctgcagggagggccctcggctgagccttcagacacacttgcaccccatccgctcccctcctgaatttcttctgaccctcccttggcttcacagcacctgaaggccaggctgaggccccctgctctcatggccagccctggaaagcctggggctgatgaggcccaggaggaggagggggaactcgaggggggctctgcagggccgcgggctgcaatactggagcaggctgaggagctgtttctgctgtgtgacaaggaggctaagggcttcatcaccaagcacgacctgcaggtgagtcccccgccccaagagactgcttcggccctgggttgaccgcagcggctcatctctgctctccttccccgaccagggtctccagagcgacctgcccctcacgccagagcagctggaggctgtgtttgaaagtctggaccaggctcacactggcttcctcaccgccagggagttctgcctgggcctgggtgagcctgtggcctgcctatcccccactgcccagagctggaggcctgatcaggaggcctggcacttgtggcgccctgagggctgccggtgcctctcgtcctcctccctccagggcccgtgctttgtctgcacgcactcgcgcctgggggctcctagctgcggtggagtgtgtggagctgaccttcctggcccccagctcctctcctgtgctaagctccggtagggctgggagctggcctgtcacctcttgtttccaggccaataggaccagaataaggaaggaaaacaggaaactgggccctgagagagggcaggatactcgttgggagggtgaacggggacacagccacggtggcgacccacagccctggtaatcgctcgctccatgcccgcagggatgtttgtgggggtggcgtcagcccagggagcgaacccctgcaggactcccgaggagacctttgagtcgggcgggctcgacgtgcagggcacggcgggctctctggatgaggaggaggaagaggaggagcgattccacactgtgctggagcagctgggggtggccccggtcctgggcgagtgagtcggcgctggccccgctcccactgcccgctctgctgtttctctgcctgcatgctgtctgcccttgtcacccgagtgctggttctgcacagggtctctaggccgggtcaggcccagcctagcgtcagctgcgattccctgggagggacccggcatgatttcccgcagaatttgcatttcatgaggcagcagccagggctgcagggaggaggggcagcgccgggcgcggggccacataccggcactgcccagggtacacacacctcaccgaccacgcacgccgggcaggggcgaaagcgctcacgggagggatgccctgcacgcagcaagtgctcctgtcctgcccaggggcgaagaagtctcctaagggtttgctgctggcggagggaagcctgcttcccgcttctgccagctccagcctcagttcccgcccgccctccaggcagcgggctgtgaggacgctctgggccaggctgcagcgcgagcgccccgagctgctgggctctttcgaggatgttctgatacgcgcgtcggcctgcctggaggaggcggcccgggagcgcgacggcctggagcaggcgctgcggaggtgagggccggggtggggtatgggggccaatggagggcctcagggcagcagcagaggcggtgccagggggctgtagcgctggcaagttctcatccggggtcgcccggtcccccgaaggcgcgagagcgagcacgagagggaggtgcgcgctctgtacgaggagacggagcagcttcgggagcagagccggcgcccgccgagtcaggtgggcctcgggccccgcccctcccgccaggcccaatcccacctcgctggcctccctggctccgccttctctgaattaatccctccccgacggccccacctccgcgggtccaggctgccctcagcccgaggagatcccactgggcctcatgtatcacccccgtccggtcttctccacccgaccccgctccgcccgggcccactcccagcccctggccctccgtgtacctcttttgcatggccgagcggccggcggaggctcagtggtcctccgtgcgtcccagaacttcgcccgcggggagcggagaagccgtctggagctggagctgcagatccgcgagcaggacctggaacgcgcgggcctgcggcagcgggaggtgagcacccggcccctgccctgtccccacggtcacccgtgcactctccccctgtgccttagcgtccccgggttgtcgggagcctggggcacgcgcagcaccccggggaagagggggcgttcctcgccggtctccatccttccaccctccagttagagcagcagctgcacgcccaggctgcggagcacctggaggcacaggcccagaactcccagctgtggcgggcgcacgaggcgctgcgaacgcagctggagggggcgcaggagcagatccgcaggctggagagcgaagcacgaggccgccaggagcaaacccaacggtgccgtgggacggggctgggcgggccccggtgcgtgtcccgggggcggggccgacgggcgctcaggtctgggccactttcatccccatttcaagtcccaggcccgccccgtgggaaggaggatcttctagggggtccgggggctccccaaggagccttcctgcagccgggtcaccacctcccatccacagagacgtggtcgccgtctccaggaacatgcagaaagagaaagtcagcctgctacggcaactggagctgctcaggtacggtcaggctcaggcccgagagggaatgggctcagcggagcttgggggctcccagctccccaacattcttggctgccgctctactccattggaagtccttccttatgcctgcctttcacccctcacgctgcagcctcagccagacacctctcttcgctctgaggggagtcggagctcacctccccccaccttgagctccctcagaccctctcagtgtcggactcctccttccctagggagctgaatacacggctgcgggatgacagggacgcctgcgaggccaggcgggcgggcagcagctgcaggaaggctctgacaacagcccgcctgcctgggcccacctgctgctgctgctgttgctgggctcggccccccagacgcggctctggccaccttcccagtgcccggtgaccagccccgagtgactcacggaccatgagctagaagctgcccttgcaggaggcttgtcatgggtcgggggtgcccactcaggatgcaggctctccccagggggccccaggctcgcctgactgaagacatgaaggacctagcctaggagtggtcagggtcccgggagtggccagggtcccgtgtgtgccctctgccagtcttcgctctgtccccgttcaatcaaccccatctcagttcagcagaaaaccccctcgtcaaataaaacccactgactgcactgcgtcctcctgggccttccgtgtgtctgggagccacagcctgtgtgtgccacatggatgaggtgggcacctgtgcacgcgtgctgtgtgggtgaatacagggagcgcgggcctgtggcgatggggctgaggtcctgcgtgtcctcttgtgtccctggtcatgccccaaactcacactacccatcaaggctggagcccctcggggccctcgccagtgtgtggatcagggctccccactgtctcgccagggaggccgggcaggttcccggcctcagtcggccaccccctcccatgctggtcctcccctgtggctgtgatgaatgagcttggtgggtgggcagccccctccttcctcactcccactcttggcgtcttggtgcagccctaggccggccctgcccttcgtccctcacctcctcgcaccgctcccagtggtcccttccagtctggagggcatgggccccccaggaccccatgggtatgtctcgctgggaccccaggcctgcccgggtctccaggctgtccacactgcacgtacagtagcccttctcccgcatttgcccacagcgctaggccctcccacgccccaggccggcatcggttctgccgacccctgcagcctctgggcggttcctgggtgaggagaaagagatgggggttgggcatggaggagggccgggtcgccacagcccagggcctctggctaggctggtcgccgtcttacctccgggcccgcctcccgcccagctcctccgtccttggacgggatgggcccttgctgggctattggcgcccccagggctgcagctcgcccggcctccgcagtgccaggtcgacccccagcgcctacacccacgcgggttcagacctgccgagcgcccgccgccgcgggaggggcttgaggccggggcggggcggggccggggcggggcgtccccctcgtaggctccgggccgcgcattctcagcgctgggagccgccgcccccgcagctgccgccgccgccagggcccggactcggacgcgtggtaggtgagtgcgcggccacgacagctcggccgagcggggcgagcggggcgaggggggcgaggggcgcgaggggggcgaggggcgcgaggggggcgaggggcgcgagggnnnnnnnnnnnnnnnnnnnnnnnnnnnnncagttccctcgcctgcccttccgcgggaggcggacatccgggcgggtgggggaggcgcagcgggaaggagaggcgcctcccgggcccttggaccggcctgacggcccccttcggcccaggggtcccgggacgcgcagcctggacaccctgctcattgtccctggacacggcagtcttccctccgcccgcagcagcccccgcccgcgtgcaagtgggcgcgccattggccgcgccgggcggggtcggcggcggcggtgacctcattgcagtgccccggggacgcttggcaggcgcggagtcccaggtccccctgactggggctccccctgatagggcgcgggccgcccaggggcctggtgcaggtcccggggactgggggaggaacagacaactatttctggaaggccctttcccagggggtccagagggaccaggcattcctgggaagaggggtcactcctcagcgggtcgcctgtgtcctcgcggtggaggacgcatctgtgcccagaaccagcttctccagaaagcctgggaccttacagccaggccaggggcaggtccttgaggggctcacacatccccccatcggtggcagacacacaaccccccctcggtggcagacacacatccccccatcggtggcagacgcacacccnnnnnnnnnnnnnnnnnnnnnnnnnnnnnnnnnnnnnnnnnnnnnnnnnnnnnnnnnnnnnnnnnnnnnnnnnnnnnnnnnnatccccccgctggtggcagggtctgcctgtgcaacccttcctgcgtgtatttaggccccggctccttcatggagggtgaatatcccctctcagctcagtggtaaggtctgtccccctccagctccattccatgattcctctttcccaggctgtagctgccgctgtttgtgggggaagggccagtgatgggtctggagcgaaggccaagagtggggcacctgggggaaggtatgaggtccctcccaggatcagactgtctcgaaatgtcatctgccttgggaggccaaggcgggtggaacatctaaggtcaggagttcgagaccagcctggtccacatggtgaaactctgtctgtactaaaaatacaaacattagctgggcgtggtggtgggygcctgtaatcccagtgactcaggaggctgaggcaggagaattgcttgaactcaggaggcggaggttgcagtgagctgagatcgtgccattgcactccagcctgggtgacagagcgaaactccatctcaaaaaaagaaaaaaagaaaaaaacaaaatgtcttgtgccttgccccaccctagcccagactaaaataccgggcttggccactcctctctctgcctccagaatgaacccggcccactctggcccttgggccagacctgtaacctgtgacctgacatgtccttgcccctctagcctagagtcctggggagcttctgtccacctgtcctgcagaggagtcgtttccagcccggctggtgagtgctggccagggtggggcagagcaggcggggcggcgaaagtccagacctggctgtgctgtctggaaacgtggcccagggcgctcagctgtctgcaccccacgccctccctggcttccccatgctcacagcttgcccactgctgcakgtcgggcgggcacggggcatctggggaggggcatagcctgtctgtgctgccccctcrggttggtgtgggtcgcctgtccaggaaaaaccctcccagtctgccaggctccacctgcctccacgctccattctccccaccccggccaggatgaaggaagggctgccctttaacagaccgtaaacaggcctggagagcttaggaaggggctgagctggggcctgtctgagcccctacccctctgctgtctgagtggcctcctccgcccttactgcaggcccataggctcctgccagcctgtgacgtgcggccccgggaatgcygtggggagcgggcaggctggcatgagctcaccggaggtacccgctagggcttcctcccccggccgcyagcaggggtgagtcagcagtgatggcgggaggtcctccatgacccctgtcctgtctgtgggcaccaggggkctgtcctggctgtcagggctcctgagtcgctaggaagtgacacgtcctgttcccacaggggctcattcacaggcctcccaggacagtggctggctctgccccgacttctgggctggcttgggtatctgtgtcccctcttttttttcttttttattgagatggagtctcactgtcgcccagcctggagtgcagtggcaccatcttggctcactgcaagctccgcctcccgggttcatgccattctcctgcctcagcctcccaagtagctgggaccacaggcgcccaccatcacgcccagttaatttttgtatatttttgatggagatggggtttcaccacaatggccaggctggttgtgaactcccgacctcaagtgattgcacctgccttggcctcccaaagtgctggcattataggcrtgagacaccgcacctggactcctttcctctactttctttgggttaatttgctagtctctttttattatttatttatttattttgagatggagtctcrctctgtcgcccaggctggagtgcagtggcaccatctcggctcactgcaagctccgcctcccgggttcacgccattctcctgcctcagcctcccaagtagctgggactacaggcgcccgccaccacgcccggctaattttttgtatttctagtacagayggggtttcaccgtgttagccaggatggtcttgatctcctgaccttgtgatctgcctgccttggccccccaaagtgctgggattacaggcgtgagccaccgcgcctggccctgtgtcccctcctatccgtcccccagtcaggggcctggtgctgtggccccgctgacccctcccctgcctcctcagccccaggatgggtgagttcaacgagaagaagacaacatgtggcaccgtttgcctcaagtacctgctgtttacctacaattgctgcttctgggtgaggaggggtcgccttgcccccacccccacccccacccctcccgggccaccatcagacctgggcagatgcggtgacctttgtgtactgcttgtagctggctggcctggctgtcatggcagtgggcatctggacgctggccctcaagagtgactacatcagcctgctggcctcaggcacctacctggccacagcctacatcctggtggtggcgggcactgtcgtcatggtgactggggtcttgggctgctgcgccaccttcaaggagcgtcggaacctgctgcgcctggtcaggagggcgcagggccacggggtgggggtggtgcagatgggcccaaggaggttgtcgctgcaggctttgaacctgtgccttgctgtgctcacctgggggggggtcacggtccttccacacctgcctagtcctgtgggtccccacgttcctgctggaccagctgagggaagacaccagctccgcaagaaagcttcagggagggtggccgcccctcagcccccacctggagcctggggagccggggtggggactctgctctgaggtgcactaggtctaggcactaggcctcagaacaagggtgcccttgtgctgccccccccagtacttcatcctgctcctcatcatctttctgctggagatcatcgctggtatcctcgcctacgcctactaccagcaggtgaggggcctgggcaggccattcagagacacagacatgcacaggcggggcggacacacacacatgcacacgcgtggctagccccaacccccacccccatggtcccagagctaaccaatgtgccactsggccctggagatggggtctaggtctctgcaggggcacatggggtcaggcaggtgtccaggggatccagaagctctctctgcctctgccgcacttcattgtcaccctggtgacrgtcctggcaccacccaacctcccctcatgccgaggtctgacctcagcccttccctgtggctctgagctgggccccgggcctccccaccggccatcctggggctctgccagccccaccttggaaggtcttagactgaggctgaagtttcctgcaccccaaccccagctgaacacggagctcaaggagaacctgaaggacaccatgaccaagcgctaccaccagccgggccatgaggctgtgaccagcgctgtggaccagctgcagcaggaggtgggtgggtggtgctgggagggcgcgtgcatccccagggcctccctggacctctgcaggagcctctggccccaggtctcaaccccagccttgttcttgatgcagttccactgctgtggcagcaacaactcacaggactggcgagacagtgagtggatccgctcacaggaggccggtggccgtgtggtcccagacagctgctgcaagacggtggtggctctttgtggrcagcgagaccatgcctccaacatctacaaggtggaggtgggtgtgcagcgggatcatgcctccagtgtctacgaggtggkggggggcaccccagtgactggctgtgggcagtgggacacgcctccaatatctaccaggaggtggggggtcaccccagtggccggatgtgggcagtgagaccacacctccaatatctacgaggaagtgggtgggcagcccagtggctggctgagctgttggtggcctggctgcctaggtgctaggggtgggtttggccacaccctggaggctggaggcagtaggggccagtgggaggtgccccctgggcccgccttcaacacccatccgcgccccgcagggcggctgcatcaccaagttggagaccttcatccaggagcacctgagggtcattggggctgtggggatcggcattgcctgtgtgcaggtgagggcacatgggggtggcggtcatcttgttggggacacggggcagggcggtggctggtggccccatgacgtctgcttaygcccacccggctctgcacacaggtctttggcatgatcttcacgtgctgcctgtacaggagtctcaagctggagcactactgaccctgccttgggccttgctgctgctgcacccaactactgagctgagaccactgagtaccaggggctgggctccctgatgacacccaccctgtgccatcaccataacctctggggaccccaacctcagaggcagcttcaagtgccttttgctgcgcaccaatgcccagcaggggaggtgaggggggctggcggggcgaagtttggggggtgttttgtggggctccccrgacayactctctgcctggtggtcagatgcaggttggaaggggccttgctgagtggcgcaaggccgagcgttcccagcagggggagaaacccttcacaccccaggcccttcaggaactggggcyttgccttgcagccacatggccccatcccagttggggaagccaggtgagctytgacccttgggcctgggcctctgcccctcccaacccagccstcgtytccctcgacagcgcccctgctgtyttccccacygcagtcaccaccacccgaaatgccacgtggtcactrtgcactgccctgtycatgtgcctytgcggggcagggccttcctggttttgtwcactgctgtacccaratgcctacaaccatccctgcmacatacaggtgctcaataaacacttgtagagcagatggacgagctsgctgtgctggtaacagatggtggtctgttctcagggccctcgcatccagcagggcagacagacccacccccgccccgcccagtgtcaggacaaagaagggcagagccaggaggacacaccccccatggggctccagggaagggaggtctgatgccagggacagctgagcacaggcctcagcagaaagaactgaacatgttcctaaatggtgagatggtgtgttcagagcccctggaggagaggaaaaatgctttccaaaacccttctggccatggtggggagcaaacgtgggaagggtgcagactgggggccatgcccaggtaagaggtgtcaggcaggtgggctgggggcagtagggtgagggggtttacatggaggagcctataggccctgctgggggccagagggtaggaggtaccagagcctggtgtctggcagaggtaccctggagatgggagccagggctcggtcactgattgtgccccccactgcccaggttcctgtccttaaggctcagaactgtagaccctcaggcagacccgttctcccctaccagaggacaccacgccagatatctgggcagcagggacatctgacctggggtgcttgctggcagcactgcctggacagcagggcctccttagggccacctcccaacccagctaggagcgtcttaaggcctgccctccctgctgggcttgggtgggacgctcagggacaggcagcagtgggcagaggccagcaggtactggcagccctgaccacagcagagactgggccccagaagatctgtttctctcttctttttcatagttgtgttgagacagagtctcactctgttgcccaggctggagtgcagtggtgcaaacacagttcactgcagtggcaacctcccaggttccagtgatcctcctgcctcagccccctgagtggccgggactacaggtgtgaacactgtgcccagctaatttattaaattttgttgtagagatggggtctcattatgatgcccaggcgggtcttgaatttctggactcaagtgatcctcctgccttggcctcccaaagtcctgggattataggggtgagcccctttgcccggcctaaatctggctcttcagattccgagagagagggtacaggagcctctctgctcagcctgaagaacacccagaaggagggaacctcaaagagccccgagatggaaggctctcctggcagcgcctcctgcaggggtgcctgtggaacaggctggccccagggctaggagagttcatggcccagtctgcttcactgggctgccacagtgtgaaagctgggcctagacctggctcctgacatcctagtgagggctgggaccttagtggttctgaaagacctttactggatggttccttccagagtggggtatgggatacacacacactgcggccaggcattacgccagctcccggatgcctcagcctcgtgaattcggggtaggacgctcagggcccatggtcagcacagcgggtgggtgggttccagcgtggtcacttctccaggggtgcataattgagcagcttctcgatcaggtccacgtgggccagcagcatccggcggcagcagtagcgcttcaggcccagggcatccagcgcgtccctgtgtcgaggggaggagcagaggccaactgagttctctacggtctgcaaaggcctggagcccacatccaacctgcctctcactgcctgctggcctcacccccccgccaccggcaaggcgaagagattcacccggctcagaagctgagatctagcagaatgatcctggctggagtaacctggaaatgcccagaaccctgggtggagcgtgaggagcctcctctcccacctactctggctgtacgtgtgtgtgtataacatatgtaagaaatgtaaatgaaatgaaaacgaagtaattgcggggagcttagaaaaccaagaccaccaaggtgctgatgtgcagccacctcatccagcactggccacggcagggtagctctccaggggcctgcccttagctggttcacccccaccccagccagagcaagccctgctctgccgctgtggggtctttcctcacctctgcttccttccatcagagagagactgcttctccacggagccacctctcccacttcccaagccaattagaagctttcatttccctgggacctagctccagtcaccctcaagacctccagaaaactcccacaccgatggctccaatgtgcagagacacagaagcttgggaaaggggaggccacatgggaggcccctgccgttcctatccggggaaagggtctggacaggccgccagccactcagtctagcagcccactcgctttcctcgtttgtccagcaagctgcaccaagtgccgatggcaggctggcgcacacaagcccagggcttcacatgtgacgaagactcagtgggcgagggtcagactccagcgggggcaccaagactcaggcaccgtggtgacagcagcaccaagggacaagcacaggagaaagacgcctcccctacaaagcctgatgagggtggtcagcaagtctaccctgcatttctttttctgtgtgtgtgtgtgcgtgagacggagtttcactctctcttccaggctggagtgcagtggcgtgatcttggctcactgcaacctccaacctgcctcccagactcaagcgattttctcgtctcagcctcccaagtagctgggaccacaggtgtgcaccgccatgtccggcgaattaaaaagatagagccaggcgcggtggctcacgcctgtaacctcagcactttgggaggtcgaggcgggtggatcacctgaggtcaggagttccagaccagcctggccaacatggcgaaatcccatctctactgaaaatacaaaaattagccgggcgtgctggcacacgcctgtagtcccagctactcgggaggctgagacaggagaattgctggagcccaggaggcgggggttgcagtgagccgagatcgcgccactgcactccaacctgggcgacggagcgagactccgtctcaaaaaagaaaaataaaataaaataaatttctggagatcagggtctccccaggttgtccaggctggtctcgacctcctgggctcaagcaagcctctcgcctcggcctcccaaactgctgggattacagatgtcagccgccgcgcccgcccgtcctgcagcgaggtttgcaggacatggggtgggcctgggggcagagacgggaatagggcggaggccaagggctttactgcgggtgacaagacgcctgcgacccgccaggccacctagaatccccaggacaccactggtttgaagcccaactccgttctcttccccagacttcaggggataaggttctcccgaaagcagatcacagagcggggctggagaagccgggcctgaagctgctcatggggcgctggcctcaggcagcgctgcgcctcccgccccggcgcgcaccccagggcggactcagcccccagccccggcccgcgccccacggcggactcagcccctagccccggcccgcgcctcacccctcggtgtactcggcctgcagcagccccaggtaagcctcccacttgttgccgacgatcttgccacaagtgaagcagcgtacagggatgatcatggcggcggcgcgtcccagactgcccggcccggccgggccgcacgcgaagaacccccccaggccccgccccgggcgcgtccactgttgcgggagaatcggctccgctcgttctccgctgctctggccgtccctccaccggccccggcaccgctggccgcagtttccgccgcgatgggggcttcccgtgcgtcccggggctcctgggcctgtgcgtcccggggctcccgggcccgcgcggccgcggcagcagcagaccgcacacccccgcccaccgtcttggtgcatcccggcgctacggcgtctgagcagggccgtaaagctgcggcggcggttcgcgtttctcgtgtccgcttgactgacagctgcgcggcgggagcgggcggcgcgagcgggaggcggcggcgcaggtactgcgcctggggcttgtgggggcgtgcggccagggtcccgtggccggaggtgtccgaccgggagcggctggagccggacgcgagcggggcgcgcgagttcgagcccagagccgacacgcagcaacaagtggggtccggcgcgggggctcggggagagggcgggcgggggccggggcgggtcttcctgccgcccctcctggccgcgccgagtagtgggttcctccgcctcggcctctgcccgcggggtgtccggggctctcggcgctgagttcgggggtcccattctggacgcggcccagcccctaggggcgccgccctggcctcagctgcgcaattacagcccccgccggcagctccccgccccgggctcctgtccgcgttctttccgctctttcccgggaatggggtcggggtgcgccctcccgggtcccggctctgctggctgctcgccgtcccgagctcccgacgctcagacgcgcctctgagcacggggagaggggacccgggagggaggtcggggagggagtcgtggaagaggtgctctttgagctgaacctggaagaccccggcacaggggatccctgggcagactcccggaggctgcactggcaggaccccctgaaggcctcagctctggcttgccctggagctcagggcctacggacgacgagggacgaggagcccgtgtctctcggatggagtgcgggggggctggcaccagcacccttcttgctgtgcccctggggtgggggtgaggaaatggggggtcggtgtgcagtgagaggcaaagaaggctccttggaggtgcgagggcagtgagaggcaaagaaggttccttggaggtgcgaggtgggctgtgggggtgggtgggccgcaaagcggcacccatggggggctctgggctggtttgccggcctggggcttactggctggggtgggacctgtgttgggttccaggcatcagnnnnnnnnnnnnnnnnnnnnnnnnnnnnnnnnnnnnnnnnnnnnnnnnnnnnnnnnnnnnnnnnnnnnnnnnnnnnnnnnnnnnnnnnnnnnnnnnnnnnnnnnnnnnnnnnnnnnnnnnnnnnnnnnnnnnnnnnnnnnnnnnnnnnnnnnnnnnnnnnnnnnnnnnnnnnnnnnnnnnnnnnnnnnnnnnnnnnnnnnnnnnnnnnnnnnnnnnnnnnnnnnnnnnnnnnnnnnnnnnnnnnnnnnnnnnnnnnnnnnnnnnnnnnnnnnnnnnnnnnnnnnnnnnnnnnnnnnnnnnnnnnnnnnnnnnnnnnnnnnnnnnnnnnnnnnnnnnnnnnnnnnnnnnnnnnnnnnnnnnnnnnnnnnnnnnnnnnnnnnnnnnnnnnnnnnnnnnnnnnnnnnnnnnnnnnnnnnnnnnnnnnnnnnnnnnnnnnnnnnnnnnnnnnnnnnnnnnnnnnnnnnnnnnnnnnnnnnnnnnnnnnnnnnnnnnnnnnnnnnnnnnnnnnnnnnnnnnnnnnnnnnnnnnnnnnnnnnnnnnnnnnnnnnnnnnnnnnnnnnnnnnnnnnnnnnnnnnnnnnnnnnnnnnnnnnnnnnnnnnnnnnnnnnnnnnnnnnnnnnnnnnnnnnnnnnnnnnnnnnnnnnnnnnnnnnnnnnnnnnnnnnnnnnnnnnnnnnnnnnnnnnnnnnnnnnnnnnnnnnnnnnnnnnnnnnnnnnnnnnnnnnnnnnnnnnnnnnnnnnnnnnnnnnnnnnnnnnnnnnnnnnnnnnnnnnnnnnnnnnnnnnnnnnnnnnnnnnnnnnnnnnnnnnnnnnnnnnnnnnnnnnnnnnnnnnnnnnnnnnnnnnnnnnnnnnnnnnnnnnnnnnnnnnnnnnnnnnnnnnnnnnnnnnnnnnnnnnnnnnnnnnnnnnnnnnnnnnnnnnnnnnnnnnnnnnnnnnnnnnnnnnnnnnnnnnnnnnnnnnnnnnnnnnnnaccaca

SEQ ID NO: 97000 - DNA, 36663 bp, Homo sapiens
  misc_feature (1)...(36663): n = A,T,C or G
ctgggcaggccattcagagacacagacatgcacaggcggggcggacacacacacatgcacacgcgtggctagccccaacccccacccccatggtcccagagctaaccaatgtgccactcggccctggagatggggtctaggtctctgcaggggcacatggggtcaggcaggtgtccaggggatccagaagctctctctgcctctgccgcacttcattgtcaccctggtgacggtcctggcaccacccaacctcccctcatgccgaggtctgacctcagcccttccctgtggctctgagctgggccccgggcctccccaccggccatcctggggctctgccagccccaccttggaaggtcttagactgaggctgaagtttcctgcaccccaaccccagctgaacacggagctcaaggagaacctgaaggacaccatgaccaagcgctaccaccagccgggccatgaggctgtgaccagcgctgtggaccagctgcagcaggaggtgggtgggtggtgctgggagggcgcgtgcatccccagggcctccctggacctctgcaggagcctctggccccaggtctcaaccccagccttgttcttgatgcagttccactgctgtggcagcaacaactcacaggactggcgagacagtgagtggatccgctcacaggaggccggtggccgtgtggtcccagacagctgctgcaagacggtggtggctctttgtggacagcgagaccatgcctccaacatctacaaggtggaggtgggtgtgcagcgggatcatgcctccagtgtctacgaggtgggggggggcaccccagtgactggctgtgggcagtgggacacgcctccaatatctaccaggaggtggggggtcaccccagtggccggatgtgggcagtgagaccacacctccaatatctacgaggaagtgggtgggcagcccagtggctggctgagctgttggtggcctggctgcctaggtgctaggggtgggtttggccacaccctggaggctggaggcagtaggggccagtgggaggtgccccctgggcccgccttcaacacccatccgcgccccgcagggcggctgcatcaccaagttggagaccttcatccaggagcacctgagggtcattggggctgtggggatcggcattgcctgtgtgcaggtgagggcacatgggggtggcggtcatcttgttggggacacggggcagggcggtggctggtggccccatgacgtctgcttatgcccacccggctctgcacacaggtctttggcatgatcttcacgtgctgcctgtacaggagtctcaagctggagcactactgaccctgccttgggccttgctgctgctgcacccaactactgagctgagaccactgagtaccaggggctgggctccctgatgacacccaccctgtgccatcaccataacctctggggaccccaacctcagaggcagcttcaagtgccttttgctgcgcaccaatgcccagcaggggaggtgaggggggctggcggggcgaagtttggggggtgttttgtggggctccccggacatactctctgcctggtggtcagatgcaggttggaaggggccttgctgagtggcgcaaggccgagcgttcccagcagggggagaaacccttcacaccccaggcccttcaggaactggggctttgccttgcagccacatggccccatcccagttggggaagccaggtgagctctgacccttgggcctgggcctctgcccctcccaacccagccgtcgtctccctcgacagcgcccctgctgtcttccccaccgcagtcaccaccacccgaaatgccacgtggtcactgtgcactgccctgttcatgtgcctctgcggggcagggccttcctggttttgtacactgctgtacccagatgcctacaaccatccctgccacatacaggtgctcaataaacacttgtagagcagatggacgagctcgctgtgctggtaacagatggtggtctgttctcagggccctcgcatccagcagggcagacagacccacccccgccccgcccagtgtcaggacaaagaagggcagagccaggaggacacaccccccatggggctccagggaagggaggtctgatgccagggacagctgagcacaggcctcagcagaaagaactgaacatgttcctaaatggtgagatggtgtgttcagagcccctggaggagaggaaaaatgctttccaaaacccttctggccatggtggggagcaaacgtgggaagggtgcagactgggggccatgcccaggtaagaggtgtcaggcaggtgggctgggggcagtagggtgagggggtttacatggaggagcctataggccctgctgggggccagagggtaggaggtaccagagcctggtgtctggcagaggtaccctggagatgggagccagggctcggtcactgattgtgccccccactgcccaggttcctgtccttaaggctcagaactgtagaccctcaggcagacccgttctcccctaccagaggacaccacgccagatatctgggcagcagggacatctgacctggggtgcttgctggcagcactgcctggacagcagggcctccttagggccacctcccaacccagctaggagcgtcttaaggcctgccctccctgctgggcttgggtgggacgctcagggacaggcagcagtgggcagaggccagcaggtactggcagccctgaccacagcagagactgggccccagaagatctgtttctctcttctttttcatagttgtgttgagacagagtctcactctgttgcccaggctggagtgcagtggtgcaaacacagttcactgcagtggcaacctcccaggttccagtgatcctcctgcctcagccccctgagtggccgggactacaggtgtgaacactgtgcccagctaatttattaaattttgttgtagagatggggtctcattatgatgcccaggcgggtcttgaatttctggactcaagtgatcctcctgccttggcctcccaaagtcctgggattataggggtgagcccctttgcccggcctaaatctggctcttcagattccgagagagagggtacaggagcctctctgctcagcctgaagaacacccagaaggagggaacctcaaagagccccgagatggaaggctctcctggcagcgcctcctgcaggggtgcctgtggaacaggctggccccagggctaggagagttcatggcccagtctgcttcactgggctgccacagtgtgaaagctgggcctagacctggctcctgacatcctagtgagggctgggaccttagtggttctgaaagacctttactggatggttccttccagagtggggtatgggatacacacacactgcggccaggcattacgccagctcccggatgcctcagcctcgtgaattcggggtaggacgctcagggcccatggtcagcacagcgggtgggtgggttccagcgtggtcacttctccaggggtgcataattgagcagcttctcgatcaggtccacgtgggccagcagcatccggcggcagcagtagcgcttcaggcccagggcatccagcgcgtccctgtgtcgaggggaggagcagaggccaactgagttctctacggtctgcaaaggcctggagcccacatccaacctgcctctcactgcctgctggcctcacccccccgccaccggcaaggcgaagagattcacccggctcagaagctgagatctagcagaatgatcctggctggagtaacctggaaatgcccagaaccctgggtggagcgtgaggagcctcctctcccacctactctggctgtacgtgtgtgtgtataacatatgtaagaaatgtaaatgaaatgaaaacgaagtaattgcggggagcttagaaaaccaagaccaccaaggtgctgatgtgcagccacctcatccagcactggccacggcagggtagctctccaggggcctgcccttagctggttcacccccaccccagccagagcaagccctgctctgccgctgtggggtctttcctcacctctgcttccttccatcagagagagactgcttctccacggagccacctctcccacttcccaagccaattagaagctttcatttccctgggacctagctccagtcaccctcaagacctccagaaaactcccacaccgatggctccaatgtgcagagacacagaagcttgggaaaggggaggccacatgggaggcccctgccgttcctatccggggaaagggtctggacaggccgccagccactcagtctagcagcccactcgctttcctcgtttgtccagcaagctgcaccaagtgccgatggcaggctggcgcacacaagcccagggcttcacatgtgacgaagactcagtgggcgagggtcagactccagcgggggcaccaagactcaggcaccgtggtgacagcagcaccaagggacaagcacaggagaaagacgcctcccctacaaagcctgatgagggtggtcagcaagtctaccctgcatttctttttctgtgtgtgtgtgtgcgtgagacggagtttcactctctcttccaggctggagtgcagtggcgtgatcttggctcactgcaacctccaacctgcctcccagactcaagcgattttctcgtctcagcctcccaagtagctgggaccacaggtgtgcaccgccatgtccggcgaattaaaaagatagagccaggcgcggtggctcacgcctgtaacctcagcactttgggaggtcgaggcgggtggatcacctgaggtcaggagttccagaccagcctggccaacatggcgaaatcccatctctactgaaaatacaaaaattagccgggcgtgctggcacacgcctgtagtcccagctactcgggaggctgagacaggagaattgctggagcccaggaggcgggggttgcagtgagccgagatcgcgccactgcactccaacctgggcgacggagcgagactccgtctcaaaaaagaaaaataaaataaaataaatttctggagatcagggtctccccaggttgtccaggctggtctcgacctcctgggctcaagcaagcctctcgcctcggcctcccaaactgctgggattacagatgtcagccgccgcgcccgcccgtcctgcagcgaggtttgcaggacatggggtgggcctgggggcagagacgggaatagggcggaggccaagggctttactgcgggtgacaagacgcctgcgacccgccaggccacctagaatccccaggacaccactggtttgaagcccaactccgttctcttccccagacttcaggggataaggttctcccgaaagcagatcacagagcggggctggagaagccgggcctgaagctgctcatggggcgctggcctcaggcagcgctgcgcctcccgccccggcgcgcaccccagggcggactcagcccccagccccggcccgcgccccacggcggactcagcccctagccccggcccgcgcctcacccctcggtgtactcggcctgcagcagccccaggtaagcctcccacttgttgccgacgatcttgccacaagtgaagcagcgtacagggatgatcatggcggcggcgcgtcccagactgcccggcccggccgggccgcacgcgaagaacccccccaggccccgccccgggcgcgtccactgttgcgggagaatcggctccgctcgttctccgctgctctggccgtccctccaccggccccggcaccgctggccgcagtttccgccgcgatgggggcttcccgtgcgtcccggggctcctgggcctgtgcgtcccggggctcccgggcccgcgcggccgcggcagcagcagaccgcacacccccgcccaccgtcttggtgcatcccggcgctacggcgtctgagcagggccgtaaagctgcggcggcggttcgcgtttctcgtgtccgcttgactgacagctgcgcggcgggagcgggcggcgcgagcgggaggcggcggcgcaggtactgcgcctggggcttgtgggggcgtgcggccagggtcccgtggccggaggtgtccgaccgggagcggctggagccggacgcgagcggggcgcgcgagttcgagcccagagccgacacgcagcaacaagtggggtccggcgcgggggctcggggagagggcgggcgggggccggggcgggtcttcctgccgcccctcctggccgcgccgagtagtgggttcctccgcctcggcctctgcccgcggggtgtccggggctctcggcgctgagttcgggggtcccattctggacgcggcccagcccctaggggcgccgccctggcctcagctgcgcaattacagcccccgccggcagctccccgccccgggctcctgtccgcgttctttccgctctttcccgggaatggggtcggggtgcgccctcccgggtcccggctctgctggctgctcgccgtcccgagctcccgacgctcagacgcgcctctgagcacggggagaggggacccgggagggaggtcggggagggagtcgtggaagaggtgctctttgagctgaacctggaagaccccggcacaggggatccctgggcagactcccggaggctgcactggcaggaccccctgaaggcctcagctctggcttgccctggagctcagggcctacggacgacgagggacgaggagcccgtgtctctcggatggagtgcgggggggctggcaccagcacccttcttgctgtgcccctggggtgggggtgaggaaatggggggtcggtgtgcagtgagaggcaaagaaggctccttggaggtgcgagggcagtgagaggcaaagaaggttccttggaggtgcgaggtgggctgtgggggtgggtgggccgcaaagcggcacccatggggggctctgggctggtttgccggcctggggcttactggctggggtgggacctgtgttgggttccaggcatcagnnnnnnnnnnnnnnnnnnnnnnnnnnnnnnnnnnnnnnnnnnnnnnnnnnnnnnnnnnnnnnnnnnnnnnnnnnnnnnnnnnnnnnnnnnnnnnnnnnnnnnnnnnnnnnnnnnnnnnnnnnnnnnnnnnnnnnnnnnnnnnnnnnnnnnnnnnnnnnnnnnnnnnnnnnnnnnnnnnnnnnnnnnnnnnnnnnnnnnnnnnnnnnnnnnnnnnnnnnnnnnnnnnnnnnnnnnnnnnnnnnnnnnnnnnnnnnnnnnnnnnnnnnnnnnnnnnnnnnnnnnnnnnnnnnnnnnnnnnnnnnnnnnnnnnnnnnnnnnnnnnnnnnnnnnnnnnnnnnnnnnnnnnnnnnnnnnnnnnnnnnnnnnnnnnnnnnnnnnnnnnnnnnnnnnnnnnnnnnnnnnnnnnnnnnnnnnnnnnnnnnnnnnnnnnnnnnnnnnnnnnnnnnnnnnnnnnnnnnnnnnnnnnnnnnnnnnnnnnnnnnnnnnnnnnnnnnnnnnnnnnnnnnnnnnnnnnnnnnnnnnnnnnnnnnnnnnnnnnnnnnnnnnnnnnnnnnnnnnnnnnnnnnnnnnnnnnnnnnnnnnnnnnnnnnnnnnnnnnnnnnnnnnnnnnnnnnnnnnnnnnnnnnnnnnnnnnnnnnnnnnnnnnnnnnnnnnnnnnnnnnnnnnnnnnnnnnnnnnnnnnnnnnnnnnnnnnnnnnnnnnnnnnnnnnnnnnnnnnnnnnnnnnnnnnnnnnnnnnnnnnnnnnnnnnnnnnnnnnnnnnnnnnnnnnnnnnnnnnnnnnnnnnnnnnnnnnnnnnnnnnnnnnnnnnnnnnnnnnnnnnnnnnnnnnnnnnnnnnnnnnnnnnnnnnnnnnnnnnnnnnnnnnnnnnnnnnnnnnnnnnnnnnnnnnnnnnnnnnnnnnnnnnnnnnnnnnnnnnnnnnnnnnnnnnnnnnnnnnnnnnnnnnnnnnnnnnnnnnnnnnnnnnnnnnaccacatatgtgcggaggcccctgggggcccaggcctgtcctcagtcccgactgggctctacctgaggaccctggggagcctgggcctggccctcctcaggcaagcgggggtgggagggagcctggtggcggggcagggcactgtgcccgccagcaggggcgggtgggggcccctctctcctgggtgtggagtgttggcgcagactcggcctggcttctgggggggggggtctgggatggggccaggagggtgaggcgctggttttatagaagggggcgttgtggagcctcctgtggtcagggcagggcacagggagcagagggtgggctcccccggctgcttcctgctagaggagggatcacttcagggcaaacgaccaggggaaacccatgattgaagttttagctgctgacccctcccaccctgggtgttgccctggaaacaggccagccacgggaccaggagggctgggagggggagtacgggctgagccctggctgggattcagctgaacttgcactctggtctgggatcccagcccacgtttccctgtctgtaaagctcaggtgggatcagaaactgcccgcccggagggctgcatccctcctgccgctgaggctgggcatgaccttgactgggagagggtgttgaaggtgtctgtccccagcctcgcccccacacctgtgctctctggccctgtccatgcctgggacagatgtgtgctcacccccagggtgctgtgggatggggtgggtgcacacggcgccacgagcacacgtgcccgacacctcagcggtgcacacagccaaggccactgcccactgtacccacgccgtccgtgtcctctctacggtcctgggagaccggcgttgtgagcggtggggcctgtagatggggccgggtcctctctacggtcctgggagaccggcgctgtgagcggtggggcctgtagatggggccgagactgaactgaccctagcctcaccactcatatgtcggggctggtgatatttgggaatgtcactgcctgccatgcagctgcccaggcctgatgtgcccccccagactgttctataggggtctaggttgcaggggccagggccagggctgtggtgggatggcacctgaggtgcggctgctcctggagcctggggggtgtgggaaggtgccccccacccagggtcctaagtctgttgccttcacccccgactcccagcagataaatacccaacagtgcaggaaaggattacagggaaggcctggagtgtggggttagcctcggtggtcccaggaggaaagaytgggggacctctggactatctgtccctcccctggggctgctgggggtatcagagtggtgtctccagcctccagggctcaggtttgggtgggaggggcctggtcccacccagactctgtatgtagcccccagtccctgctcctctgtgtgcatgagggagtgccagcttgcttgggaccccccagggtgagggcttgggacgggcactggggccccgcaggggctgaggcagccaggaagcccacagcataggctgtttgtgttggcgggcctccctacctcctcaaagctgcctcagagcccgtgggcctggggggccagggtgtgtgggcttggctctgctgtctgtcctgagctgcccctgctgagctgtgtggagaccccgaggtctgggctgggccaggactgagctgctgccctgctgctggggctcagagaggctgctccacgggcatggcacccaggctgctgcagacaggctgctttatcatgtgggcaggcccctctttgggttggacctccgtctggccttgtgggtgtctgagatctccttgcagctcagtccccagggcttttccaacctgcagagctctggatgtctcttttggggctctcgctcagccagggttggggtggaggctctatggttccctcctgcccttgggctactggaaggacagttacctcactccagagagctagttctgaggggcgaggtgttgcggggttgagccagcagggcagggagtagtgggcactgcgtttggctrcccaggtgggtttggggcctctccctggccagaaatccctgagtgccaggaggaggacagactccccagcctggcacccatggtggaggagggccttgcgggtcattgctggcagctccatagggagggcgtgaggccccttcctgagcctgggtgtctgctcagagcccaaggcagggkggggtagggtgcttgtgcctggtaggaagcagacagcaggctggtccaggggtccaggaccccagggaggaggcactgctgcgtgtctgtgtgggtgcaagcatgtgtcttggcctgtgtctctgcatgtccgtgctgtgagtacgtctttgaacatgtgttctctgcacaccgtgtctctgtgagtgtgagtctgtgtccctgcctggctgtctcagagccctgaaggagcagaatttggtgactcagtcattgattcagagctttcctggttggggctactcctcagtggtcttcttctccgagtctggtggtgtatcccctgcccaccccgactgcccctctgccctgtagggacctggccccaggtgggggttccctgcccttctctgggagcatctctggctgtacagctgagggtggaagccagggctccactctgcccatctttccttttgcagagcttggggcttccttggtcgcacccaccacctgcctgcccactggtcagccttcagggaccctgagcaccgcctggtctctttcctgtggccagcccaggtatgtcagggcccggctgggctggatggttgtggtgggcagcagtgggcttgcctctgggtctcactttgccagcccaggggccttgccagcggacactttgacaccacacctgagtatctaattggagctcccgtggggaggggctggactttggagacagggtcccagaacaccccgactggggtgttgaaggaccctccccgactgagctctgacactgtgccttgcccgggcccctgactgcgtctgggcaacccagtgtgaatcttgaacttggcaacagaagcaagcccagctccccgcccccacccccccccaaccccgctcctcctgaccctcggtggccttgtgaggtttttgatttcttcttgaataggcttcatctgctcacctgggcgatgtgtgcagagctttgtagatgggaaagggggtgggaggggtcttaggggacactgggactgcatcctgggcgctgggctcagtgcaggcacccagaccagctctcccttcgccctcccacccgcctgggaccctcgagccttgcctgccacttccccttccacccccagccacagagggacgcaggggagatggggcaggggtgccactggctagcctggcggcggatgctctccttggggtggctcgggtggtgtttttgactgcaggtggggtctggcttctcccagtcagcctggggtcctcccgggtccccgtggcacctgcccttgcctggcccacgagtaggtgctctgagcgctgcccaggtcacatgtgagctccctggaggcgctgcacacggctgagtgtctgccctcaggttgcacctgcgtggccaggggaagggggccgggcgccatctgctctctgggcagagctgcgggtgagggtttctgtcagggttggggtcccagggctcctggggtctctgctgggccccgatgcgtggccgccgttctgacccattcctggggcccagacccaccaaagaacccccaggggaaggacagggtaggggccatgggaagccccaggatggccttgtgggccttcaggggacctccaggccagcctcctgttctctgggggccccctgtccccttcccccagcgaggacctgggcatggggtgctgccctggggcttgggctgcagttctctacagagcccttggggggcagcagaggcttggggcacccagcccaggtcgtcaggggtgggcagagctgcgggacctccctggacacccggggcttccacggcagccctccccagacctgccacctcccacatcagtcactccaggaggacccaggcctccagagctggtcagccctgccatggagcacccccttcccctcccttagcttcctctccctcctcttcctcctgcccttcctcattccccacctctgggcttcaggtcatctgccaggaatctgggccacgtgctgatatcttcccaacaccgcagggcccttgtgccctgtggtggggctggggcttcagaggcgtggggtaggctgcagggcacagctgggggcctctgtccccatctccggctgtgggaggtgtgtgcgcatccggcgtgatgacacccaggagtgcaggcacatctgcgcacggggccggtatgtctgtacctgtcaaggggtggggtggggtcttttacaggctgacttccagcctgggctggagcaaaatgaaattctgggccccttgtttaaaaattaccaagaatttcaagacgggaacagcagagcatcaagccagctggggtgggtgcgggcgactgcccttgaagccggccccgctcccgcattggggacagcacggggcggaggccgagccgggcccacctggagcgctctgggtctgtcctggggctgccagcctcctgcggggctgcctggtggagggggggtgggtatctcaggaatcacacctgcgcttttctgtgttctggaacctcccatatagtcaaagactcaacgacacctgctccatgcagtgcaggctgacccagccccccacccgccgccggcactcagggcttccccaagggcgcccggggcggagccgcttcaagttgccaccagacagcaacggggtcaccctccatttgcgtagtgctttgagtatcgttctcgtggttggaggtctccaagcccggcccggggccagagtccgggcgaggtaccgtggggggaagggctgggggtgtcggtcgcgggctaagagctgcccaggtttcatccccaggccccggccccgccctccagtcgcctcaggcgcccttcgcgagcatcttcctcccgcgcgcgaaggtgggggggctggggcgccggcgcgggcgaaggggccgggnnnnnnnnnnnnnnnnnnnnnnnnnnnnnnnnnnnnnnnnnnnnnnnnnnnnnnnnnnnnnnnnnnnnnnnnnnnnnnnnnnnnnnnnnnnnnnnnnnnnnnnnnnnnnnnnnnnnnnnnnnnnnnnnnnnnnnnnnnnnnnnnnnnnnnnnnnnnnnnnnnnnnnnnnnnnnnnnnnnnnnnnnnnnnnnnnnnnnnnnnnnnnnnnnnnnnnnnnnnnnnnnnnnnnnnnnnnnnnnnnnnnnnnnnnnnnnnnnnnnnnnnnnnnnnnnnnnnnnnnnnnnnnngcgccggccggcgggatggggcgttccggggcggcgggtgcggggcgctgagcggcggccccggcacacccgggcgcgatgcgccgctccagcacggacgagtccacgtaccggcgcagcccctctccggagggcaaggagccggacttcgcgcgcggcggccccttccggcgctacagcagcctatacgggcgcgcgggcggcggggacgccgggggcgccttcttcggcctgcacgcgaaccccggccccaaggcggcccaggcgcgctacacgtcgcccaagggcaacaagtacgtggttttctacctggacctctccttcatcttcctcctagaactgaagcgctgcggcatggcgcgcgcctgcctccaggccgtcaagtacctcatgttcgccttcaacctgctcttctgggtgagtccgggggccggggtgggggcccgggaaagacccggggtccctcccgcggcgggtcgcggggtctggggagtcggagtcgctgccccggccaggcgttgggtgcggttgtggggatggtcccgggaggacccaagaccgctgctccggctaggagcctggactgggcgggtggggaaggtttgcaccatcgcggggtccgccccctgcactcagagcggctgccccacgccctggtcccctctcctctcctctcctctcctcacttgatgagacgggacacgttgcacacgtgcgcgccggacagggccacccgggcactgcgcctctcctagggtcggggttcgagtccgggtcgtggccagttttgcgcggggccccggtgcctcctctgcgcccgctccctcctcggtgcagccgttatccttgcctcggccccgcccctccaggcaggcgacctgtcgggcccagggactcacttccgagggtttgagccggctgccgccaaggtcccccagtcgccgggaggcgctgcggaagggaatcctggacactgagcagggccgtgggccatcagtgttcgcgggagacactggctttcccgcgcctccggcagcagaggcttccctaacttttgcggaggtggggtcaggtgtgctcagacctgcagtggtgtccgggggggccctgtgtgctggatggagcagagctgaggtagagggcggacagggttccaccccaccccagccccatgtcagcaagaggtggggcaggattcccacctggccaggttggagcaagcctcatggagccgcgaccctgtcctgtccctggctcctgtggagggcagctgcagttgggggtggccgaggatgacctggaccgggcctggggctttgctggctgggctgggggaggtgaagtgataccaaggtcattctgtgccctattcttaattcctgaaccagctcctgcagctgggagtcgggggtgtggcctcagctcctgcctaggctctgggcttcagaaggaggctgtccatctgcataaggtccagctgggccaagtgcccagaagcctgggtctgccttcccacctctcccctcctgagcccaggctccttctctagccagcttggggtggaggcaggggggtccctgggagggacagccagcctgggttgcctgctgagtgtgacccaaggaggctcttggcccagacatccacctccagaaggggtcacccaagggttwgttttctgcaagaggctctggaggggtgaggcccaggcctgaggggcgccttggaggtaggggtggtgggaggtgtgggtgtggtctggagctggtgggtgtggggggtggsctgcaggtggctgagtgaccagagtgtttctgtgacggggggacggggcagaatgactgaagggcagtgggtgtgggggcccggcaggcaggcaggcaggtcctgggaggggaagccctctctcctctccaccctcctcctgtcctccgtggcctggacacctgccttcagggagaaagaagagggtcctttcccagggggggtctctctgctctgagagcagcccgccctcatggaggacccccagtggacctctctttgctctgtgaaccccagagaagcctccattcctaccgcatggcagacacactcccccatcctcaacctgggaaagaacacacaaggaacccccttgggaccctattctgggctggaaaatgcaattctctcttttttatctttgttttttgagatagagtcttgctctgtcgcctggagtgcagtggcgtgatcttggctcactgcaaccttccatctctggggttcaagcgattctcatgcctcagcttcccgaattgctgggattacaggcgcgcatcaccacgcctgtctaatttttgtatttttagtagagacagggtttcaccatgttggtcaggttggtctcgaactcctgacctcgtgatccrcctgcctcgacctcccaaagtgctgggattacaggcggccccaattattttttattaatcaatcaccaccttcccgccagtccagcaaactggagccccgctggcttcatacaccagccttggccccccccaaccctgggctggtgcccagtgggggtctaagggtgggggcggggcaggggaaataagaatgagtgggggttttgccaggagagtctgtcccgggctgatgtccacgcctgctgtgccctgagtcactgtgagctaagccctctcctcctggcgtgaggctatttcaggagtcaggcctagcgctccccttccccagggctcctttccttttgggggtgccagccccctgttgtcggggcttttgccgcccactccatttcctactcgttgggagaccaggggatacaacctggcctcctcctcctcctcctccgtcttctcaggggcgaagttcaggggttaaggtggtgggagggaygtccccccggcgggacctcaagatccccgcgtgtgtctgtcctgaccccccccgctgccggagtcctgctgggcctgtggggagggcatgggggagccccagtgggcagccagtgaccagagccgtgggcagtggtgggagccggggtggggtgaggaaagttgtgtgtgactggggggctgtgcccgtcctgggtgtggctgtgggtgtgggggcaggggctgagccctgtaagtggtacaggtgcggccagggcactgggaggggttggggggctgggagtggggtcccatgcctggctcgtgtgcggtggtcagggtgcagcttccctctgcccccagcttgcctggctgccccttagctttgctctcctgtgcccttaaccccagcctggcacccctctctcccacctttgcctccatgttctcctcaaagccccccttcttccaaatgcagaccctccaaggccctcacagtactcctggcttccaaggtctctttgggtccaggcctgagcccccctccacacccatggtcaggctagggcccctggtcactgacggcctggggcagcctgggggcctacctgggaggggaagggaggggctcgctccagaaggctgattgacgtatttctttacagcgttggttcggatttcccaggcaggcatctttgctggggtctgggagggtggggctgctggcaagagtctgtgctcagagcctccagctttgggtggagtggggagggttcctggggcagccagggtggggaggtaggatgtgtcctggcctggtggtgggggacccggtggggccttcagagttcagagcactggtgccaactcctaaccccatggacatctggggacatgctacctgccttcagcaaatagaggccctcacccggtgatggcagctccgctggggcacagccactgagccttcctttgagccctccctgcagaggttggggagtgggaagcaggctgcctgtggtggggccggggtgtctcctgggagcctcattccgggggaggctgggtgcagggcccgtgagcctgagcgaggtgtcctggtccaaggcaggtgccgacacagacacaggttagcaatggtgagggcgtggggggctctgctgccctgggacccccaccttcaggcctctgtgctgcctggtcagctcagctgctgccagcgacactcttcccctaatggaagtggaggtcccggggcggaggggagaggacggggcctgctcttcccgcctgtcagggatggaggcagccgagctatttagcaaggtgccaccacgaagggctgtcctcccgccctcctggcctcggctccttccagacgctgctccccagggtgggtgctgctcccctttctcttcacccgcagcaccaggagcttggtggaagctccggccgtctccgcactgtatggttagggcctggctgggggaccgggtgggggttggagtcccacctgccagtgcgggacgccgggcaggttctgccctccttgaggcctcattttcccatctgcaccatgtggggcggtagagggtgaggtccccatatactggcctggctcgggggttgaatggaaatgtgggaggcctctcagttccccaccacctctgcgctgatccccggggagaccccccaggtgggcagtgtgagtcttggagccaggtggtccagggccccagcctggaggggcacgggggctgtcctggctctgcgctgcctgggctgtcaaccctggaggtgtgggggcccctcagcctcactgcccactctctgttgttccaaaggaaagtcctggctgcgcttgaggcctctgctctaagatcagcagtgagcctggtggaggggtgcagtgggggccagccttggcttcccctcccctgggatgagctgagacgatgtctggcagatggcatggccggcctgcctggcgctggcctctgggcagcacagtgtccccaagggtggcagagggctctgccttcagctcccaggcctctctttgaggagtttaacatcccaggccagcctttggatcaattgttcggaaacaatccgtttctgaacaaaggccctgacgctggcaaccacagcgtgtctgagccttggggagtgtgtggctccctgtgggtggggagcagcagcggtcggtcgggggacactgcctacccagctgtgggctccaggcagctctggtgctgttgggggtaggtcagacttgtccacccggtgacacaggcctggctccacggggcctctgcaggttccaggtcccagctggcggcagggcaggcaggccgggcctctgtgtggagagggctgtctccgggggcggagatgtggcattggcagcccagggctgcagggggcaggcagagaagtcaggaggcccacgcagggggacgggagtgagcgtgggggacctgggctcccagccgcgcttgtgcgatgtgagccgtggtcctggcctgatgacggcaggccgcctccttgctgttcccacgcagccctgctgcacccacagccccgctgggtcacagtctcctcctggattcctgtgcctccagcaaactcctacccaccctgcaggagccagcattggcaccctgggcaggtgcccactgacgagggctgttctgctctccctgctttggacactggcctcagggtgggccttggtcactgggtggggctggtctcctcatctctgggccctggggtcccttggagagctcctagggtcaggggtgagggaacggaggacagatggggatgtggaaacaggacgtcgctcagggcccacagctttaaggaaacaaatcacagcgagccacacagattgtaagtggacagacttgtcatccctggaaaccagcatcccagccatgacggggacgttcccgccagcccagagggtcctgaggctgtgctggctgctagcatccctgtgtctggacagagccctggcccctgcagggacccagccccccatcctattccaaggacgtggctggcagcccagccatctgccacaaagccgcatggccggaggggcagtgggctgagggctgagagctggccagcgtggcccccgtgggcccggagggagcatactcgatggactccagtgactgcacccctgcccaaggcctacaggaggctcaagggggccgtcccgcagcacctgcccaagaggctcaggtgggctgtccagactggaaaagaagggcagagcagagaatgcatgggctcaccagcacctgcacacgcccagnnnnnnnnnnnnnnnnnnnnnnnnnnnnnnnnnnnnnnnnnnnnnnnnnnnnnnnnnnnnnnnnntttgggctcctaatcttgggcagagccatcagttgctgctgaagatcagggtgagcgagtgtctgatggactgagcctggggcctggtatgctggacggacattggccagagatggtctcacgcaggtcctggggacaggttctgggcagtggacagtgtgagctgatgtctgggagaaggacaggccccaggcaccgctgactggaggtgaagaggtctgggacggagcccctctcctgggctgttcccccagctgccatcattcctagggttcctctccccagctgtcatggggcggggtcaacctcccacctgagcttgtgtctggcctgcgggggggcagcagtgagggagggaggctttcagcctattcctatttgtattgagcgtgtggggagggagctcctctggtttccgggtccaggcccagatgctgggtgggaccctgggagggtgcgcaggctgccagccacacccctagctgctccccatctggctgcatttgaccagagggacctggccctcctggcctcagccctgctcatcctgcttttgattttctgtctccaagctaatggggcccattttctcttgcgctttgaggctataattttcctgccaaaatgttttaaaagctgcatatgcagaaacactttcaaaattgcaggtaattttattaaccacgtgcacgcattttatctgtgtgggtctgccagcacgctggggcctcggggcccgggggacgccgggttgcagggcggtaacgcgygcgtgtggccacgtgtgatggtgtgaggcgtctgtggcaacgtgggctgttgtctgtcacagtgtgtgtgaccgagcccgtctggtgacagtgggtgtctctttcctgccgtctccggtggaggtgaggatgtttcgtggagtgttaattagggaaatcagttcccaccagggctggggcagttgtgggaggggcccagggctggaggtgtagggttccttcctgcccagcccccatggaacggggtttcccacacctggcatggcaccagtcactctgcacatgtcctccctgtgtccttcgacacatccccatggggcgaggggagcttggaacagctcattttcctgatgacaggagaggtctgcgtccttggaaggcagaggcagatggagcaggcagtttgggttttttttttttttttttttttttgagacggagtctcactctgtcgcccaggctggagtgcagtggcatgatgtctgctcactgcaagctccgcctcctgggttcacgccattctcctgcctcagcctcctgagtagctgcgactacaggtgcctgccaccacgcccagctaattttttgtattttttagtagagacggggtttccccgtgttagccaggatggtctccatctcctgacctcgtgatctgcccrcctcggccttccaaagtgctgggattacaggtgtgagccaccacgcccggccccagtttgggttttaaatgacagttttctctgttgtgctagcacctcccctcagttcagggaccttcacccccagcctgggcatttcgtctggaatgagacttgtggggttgcttggcgcttgaggccaggatgtactctgagctgctgatggccatctcctctcctggggcctcgtttccctctgacctcctgccctcatcacctggtgatctggacccagggccatatcccttctctgcccagttcttggggcagtgatggtgtcaggccgtttgtgggtccccctggtgccctgtctgcccctccacaagacctgggaactgcgggaggatatggggacagcccaggggcaggctggggttcctgtgtgctcgggaatgcccctcagttccgcatggccttgtctgtacatggtgtgtgtgaccttgtgcccgacggtctggagggaccattgagtgggccattgcctgtccaggcctctcctgtgctccagaatgttacgagggacacctctccaaaggggtgggtgggggcgccgcgttcacagtcagcaccctggacagcccatcccccagctgctggtgcatcccatagcagggccaggtcccccgggaagtgggggcatctttgtagagctggcagacccctgcccaccctggggctgtgccccaagcccagtgctcccagtgaggacagattctcttaattagggatgtcccytggcacttctgccacggagctggcctctggtcctgcacactccagacacatccaccctggctcacacacaccctggctcacatgcaccccggatcccacccccgctgacactcaccccggttcccatgcaccccaggctcacatgcactcccggctcacacgcacccctgctcacacgcacttcggctcacacgcactccggcccacacgcaccccgctcacacaccctgctcacccagttcccacgcaccccaggctcccacggacctccgctcacatgcaccccggttcccacacaccccaggctcccatgcacctggctcacattcacgcctgctcacacgcaccccggctcacatgcacccccgcttgcatgcacctcgcctcccacccccrctcacacgcacccccggctcgcatcctgggctcccatgcacccccggctcccatgcacccctgggtcacacgcatccccgctcacacgcaccccagctctcacgcacccccgggctcacacccccaacagcttgcacccccggcacacatgcaccccggctcacacgcacccctgggtcacacgcatccccgctcacatgcaccccagctctcacgcacccccgggctcacaccaacagcttgcacccccggcacacatgcaccccggctcacacgcacccccgggctcacacgtgccctggctcacacgcacccctgggctcacatgcaccccggctcacacgcaccccaggtcacacgcatcccctcacatgcacccaggctcacacacccacccccagcccacactcatccccgctcacacacacccccactcacacacaccctggcccacacgcaccttggctcacgtgcaccccggctcacacgcaccccccctttcacacgcaccccgggctcacacgcaccccccttcacacgcaccccgggctcacacgcaccccggctcacacgcaccccctctcacacgcaccccggctcacacgcacccccctcacacgcaccccgggctcacacgcaccccgggctcacacgcaccccgggctcacacgcaccccctcttacacgcaccccgggcccacatgcactccggctcacacacaccctcactcatgcaccccgggcccacacgcaccccagctcccatgtacccctgctcacatgcaccccagctcccatgcatcccgggctcacacacaacttgactcacacgtctcaggttcatgcatccgtcccctggtgcgtctccgggccgccctccaccgggctgtgctggctgccacccccaagcctcttcctggtctcctgggaagcctcccctatcaccctaagctgcttctggggctggctttgctcagaagccacacccaggctgggcactgtgcccaggtctcctattggctccctgcagccacgaggggctgtgtggtcagagccagcaagtcagcccctgcctyggtactcccaatcctggggcccagagcacaggggtgacccctcttcctgcacccagtctgtccagctcccctgtgcgctgtgcctggcctgctggggaggggctctgggcgtgggtgtcagagctcagcaggcaccaggagccaatggctcagcagagcttcccaagataggtcctgcgctggcagcctccggacagcgttctgttttgaactttaagcggagatgctacctctggaaggccggggaaggacagagcctgccttctccccaggatggcctgagcgtgtgtgggacttgtggggccccagcagtggggggaatctgctctgaggggattttaccctgtggagcccagagggaccgaagacaccagtgacaggcctggcctgaatcttggggcaccagcagccatgctggcccttgggcagggagctgtgtcccatctccccagcacagcctcctgcctgccagccagccagtaaaagggtggcggcctccaacctccagcctggcgctggctgatgcactgctcagggaggggcaggtgagcgtgcacacgaggagggggcatctcccacccccaggccccctgaggcaagagtgttggggctcatgggccctccgtgggccctgccagggtggaggccccakgcctgtcttgagctgggctggtgttgcaggtgggggtggggcggctgctggtggccagcagctatcccagccttggtttctgtctggaaagtggggtgtgagtctggccactggggcttgggaggcttttatggggtgacttggggcttctggtagtcccccgggaacccccagagcctggggtctgagcctgtcctcaggcatgtggtctgggtgctccaaggggtttcatcaggttgaggggtggctttgccagcccattcccaagtcctgtccagtccagggtggggcagggatcccccagggctgcgcggcccttccccagaaccagtcaaccgtcggcaccccaggatgtctacccaccacccacctgggcacccacgctgcagaccgggagctggtcagcattttcgggggactgcttgtcccgtgcccaggcctggaacatatctcccgtctcatcctgaaacggcccaagcccgaggcctctgtctgaaggtggggtcctggcggacccctgcttcccttgaggccttgctgggccagcagcctagcaccctctctctgggcgcagcaccccctcgtctccccctgcctcttcctgttttaattgatttttataagaacaagcacttaggaaacacagtaagagctctggcggttacagacactgcaggaggtggccctccgggtggcaggtgctcctgtgggacccgcctgctttgttcccaccagtgcccatgtggctgtaagaaatcataacttggccgggcgcggtggctcatgcctgtaatctcagcactttgggaggccgagacgggctgatcatgaggtcaggagattgagatcaagaccatcctggcggctgggcgtggtggctcacgcctggaatcccagcactttgggaggtcgaggtgggtggatcacgaggttgggagatcaagaccatcctggctaacacggtgaaaccctgtctctactaaaagtacaaaaaattagctgggcgtggtggcgggcgcctgtagtcccagctactcgggaggctgaggcaggagaatggcgtgaacccgggaggcggaggttgcagtgagccgagatcgcgccactgcactccagcctgggtgacagtgcgagactcggtatcaaaaaaaaaacaaaaaagactattgtggctaaaccatctctactaaaaatacaaaaaattaaccgggtgtggtgggggcatgcctgtaatcccagctacttgrgaggctgaggcaggagaatcacttgaacctgggaggcggaggaggttgcagtgagcccagatggtgccactgcactccagcctgagcaacagggtgagactccatctccaaaaaaagaaaaaaagaaagaaatcataaccaggagcagagtgtgagggaatcagcgtttctcctgccacgagtgacaggggacagctggggacatcacagagatcttgtcgggagctgggaatcggaatcctgggaccacctgccaggaagccccatcccggagtgagggcagggctgggtctccctgacagcacagtctggaaaggctggagtggcctgtcaggtggggagtgagccttctgccctgcgcagaccagacggtgaagcggggttaggggtgtgcagactgcgycctggggcctaagatcccgtccctttggctccaggccaggggttgggcggatccctcctagagggagtggttcagaggcacaagggagcctccccgactgtggccatggagtgtgggtttggggatggggtgccagcccagggtgtcgggaaagactggcctgccctggacacccccccgggctgccgtgggatctagcaggactctgggtggttctggctcaggctggcaggcggcatggctttgggcttgtgggccgggctctgccctggggtccagagcttgcaytggggcctcaccctgtctgtgtctctcmtgttgctgtgccccagctgggaggctgtggcgtgctgggtgtcsgcatctggctggccgccacacaggggagcttcgccacgctgtcctcttccttcccgtccctgtcggctgccaacytgctcatcatcaccggcgcctttgtcatggccatcggyttcgtgggctgcctgggtgccatcaaggagaacaagtgcctcctgctcactgtgagtgccggggcccaagcgatgctccgggtgggaccacgcagggtggggctccggtggyccccaggccttggctgccgcagtgaccccccagacgtgggcaccacctctggggccggacctccaggctggcagtgtggcccrgggccctggccactgttgggtcttccaggccacactggggctggggggtgatttgcagagcggtgtgggggtcactcaagagaacgtgctgtaccttgtcaggggcctcccctgacgggacactggccctggtgagtgcaggcacagccccgcacacacgtacacacgcatgcgcagcctttcacgggcttgcggtctccgtgactcattcctgaccaccccacccccactgtggccccttccccagcttcttgttgggggcctggtctctcagctccctgggaccggctgctgggacgatcccagcccccacctcgcctcggggatggacttacaggcagggatatgtttatcctccttagaaatgttaatcacagataattaaaaaggaaaagggctcctagatggaaacacaggcttgctactgattaacatgcctggccgaggccgtgggccctgcggagggtgtgcagcctgctgaggtcctaaatcacgaggcttccgatcactcctttgtctgggaagccctggatgggttggggcctcccttaggtcgcctcagccagtccactcccctccgtaccccttcctgggggcaagccccaagtctatcagcctccctggcatcaggttggggcccagagacccctggaggcagtcggtgggggtctgtggcagccctactggggcttggagctcctcagttgaggaagctgctgtgtgtgggccccaccaggcctgcagggaccgaagcccaaccccctttcccatgggtgacttgggaccagaaccctgggtacctcctgggggtgaaggactcctgtgtccttagcccagcaccctgtctgccccactcacgcccactctgcctgggccccccagctcctggacacatgctgtccatgcctgccctcctcttttgtgggtgtcactgacccccgcatggaggagcagcagggctggggtcaggctgagctttggggctgccgccaggcgggggaagcttgcatggtcagaggtggggcttgcagcctgtggtcttgctggagggggcatcagccacgctggctgccctgaggactgtgacgtgtgggcagaaggggcctctgcagcccagctgtggcccctgctgggacatcttcccaccatgaagacaggcacccagcgaggcacctgccagacactcagaggcccctggatggaggtgtcctgaaggcagctgacaggggctggggcctcaggaacagggatttgtgcccacttgggggtgtctgggttgccccagggatgggggcaggggaggggagcccaggccagcccagggccccacactcaggggctgagcaggacacaacagccacagtccctggacctggggccaagggttctgaggtgggggcggcgttctgggctctctgggagtgggggcctggcagaggtttcctggcagcaccaggtatccatgaggtacgtggccctggcccctggcatgctgtggggcggaggctgtgcggcctttcgggtccctgtctgagcctgccccctccacagttcttcctsctgctgctgctggtgttcctgctggaggccaccatcgccatcctcttcttcgcctacacggacaaggtacggctgccttggccgcaggcccaactgcagggctgggggctccatcctcactccnnnnnnnnnnnnnnnnnnnnnnnnnnnnnnnnnnnnnnnnnnnnnnnnnnnnnnnnnnnnnnnnnnnnnnnnnnnnnnnnnnnnnnnnnnnnnnnnnnnnnnnnnnnnnnnnnnnnnnnnnnnnnnnnnnnnnnnnnnnnnnnnnnnnnnnnnnnnnnnnnnnnnnnnnnnnnnnnnnnnnnnnnnnnnnnnnnnnnnnnnnnnnnnntgcgccccaggttgtcccccgccctctgacgcagcgtcctgagccgtctgctcccagcgccccatccgggccgcgcaccgtggggttctgctctgtagagcggcctcttcttggtcactcactcatatattcagccatttgtttatattgggatgaagtcctggctattgaggttgcactccgagctagaacacaacactactttgttttgtgaatcacactgtccgtccttggccctggggagcttctgccgtctgctgctgggtcccctgacgtgcccccatcaacagacttttcattttggggcacgtcctgacttcctggcactgcagggcgctccaggctccttcattccctgccctggcccaggaatcagccccttctccagggtgctctgggtcctcactgaatattggggaccgaggccagggtgctgggtgggctcagcgctcatagcccctggctttcagctcacagagcatggctgcacgtgtcccgatacgtggaggcacctrtgtccctgtcctctgtccccccaggacccatggtcctcccccagcctggggaggaagcccagaggtgggggccctgggcctcagggctgctgggaggacatggggccggtgtgtctgcagcttggtgggctaggaggcgcgggggacacaagaccaggcgcaggaggggcccagcttaggggccggcgaaggggtctggatgagggaggcggggtacagtgggaggggccctgctgaccccccccacacccccagattgacaggtatgcccagcaagacctgaagaaaggcttgcacctgtacggcacgcagggcaacgtgggcctcaccaacgcctggagcatcatccagaccgacgtgaggcgtgggcaggtgggcggggtcggcgggtgccccctccccctcctgcctcagcccgacctgagcttgccccccagttccgctgctgtggcgtctccaactacactgactggttcgaggtgtacaacgccacgcgggtacctgactcctgctgcttggagttcagtgagagctgtgggctgcacgcccccggcacctggtggaaggcggtgagtgagacccccaccctgggggctggtaggggcctagagggcgggaccagcaggccctgccgtgacacgcatgacatccctccctgcagccgtgctacgagacggtgaaggtgtggcttcaggagaacctgctggctgtgggcatctttgggctgtgcacggcgctggtgcaggtatggcctgggggcctgcgggctccctgcccccactttgttgggaccttctgagcccagggaacaaagtagcaaagaccttgcccccaggaacccacgatcgggggaggccggggcaaaagcaggagggcgagttcagggggatgggcagggacggcctgtggggacagtgggctccctcctagtggacagaggcagaggctggtgtggggtggaggccggtggtcgtccatgttggtcggtggcccaggactggccagtgcacagagggtggcagctggggccctggtgccagtggcccctggtttccaaactccacagccctcaggaagttctgggtgtcctcatgcctgcaaggctcaggggagggtgctgtggctcgagccacaggggttgggtggggcgtgcaagccaccaggaagctgaagggctctgccactgtgtcgcccaccctggggtcggggtcagggccagggcacctgctgaggacagggaccrctctgggcttgaggcctgagcctgtggagctgccatgcccagtcctcctcccctacctacagatcctgggcctgaccttcgccatgaccatgtactgccaagtggtcaaggcagacacctactgcgcgtaggccgcccaccgcccgcttctctgccaaaaggacgcccacggggagatggccgcacccacagctgcctttcccaccaccagcctcggtgctctgccccatgctgggaggagggagggagggacaggtgcctggagcccccggaaccctgtttctggaaggccctrgctcaggtggcttcagggcctccggaccccccctgggaggggtggccacgtgctggctgcggaacccagggcaggggtgggagsggcctccagcactttttatatttacgtattctccaaagcagkgttcacacgggagccagcctgtggcccccagcctcctggaaaacaggttggcgctggaggagccgggtcttggcatcctggaggtggccccactggtcctggtgctccaggcggggccgtggacccctcacctacattccatagtgggcccgtggggctcctggtgcatcttaataaagtgtgagcagcaaccttgcgtctattgctcgtctgccttccctaccctatcttcccttctggcacccaggcctggggcagggcagcctctggcatgaacggtgcttaggcagagccctggggctgtggggtcacctggtgcacaggcttgggggagctgcctgcagagcagtctccagacctccggttttaaggaaatcatgacattagctctaagaagtgatgaggccgggtgcagtgactcacacctgtaatcccttcggctttgggaggccaaagtgggtggataacctgaggtcaggagtttgagaccagcctggccaacatggtgaaaccctgtctctactaaaaataaaaaattagccgggcgtggtggcgggcgcctgtaattccagctacttgggaggctgaggcaggagaatcgcttgattccaggagatggaggttgcaacgagccgagatcgcaccactgcactctagcctggatgacacaggaagagtccatcatctcaaaaaaaaaaaacaaagtaataaaaaataaagtgccaaggcccctggggggccgtccctgaactgccagcctttgctaggggtggcctccctctgcttcacccccccaccccgggggctcctcctgaggcgggcctccctccacatcgccccctaccctggggcctgctgtcgaggcggggctgtgcttttcccctattttgttcctagaactctgcccctttaagtgagctggcagcacaaagcacctgtcacagggcatgaaaaaaaatgcatcaaggtgcctcaggattctcacagccaggggtgagggttgtgtggggaccctggccacagggatgacggtcagttcaggttggggcatctgatccccaaactgcaccccacaatctcatttccagctaattcctgccccaccctctgcccatccccccgggagacacagcccgctctagacatcccatcctgtgtggcatccccacccctgcctccacccaatgctgatctggcaatgcctagctccaggcccacaccaccctcccagacctgcgtgtcccccaccctcactccaacagaagccacaggacccccgagaacaacttgaatgttagcgtcagcacctctggggagacaaggtcagtgccccaaagccagtggcagcttgtgtttttttagacaaggtttttggagtgcagtcggtcacagctcactgcagcctcaacctcatcaagcgatcctcccatctcagcctcctgagtagccaggagtacaggcacatgccaccatgtcttgctaatttttctatttttagggggtagagacggggtttcaccatgttgcccagcgttcctcccgccacggctttccaaagtactgggattacaggcatgaaccgccgcacacaccacttgtatctcctatgcccgtgtcaagcagcagcagggcggtgggaacggctgcacctgcactgtggcagctcgcaggcctccctgacgtccaggcggaggctttctcaagtgtgggtgccttgggtccgacccaggaccccctccccagctcccgtcctgtggaggagaccccaccatgcttcctcaccaccggctggagatgtcctgaccccctgcccactgcgccctaacattactgactctaaaccagaacccagtgcccaccctgtcctcaccgtcctcaccccacggcattctgagtgagggacgcccaggcccacccactccctggactcacttctgtccccccgagagaccttgcccgggacatgtacccacctatgccctctactgcccacctcagccctgtgggacccagtggtgaggaggggagtcctcacggccagccaaggacaggatggtgacgaggggcaggggaacgagggccaccaggccttggctcatgatgcctccaaattccccagggcctccccagagcctggacaccgctgcatggcagggtgggtgtagcctgccagccacatgtcctctgccccacccctcgctggaaatgcctgtcccgatatggcccacgggtcctgccgttgcccctcaccatgctccctgatgtgtccaggctggcctgggggtcgtgctacctgaggcggcagagctgagccaaggtccaggaccagtttcaagagggtgggccaggctcctctgagtccatttctagggcagcccctgcacccttgccgtgctggactcggtggggacgtctgggtggctctctgcaggtgacacacgtgctgtggctggccaggtgggtggcaggtatgtgggggtggagctctcagctctatcactgccaggccctggggtgatgctgggcagagctgtccctgcgagggccctcgaatccaggagtgggcgagtccgggatggttccagagcttccaaacccacatccagcccaggttgtgagaagcagcccagaaaggcctgagccaggctgtcctggtggggcaggtactgtgggccccgcctgcccagctgacaggaggcagccagcggatgcccgggtgggaggggctcgagctctcagggtgtcccccagctaggactcatccagggcagggacccctcatgggaggatggggagtcacatggtgcccaggacccccgactgaggactgcagcagacccgtcacagcaaacggagtggaggcctgtatttcacacctgctcactcactccatggcttagaaaagaacacgtccaccgcggaggccgcaatgcccacctagagcaggtcgtagaagtagtccaggccctggcccagctcccagatagagaccccaacgcccagctcccgggccagctccagccgcacctgcagggactgggcacagatggaggtgtgagcacctgctggggcctgtccccccaacacccagggatgtcctccaggccgaggggcagcaccgcctggaccccaggccagtgcctgctgtgctgtcgcatggcccacccctcccccggtcccacggctggcagcacacgcacttcagggttgggtagaagacgannnnnnnnnnnnnnnnnnnnnnnnnnnnnnnnnnnnnnnnnnnnnnnnnnnnnnnnnnnnnnnnnnnnnnnnnnnnnnnnnnnnnnnnnnnnnnnnnnnnnnnnnnnnnnnnnnnnnnnnnnnnnnnnnnnnnnnnnnnnnnnnnnnnnnnnnnnnnnnnnnnnnnnnnnnnnnnnnnnnnnnnnnnnnnnnnnnnnnnnnnnnnnnnnnnnnnnnnnnnnnnnnggccacgcacttcaaaacactcacttcttgtactcgaagaagtgctctgaggcctggctgtcccacaccatccggggcctgtggtccttcagtgtctggatgtacctggggagaccaggatatggatttgggagcccacccagctcccccacagccccaccctgtacccccaaaggctgtggctctcagcaggggcagggccactcggggcagccactgtccccagtggtctgggggacaacacctggtggggtggccagagccccaggccgtgtgaaccctgtattagaggaaacctcaggaaaaacatcttccaggagcttcctcggaagaagccaccccaccaagtcctttcagtggcctggagagtgacacggggcctgaaactgcctgagcctgagggtgaccctcaggccgcgcagcggctgctggacagggctcctcactctgtccagaccccaggtgagaggctaaccagacaggcctcaggctgccctggccccgctgctggccctggactgatgggcagtgcctcgtactgggtgggcagtgccttgtactggggatggctgcccggggcagtggtttctgcaccttttttttttttttttttgagacggagtctcactctgtcgcccaggctggtgtacagtcgtgcgatcttggttcactgcaacctctgcctcccagattcaggtgattcttctgcctcagcctcctgagtagctgggactacaagcacacatcaccatgcccgactaatttttgttattttttagtagagatgcggtttcaccgtattggccaggctggtctcgaactcctgacctcatgatctgtccaccttggcctcccaaagtgctggaattacaggcgtgagccaccgcgcctggcctctgcaccctttcaaagactgagtctgcctcagtcttgaacaatgaccaccccatgcccaggacagcagcaggcccctcctgagcaccaagagtcagtggtttgagaaccaccccctccttcacacagaggacaggctcattcccaaggtgctggggacacgactgcggcttccaggtcacggggccctgagtgtgtgcacatctcacactgcacatttgggaccagggcaggtggttccagaacactatgggccacagccaccagcagcaccaacagatggttatggaagctttctggtctccacagacaggagtctgtgcaggtggaggcagctgnnnnnnnnnnnnnnnnnnnnnnnnnnnnnnnnnnnnnnnnnnnnnnnnnnnnnnnnnnnnnnnnnnnnnnnnnnnnnnnnnnnnnnnnnnnnnnnnnnnnnnnnnnnnnnnnnnnnnnnnnnnnnnnnnnnnnnnnnnnnnnnnnnnnnnnnnnnnnnnnnnnnnnnnnnnncatgtgggaggggaggacaggcagtaggcaactgcaggggcgcagggacctgggccgtgtggcatggacatccgcaggatcctaaggggtcacagatggacagtgcagggtttatccaagtgagaaatggccacaggaccggtgcacctcgagccacctttctgctcctgcccaggagtagtgggatgtttgaggctcccaaacgggaaaggctgctgttgtcctgagcagggcagagtccccttgacactgggagcctcttccagactagggcacatgtcacttcagagctgtgaatgggagcagctgccacccccccagcagtgctcgacaaagtgccagaccccatcgggtagctctggccttttggggcatggaggctgctctgcagacatcagaccccggcaaacacatggcagggaggttgggaaacagcattcgggcagcctccccaacccagacagtttcccttagacgcctgtttctgtttttttgagacaaagtctcgctgtcactcaggctggagtgcagtggcatgatcttggctcactgtaacctccgcctcctgggttcaagcaattctcccacctctgcctcccaagtagctaggatcacagccacccgccaccacgcccagctggtttttgtatttttagtagagatggagtttctccatgttagtcatgctggtcttgaactcctgacctcaagtgactgcctgcctcggcctcccaaagtgttaggattacaggcgtgagccaccgcacccagtccccctagactctggtaatgggatggcagcagtggctggcagctccagccatcccaggcctggaaaaggactgctggacccctgccctcctgtggctgggccaggcccctcaatggccacatgcaaacatggtccttccagaagcccctccagaccaggcaacgtcatggaggctgccagcatagccacaaccccatcagacagctctaaaattactgcattatccttaactgaaacaccactcaaggtgttgttggtgtaatttgcagcgtcccccctcaatatctgctgggtggctctgtgagaagaatgggatgtgcagggtcgtgggcagatacctcagggcagggttggccctcgggctgtggggagctctggccacgccacacactcctcctcctggggggcctctgtggtcactgctcaaaatctgctgcctccaggaggaggtgaggctgggggtggccaggacccctgagagcactgggtgcctcccactcaggagccccagcctggtggtttggcgagtgggtggtgaccacgctgtgggggcagccatgaccagggcgctgtca

SEQ ID NO: 97001 - DNA, 13360 bp, Homo sapiens
ggttggcctcagagagcccttgtgttcttgcgtcattctccctttcagaagctggtgaggctcctgccagtgccccccagcctgtgtgctccctgatttatttgtccatcttgctcagtggtgtgtgggagggactggagctgttgcccttgattgctaccttggtgggaaccagccagctaccgaaattgacagggaatcgtggtcaagctatacatgcatagtttttacccttctctgtatgttgtattttataataatgaaaacatgtagagacctaatttataataaaagtcaggtctgctctatttagagttggggagatctagttggctggtattctgacatgtgcctttttctgtgcctaattttttcttgagacaggacctcactctgttgcctagactacagtgtagtggtgtgattatggctcaccgcaacctcaacctcctgggctcaggtgatcctcctacctcagcctgccacatagctgggactacaggtgcgcaccgtcacacctggctaacttttgtattttgtggtagaagtggggttttgccatgttacccaggttggtctcaaactcctgagctcaagtaatctgcccgccttggcctcccaaagtgctgagattaaaggcatgagccactgcacccagctctgtacctaattttacagatgagaacatgaaagccttctgttggtaaggggtgtgtctggggtcccagccagctggtgtggcggggctgtggcaagagcctggtctagttcttgtttgctgtttggattgatactgtgtttggccccatgagctctgccttgtctcttgttccttttgctgaaggtataaagaagaaactcagagattaaagactctttcagggcagaaggctcacacaggcttccagaacctcctcggagcgattgtagggactgcctgacccggaagagagttgtcagtcaagaccgccagagttttcccatcagagtatttggcatagcagaggtggctcccaaactgtgccagggcactgcagcaaactcacaagtgatcattctcaatgcggcggacgctcaagtctgttgaactccatgcgaagtgctagcttgggacagttcacggttccaacgtgagatccttgctgcattccttcttaggattttacatctttgcgaagctgggtttgcagtggttgttcagacctaactatacgtggaactgttaggcatttttttttggcctacggataccattaaaaatttgctgagataccagggactccacaaacgaaggacatttgggatctgtccagacaggtacactggaagcccaatgtgtgttttatttgttaattgattgattgattgagacagtcttgctctgttgcccaggctggagtgcaagtggcacgatcttggctcactgcaacctccgcctcccgggttcaagcgattctcctgcctcagcctcccaaatagctgggattacaggtgtctgccaccatgacctgctcgcagcaccacgcccagctaatttttgtatttttagtagagacggggtttcaccatgttggccaggctggcctcaaactcctgacctcaagtgatatgcctgcctcagcctcccaaagtgctgtgattacaggcgttagccaccacggccggccccaatgtgtgttttaaatctttgcacttaaatgtttttgatttctgcacattttgtgttgcacgtgtcataatgcattcaccgattcccttcattcccttgagtagttattgcgccctggattctgcgccaaggaagtgtgtgctggggaggggatggtggagctgaggtctgaagaatgagtacgaagcttcgagaggaggagcatctcagacacctgtcaggctctggggcaggaccgcagaggtgcaagctggagagtggctcagggtggggctggagagatgggtgtgtgtctgtgtgcgcgtcaaggggaaaacggttaagtttcttaacccaggggctcatttgtggcctcagcccccaggcacactgcttggatcctgggattcctccaagcttaacctccttgagaggccttcctttcgcaccgcatgccagacacagaggtgcctgagatgctgttcttccctcaaggagctcacaccgagtgagagagagacccatgtcctaagtagagggcggtgagcacagcccggtgggaagctgggcctgtttctcgttttgcccgagtgaggtgcttaccccgtgtggcctcatctgtagctcagggccttggataaagtgatggctgggtccttcccaccgcacctgtcttctctcagaagtagtttgatatttcagagtcaaagctgctgggaacattcttgttctgtggagcctccaggctgagcgctgggagtgcccagtgtgctggtcggggctggggggcactcagggccaagccccacccctgttggctgcaggaagtcagtcacagcctcaaggagcagctcctgttcgtttccttcgttttgcgtgttagtttccttacaggcgtgagactgtgtggtcctgactgtgaactccgggaagaggctgaaagaagctgtgagtgcaggtgttagagacaggcagcatgaagaggagggaatagagtcagcctcacagactgtcctgatggagttgcagtgtggttttcagattataaaggcattccatagtctgtatgccaagcactgccaatccaggtacccgaaaatcggaaggttcttgccttctattcacatgtttatttattcaacaaatcgacataaatgctcattatatgccagtctgtgaactaagccaagtccctgcccttgtggggtgaccctctagtcagggagagagccagtggtggggtaatgtataatataatgtgaggtggggataagctcagttgtgaggggtcagagggtggggattgtggccagggggcagttgtagattctgttctcaggcaaagtttctctgagatggtgacatctgagcagaaacttaaatgagggagtgaattttgcaaataatgagatggccatgtgcaaagtccctgaaacagaaggaggccagcgtgacctgcaaggtgtgaggaaggggagcgtagtaagaaatgtgggtggtgggagtgggttctgagggccggatcgtatgggccttatgagctgtgtaaggacttcagggctttgttgttgttgttgttgttgttgttgttgtttttgagacggagtctcactctgtcacccaggctggagtgcagtggcgtgatctcagctcactacaacctctgcctcccaggttcaagcgattctcctgcctcagcctccccaagtagctgggactacaggcacgcgtcaccatgcctggctaatttctgtatttttagtagagatggagtttcgctgtgttggccaggctggtcttgaactcctgacctcgtgatccacccgcctcggcctcccaaagtgatgggattacaggcgtgagccactgtgcctggccactttaggtttttgtacgaagtatgatgtgaagacatctcagggtttgttgttgttgttgttgttgtttgagatggagtctcactctgttctccagcactccaggctggagtctggagtgcagtggtgtgatctcagctcactgcaacctccgcttcctgggttcaaatgattctccagcctcagcctcctgagtagctgggattacaggcatgcgccactgcatccggctgatttttgtatttttagtagagacagggtttcaccatgttggccaggctggtctcaaacgcctgacctcaggtgatccacctgcctcggcctcccaaagtgctgggattacaggtgtgagccaccgtgcccagcccatctcagggttttgatcagggaggggacatgacctgacttacttttttttttttttgagatggaatctcgctctgtcgcccaggctggagtgcagtggcacaatgtcagctcactgcaagctctgccttccgggttcacaccattctcccacctcacctccctcctcctgtttctgggactacaggtgcctgccaccacgcctggctaatttcttgtattttttttttttaagtagagacggggtttcactgtgttagccaggatggtctcgatctcctgacctcgtgatccacccgccttggcctcccaaagtgctgggattacaggcatgggccaccgtgcccggacgacctgacttactttttaaagcatccccctgtctgctgtgtggggaatggcccgtccatcagaattctcttgcggtgattacgtaggtgcagatgtaccgctaacctcactcccagcgtcgtcgatttattaatagaaactgccatgagttatgcaatcagcttgagtctgcgttgagaaggacttcacatcatgggcattagatctcttctggaaaatgaggggaccggtcacttggggagttagaagggaggagggtgagggacagggagcgcgagtttcttggctgctgccttgtgatggataacagctagacagctaggggagctcctgtgtcaccatggcactcctgactggttccagtggggccctgactgtctgctgcctcatgactctgtgggacaagtccttccagaatctgtcagagcagatcctaaatgcctctctgtctggttctatgaaaatgtgacaggtggctcataagcttgacagagatcctgatatgactagcattaagtaaatattaaatgtgtttataagattaaatataaatagttttctctggggacaacagaattcactttgtcctttaatgtcatatcaaaaaagctggccaggtgcagtggctcacgcctgtcatcccagcactttgggaggccgaggcaggatcacgaggtcaggagtttgagaccagcctgaccaacatggtgaaactccatctctactaaaaatacagaaaattagccgggtgtggtggcacatgcctgtaatcccagctgctcaggagactgaggcaggagaattgcttgaatccgggaggcagaggttgcagtgagccgagatcgcaccactgcactccagcctgggtgacagagcgaggctctgtcccccggccccccccccccccgaaaaaaaaaaagtcatatcaaaaaagccaagttgaggccaggcacagtggctcacgcctgtaatcccagcactttgggaagccgaagcaggcagatcacctgaggtcaggagttcgagaccagcctggctgacatggtgaaaccccgtctctactaaaaatacaaaattagccaggtgtcgtggcgggcacccgtagtcccaggtaccctggaggctgaggcaagagaatcgcttgaacccaggaggcggaggttgcagtgagtcgagatggtgccattgcactctagccagggtgacagagagagactctatctcaaaaaaataaaataaaaaagaaagaaaaaagctaaattgagatgaactcaagccattggaaaagcagctcagattagtgagaaagcaaagacccaagcttgcgggcctgttctgaatggcctgttcccagcaggttgtgtagcagtagaccgatgcccacaaccctcggatgccctggcttcccagaccagccccatggtttcctggtgacagtgacagccatcagcagtcagctagaacatagtctctcattgcctaattgctgacacatgactaaggctttcctgattgagtctgggtgctctggttgtggtgaaaaacccagtcggtcatatccatgattgcaaaatggaatagtgtgaatttcagggctgagcccagcctccttggtaagcagcagaagctgctgtttcagggactctcacttggacctttgttgactcatgtcacgtctgcctaccaggtgtcgttggtggaaggaccagttgagcatcttatgagggaactaggctggtgacatgggggttcccccacctccctccyggacggggcggctggccgggcggggggctgacccccccacctccctcccggacggggcggctggcggggcagaggggctcctcactkcccagtaggggcggccgggcagaggtgcccctcacctcccggatggggtggctggccgggcggggggctgacccccccacctccctcccggacggggcagctggccgggcggggggctgacccccccacctccctcccggacggggcrgctggccgggcggggggctgacccccccacctccctcccggacggggcggctggccgggcggggggctgacccccccacctccctcccggacggggcggctggccgggcggggggctgacccccccacctccctcccggatggggcggctggccgggcaaaggggctcctcacttcccagtaggggcggctgggcagaggcgcccctcacctcccggacggggcrgctggccgggcggggggctgacccccccacctccctcccggacggagcggctggccgggcgggggctgacccccacctccctcccggacggggtggctgctgggcggagacgctcctcacttcccagatggggtggctgctggacggaggggctcctcacttctcagacggggcggttgccaggcagagggtctcctcacttctcagacggggcggccgggcagagacgctcctcacctcccagatggggtcgcggccgggcagaggcgctcctcacatcccagacggggcggcggggcagaggcgctccccacatctcagacgatgggcggccaggcagagacgctcctcacttcctagatgggatggcggtggagaagaggcgctcctcacttcctagatgggatggcggccgggcagagacgctcctcactttccagactgggcagccaggcagaggggctcctaacatcccagacgatgggcagccaggcagagacgctcctcacttcccagacggggtggcggccgggcagaggctgcaatctcggctctttgggaggccaaggcaggcggctgggaggtggttgtagcgagccgagatcaagccactgcactccagcctgggcaccattgagcactgagggaacgagactccgtctgcaatcccggcacctcgggaggccgaggctggaggatcactcgcggttaggagctggagaccagcccggccaacacagcgaaaccccgtttccaccaaaaaaatacgagaaccagtcaggcgtggcggcgcgcgcctgcaatcgcaggcactcggcaggctgaggcaggagaatcaggcagggaggttgcagtgagccgagatggcagcagtacagtccagcttcggctgggcatcagagggagaccgtggaaagagggagggggagggggagggggagggaccagactttgtctcttaaaaaaaaaaaaaaaagactcccaggcataggaaagcaggcattcaccataaatctcattgttaacaggaactaccttcatagcccaaggttttaggaatacagagacactcttgccagtcaggatagtccaaggctcgtgaatatcaggagccactcaagggccaggcctggagacttggaacatgcagggtttagggcaacccccgccagccacacagctggggaaagggtttgctgcgaaatggtccactcttgcgtgcacttcctcccgcctgccccccgtgcggtgtccttgtgggattagaggatgttccagcacactgagagtcagtggctgtcattttctctgtcttccagggacccagtcccagctgctgccttagcttgcaccccaggaccaccctgggctggtgctgacaccactgggggctgtctgttatgtcagccccagtccaagactgtggctgtcttggcaggaacctggctgagtgagccccttctcctaccccgtgcagtgaccatttcctgcagccccaggggcaaggcccagcatttaggtgggcaccccagccagcctcaggggcaccctgctaccctctgctgacatctgctgtttctgtctcctaacagtttcatgatcaacatgggagactcccacgtggacaccagctccaccgtgtccgaggcggtggccgaagaagtatctcttttcagcatgacggacatgattctgttttcgctcatcgtgggtctcctaacctactggttcctcttcagaaagaaaaaagaagaagtccccgagttcaccaaaattcagacattgtaagtgccgcctctcagcctcctctctctgtccctcttctgtcaccactccaagcagtgtcctgcatgcgggcctcaggctgaaagaagcaaggctccttgtagcattttggggtgactcttgggttttgccttcttgctagattgtgcttgagctctcccttaatcatctcttatgtggggtttataaggcccttttctatctgctgtttatatgaccttcacaggaagcactgcgaaaatgacaccagtttacagattaagaaccgggggctcaagaatgttaacgggcctgccagggtcattagccagcaatagcagcgctagagctggaacccttttttccatttatttatttatttatttatttggagacatggtctcactgtattgcccaggctggagtgcaatggcggtggcacgatcaaggttcactgtaatctccacctcccaggctcaggcagtcttcccacctcagcctcccgagtagctgggactaaaggtgtgcaccactatgcccagctaatttttttttttttttttttgaagcagaatcttgttctttcaaccagtctggagtacagcggtgcgatctcggctcactgcaacctctgcctcccaggctcaagcaattcttctgcctcagcctcctgagtagcttggattacaggtgcccgccaccacgcctggctattttttgtatttttagtagagacagggtctcaccatgttggccaggctggtctcaaactcctgacctcaagtgatccgcccacctcggcctcccaaagtgctgggattacaggtgtgagccgttgcgcccagtcaatttttgtatttttttatagagacagggatttgccatgtcccgggctggtctcgaacacctggactcaagcaatccgcacaccttggtctcccagagtgtcgggattacaggcgtgagccactgtacccagcctagaattggcattttaaagtctttttaaggctgtagccacctggaaggctatgtgctaatgagcacaaaatctttggacaggccttattttgttgctcttttaaacttttcatgaagcttccttttaagaataagtgaaaaagatggattagttaaaagaaaaacgttaaggaaataatagtatagatggtatgtagacagaaaaaaatgataccgaaggtctgcctaagtgactgcatccctgtctctccaagattgatttccataagccacacggaaaagtcattctccagattttagggtcctgcggccagaattacttcctgcggttacgcttggctgtgtttaacaccagtctcagactccaggggcccgcagccaggtttgagtggggacctgccaggtcaggtctgagccgagggaactccaggggcacgggcctgctgccttcagggactccctggatttggcaaggggcaggtctcaggggcaggattgggagccattctcagaccagaacccctttcattctgtctgtcttcaggggacccagtcccagctgcagccttagcttgcaccccagggccaccctgggctggtgctgacaccagtgggggccatctgtcatgtcagttccagtccaaggctgtggctgtcttggcaggaacaagccacacagaaaagtcattctccaaggctgggcatggtgaagcatgccgctcacatcaaatcccgattccctattccaatctgggtatcagccttccccgccagaacacttacagccttcacaccgtaaagcagatattcacacaacacagttcttataccatggacagggaattagttttacatttttaaaaactgggttcagggccaggcacagcggctcacgtctgtaattccaccactttgggaggccgaggcgggagaaatcacttgaggtcaggagttcgagaccagcctggccaacatggcgaaaccccgtctctaccgaaaatacaaaaactagctgggcgtggtggtgcatgcctgtaatttcagctactagggaagctgaggcagaagaatcgcttgaacccaggaggcagaggttgcagtgagccaagaatgcgccactgcattccagcctgggagacagagtccgtctcaaaaacaaaacaaaacaaaacaaaactgggttcaatcttatctccatcattgactcactgagcaaacatttcctgaggccctacctacagtgtcccagacactatgctaaggtgtgtggctgcagcagtgaagaaaatagatgaatgctgtcttcatcaagcttacgctctagtggtgagtgaaccctgggcgagaccttaacctcattctgcctcagtttcctcacctgctaaatggaggcagtattcccaatcttgtggggcttttgtcttaaatgaggaagagtctataaactcacctagcactgcccctgagggataggagctgtgtagtgtttgcgttgatcgtatttcgtgccaggcactatgacgggcacgatcaggaccacagagccagcatttatgttaagctggaaaatgagggtgttgcaacatagtttttttttttttgagacagacttttgctcttgtcactcaggctggagtgcagtggtgcaatctcggctcactgcaacctccgcctcccgggttcaggcgattctcgtgcctcagtctcccgagtgcctgggactacaggcacatgctaccacgcctggctaatttttgtatttttagtagagacggggtttcaccatgttggccaggctggtctcaaactcccgacctcaggtgagctgcctgcctctgcctcccatagtgctgggattataggcgtgagccaccacacccggccacagcgtactttttagaaatgctttgtgaactgctttaacctacattgtctaatcagggcctccttgcaacagcgccgtgcgttaggtagcgtgggttgcctcatttctgctctcagagaggttatgggatgtgcccagggcacaggctggagagacaggctccgccagctctaagagagaaggaattggtgcggggatcagaccaagtcctgcaggaggggtgttgggcaggttcttaaaggtagagccacaccctgaagctgaaaggactttagagcagagggcccgatataggaagggcagatcagctggaatccagcccatcctgtccagggctggtacacggggcattgctggtgtggaatagtacttttgataaaaaagcgtagtagtactcaagataaagagaccagggtccaggacccagctcctgaactggcccttgttccctcatctgtaaaatggaagttccgccccaccgccgtgagtgaggacgtgggttggccctgggagcctgcggagctgccaccaagggaggcagcattcctctcatagctcatctgttctcgctgtcacctccctggccttacaagaggaagttgacataaaacctgtagactgtgggagctgtagggtcccaaagcacttgtatttttttgttgattctcactgttcctctttgccaggatgctgaaattctgttccctccacctaatcatgatcttctaaccttatgtgtgtggagatatgcagtttccagagtcttgtctcttccctcattaaatcacactggatgcctgctgcagccagggcttttacctgtacgctgtacaagacaaatatttctagtaccatggctacattctggaccctgaagttgggtgctcaaggttgagtactgactctcccacattagccatctgacatcagccaggtgacttgatctttccaagtctgtgtccccaactgtaagctggaggtagtagtagtacttacctcataaggctgtgaaaactgagttaatccatcatagagctctttgctcagttcctggtgcatagtaggctctcaggtgttatggattgttactatttatttatttattttgaggcagggtctcactctgtcgttcaggctggaatacgctggcacgatctcggctcactgcaacctccgcctcccaggctcaagagatcctcccactttggcctcccaagtagctgggactacaggcgtgcaccaccacccttggctaatttttatattttttgtacaaatggacatctaacaatgttgcccaggctggtctgaaactcctgggctcaagcagtctgcctgcctcggcctcccaaagtgctgggattacaggcgtgagccaccatgcctggagtgtgttattatttttatcctttttattaataccatctccagtcttacaagagcccttccacgaagacatgagcagcccattttgcggatgaagaaaccgaggtgccagggattgcagagtttgcccaaggccacctaacttctaaatagcagcagagttggcttttgaatgaagtctgcaagctccacaagccatgttttctctactttgccatgctgctcctaatttagtgttaataggcctcctacgatagtgttagtctcctaagatagtgttaataggcctggcatggtggctcacgcctgtaatcccagtgcttagggaggctgaggcacaaagattgcttgagccaggagttcaagaccagcctgagcaacatagggagacccccacccccccgccatctctacaataaacaaaaaagagtggtgttaatttgttaatttaccgacaaggagagtattccttatctgaagtgcttgccagaagtgtttcagatcttggactttggaatgtttgcattatactcaccagatgagcatttcttatctgaaaatctgaaatgctccaatgattcttccctttgaggatcatgttgacgctcaaaaagtttcagatttcagattttagattagggacattcagcctgtagatgttattttacagagcaggaagttgggtgtagtggttcacacttgtgatcccagctctttgggaggccaaggcaggaggattgcttaagcccaggagttggagaccagcctgggcaacgtagcaaggccctgtctctataaaaaataggagaaaactgaggctcagaaaggtcacctagctgatacaaccaggcctcaagcctagatctcctattcta

SEQ ID NO: 97002 - DNA, 13856 bp, Homo sapiens
ttatacccttcagatgccaaatctaagaaccagctcccagaaaccacaccccctgttccaacccccagcctggcttgagcatgggttgttggggggagcccaggtgggcaccccaggggtctggtgtcttctccaggcagctctcaggctcccttggttctctctgcagtttacatgagctggtgaaacatgaagaaaatggcctggtctttgaggactcagaggaactggcagctcagctgcaggtagccacatctgccaccacgccagggtggggagggttctggaggctggcaccgagccacgctccctgatccctgcttcccacagccagggtgggaccatgtggggtctggcggaaaagctagggagggagcagaggtcacagagtccggcccactctgctgtcccgtttcggtacagtaagctcgggaaagttaggacacacccccacctgccctctggatttatggagctgacattccacaaatgatgctggagccgggtgggccgggctgcagtttaggaagtgatcagggtcaggtaggtgcgtgggcaaagggagcttctgggaccagccttgaaagatgggtggaattctgcaaaggttacttgtttcttattgctaaaagtaatacatcattcttgccaacagaatgattggcaggattttcagtaaaggtccaggtcagaagtcatttagactgggtcccccagtctctgtcagaaccatggtactctgttgtggtgtgaaagtagccacagatcatctgtcgattaaggggtgtggctttgttcgaataaaactttatttacaaacacaggctgtgggctggatttggcctgcaggctgtagtttgtgatccttgattcagacagtttagcaaggctgaaaagaacaccgacacccccttgttacccacagatgggtgggacttggccggaggccaagaggagggtgctcgcaggggaacatacagcatgtagaggccaggaggtgctccagggcaccaagtgtgggaaagtgggacatacggggaagtttccagaaagcatgatgtcaagttggaggcagagcgctgctggggcatgaagagtctcgagtccaagtgagggagttaggaacttgggaggggttgttgttgggtaggggacctggggtcagccaggtggtgacatgggatggggtggggacaggcaatgaggtaagctctgctctttatttttttgcaggtgcttttctcaaactttcctgatcctgcgggcaagctaaaccagttccggaagaacctgcgggagtcgcagcagctccgatgggattagagctgggtgcagactgtgctccctttggttatggacacataactcctgggccagaggctaaaaccccgggacccctgctgtccttcccacagcttcttctcagagtctcagggcaaatcctttcgagcagcgcctcccagtggccagaagctgaaatgatggcagtagtgccacctggtgaatgaattggttctgtgacccgggaagctgtgcttggctctgatttcttttctggaggctcggaaacacttcctctcttcttctgttcttcacgccccatgcccctgctagcgtattactgttctgtgacttccctgtgacctctgcagtactcctcatcctgcgtttggtctccaggtgtcacctttctgccgtgttcctaacattttgattcctgtcttgaaaaaagcacctgctgcaccataagcccagggatgtggcagctgcagcgggcttggctttgtgaagaaccgagtgtgtccagggatgtggcagctgcagcgggcttggctttgtgaagaaccgagtgtgtccagggatgtggcagctgcagtgggcttggctttgtgaggaatcgagtgtgtccaccgatgtggcagctgcagcgggcttggctttgtgaagaaccgagtgtgtccaccgatgtgacagctgcagcgggcttggctttgtgaagaaccgagtgtgtccaccgatgtggcagctgcagcgggcttggctttgtgaggaaccgagtgtgtccagggatgtggcagctgcagcgggcttggctttgtgaggaaccgagtgtgtccagggatgtggcagctgcagcgggcttggctttgtgaagaaccgagtgtgtccagggatgtggcagctgcagcgggcttggctttgtgaagaaccgagtgtgtccagggatgtggcagctgcagtgggcttggctttgtgaggaatcgagtgtgtccaccgatgtggcagctgcagcgggcttggctttgtgaagaaccgagtgtgtccaccgatgtggcagctgcagcgggcttggctttgtgaggaaccgagtgtgtccagggatgtggcagctgcagtgggcttggctttgtgaggaaccgagtgtgtccagggatgtggcagctgcagcgggcttggctttgtgaggaaccgagtgtgtccaccgatgtggcagctgcagcgggcttggctttgtgaggaaccgagtgtgtccacagatgtggcagctgcagcgggcttggctttgtgaggaaccgagtgtgtccacgttggggggaacatcatacttgatacacacgtttttatttgcacaaagaaaatgctatttttggagccagagttttcatgtctgattgatggcgattttcttaagaaccagaactgctggcagaaagggagcacccacaagcttagatagccgatgtcttatcagagggcagtttgtggttcctgatttggaaattaacattctccaaacattccagtccaatgaaagttttatccgctttcccatataaaaactcttcccacgagagtgacttgattctcacaatcccgttggagtcgtgtgtgagtcctacagtgtgaggttcagcattgccatctccaagtgctcttcgtagggaaacagtttctggtcatgacgaggttccacttcccatctgatcccggcccggcctggaaacagaggacatgtgtttgaagatggcagtgtttggggacaggacatgagcgtattgtgtggggctgctaggacaggcctggcggggtgggggcgtgtacaagtcagtttacttggttcacaggttctcaggcccacccaggtgcctagaattggcctccaggatgggaccagaaatctggttttgcatagaaatggctagcagcaggcaccgtgccgctgtccagtctctgcccgcgtctgcccagcacttggcacagcgggacagacgcagagatctgaacccacacttacctggctgctcagtcaactcactcttcacaaagcttagaaagcggccaggcacagtggttcacgcctgtaatcccaacactttgggaggccggccaaggcgggtggatcacttgagatcaggagttcgagaccagcctggccaacatggtgaaaccccatctctacaaaaatacaaaaattaggcaggcacaatggcgggtgcctgtaatcccagctacttgggaggctgaggcaggagaattgcttgaacccaggaggcagaggttgcagtgagcagagattgcgccactgcactcgagcctgagtgacagagtgagactccatctcaaaaaaaaaaaacaaaatcacacacacacacacacacacacacacacacacacacacacagcttagaaggggctggtgttctcataagcaaagatgtctgaagagccgttagccagaatgattcttttcttttttttttttttttgagatacgatcttgttctgtcactcaggctggagtgcagtggcacagtcattgctcactacagcctcgactcctgggctctagcaatcctcccacttcctgagtagctgggatgacaggtgcatgccaccatgctagtaatttttttattttgtagagatggggtcctgaatgcatggcctcaagtgatgctcctgcctcagactcttttattattttttttttagacagagttttactctgttcccaaggctggagtgcagtggtgcaatctcagctcactgcaatgcatcccaggttcaagtgattctcctgcctcagtctcccgagtagctgggattataggcgtgcaccgccacgcgtggctaatttttgtgtttttagtagagatggggtttcaccgtgttggccaggctggtcttgaactcttgacctcaagtgatccgctcacctcagcctcccaaatcctctgcctcttacagtgttgggattacaggcgtgagacactgtgacacgggatgattttcaatcacagttttttgttacgagtggaaaatgtgtatttataaaaataaagtagtacagacatgaacgtgtagaagtctctataatcctgccatccaaggatggcacctgttaatgtgtatatcagggatgtccaatcttttggcctccctgcaccacattggaagaagaagaatcgccttgggccacacataaaatacactaatgctcgcaatagctgatgagctaaaagaaaaaaaaatcacaaaaaaacctcgtactgttttaagaaagtttacagatttgtgttgggccacagattggacgagcctgctacatatatattctaggttttccccaataggtatacttatgtgaaaatgattattgtgatactttttttttgagatgaagtcttgctatgttgctcaagggggccacaaactcctgggcttaagccatcctcctgcctcagcctcccgagtagctgggactacaggtgtgcgcaaccatgcccggctagtttctgaatgttttgtggagatggggtcccactatgttgcccaggttggtcttgaaatcgtggtgtcaagaagtccccctgccttagcctcctaaagtgctgggttgacaggcctgagccccgcgcccggccagcctcctgtgcgaggttgtgcaggactttgtcgtggaacccagtatgccttcgtgtgctggcttgtttgttggctctgtagttaacgcgctgccccacgtggacaggcattggacccacgtctctgtgtgcaggcagaggctgctgcgcgtgcatctgtgcacatggctgccaggaggggctgtgctcagggtgatctggggcaaaggctggtggcaatggggggcttgggtgtagtgtggaggcacgagagccaggtggccgagctgcagtctgtgggagctcaggggttgcttggcctctgtgtgtcctagtgtctttgtcggtgagatgggacaatgatagcacactctcacaggtgctgggggctgacaaatgtcaggtctgaggacagtggctggcccactacggggacaattccccttctctatagtcaccctgctcgtcttccatcaactgggtgctcaggacagtggcgtggtggatccgcctgtacagcctgtgctccagcgtcctgcaggccacagctgtgtccagccctgaccccgactgcccctcccaccacctccattttatagatgaggaaaccgacgcccaagggcttagggaaccctgctctgaagcacacagtagggctgctgggctcagatcctccctccctgtgctgagctgccctcctcctgccgcaagctcccacgccccaggcccaccctgctcaccggcctctgccctagttccccgcatggtgtgggagtgtggggcatcctagcttttcctcggcccccagttctttcacttccactggagtcccgcagggacagctcggggaccatgcaggcccgggtgggcgtgtgggctcacatagctcggtggtgaacagctggcacgtctctgggttgcggacgataagggccacgtagacttgaggagcccgctggtgctcccggtaggcagccagcctccgcaggaccgcgaccagcgacacgatggattctgggcaatacagcacgtctacggtgaaagcttcaggttactgaaagggaccagcggacagttccaggtcatgctgacctcagcagcaggkcgaggccagagaggcagcrgtcatatgagactagtagatgccatttgaccatttgggccattagatggaaaggcaattgcttgggtgaaaaaggagaacccttagtagagaaagctgcaaaagaccgaagcaaaagaaaaaaatctccagactcactggtgttccttaaaaaacgagctctggttctcggcctatctagagggctgtgaatgacacaaagcctgaccctgccatgaacttcgtgtttcaggtgtctgccgatttgtctgctggcttgcaggggtgggcctgtgtccctggccaccgctggacctgtgggtttcagggctgggacccaggaccacaggcagagctctgttcracsagagaggagaccgagtgtgctggcaggggcgaggggttttcggtggcccagccaaacaccacyttctctcaagggccctgtcctcatcccagaagtggtkgttttcctcctgtggtctctgaaagacagaggcatggctctgggacagagccatgtggtgatgactgtaatgggagtatgcctgtctccaacaagagggctgtggctggaaggtcaccttaagaggcacccctgtcctttgatgtcaccctggaggcccagagtaactcttctggaagccccatcatgtccatgcccgacagcgtccattgttcccttttcccagagcccagagctgggtagagctgcaaggacaccgcctgcacagagtgccyggggctgggcattgcctgctgcaatgacaacatctggctggatggcagaragctgatggaccgtcgcgacgtcccagtccagctgggccactgtcaccctggggctgtctaagttggcagagatgtctgcctctaatgagaggccattgagaaggacattccctcggagcttctcgaggacctggctgtgacagtcgctgaagatgtatgcctggaggcggcacatcttgcagatggccaggcctgtgaggctggcgccactgccaagctctaggacagtcctggcgggaggaaaggggaccatgtctgtgactgcaccagggtgagcctgcctcggtgtcctgccgtgcgccccgaggtcacctatgagagaaggctgccgggttctcgatggcccattctgccaggtagagggcagcttctcatgtgaccaggcctgtgatgccgtgggagatgatggctgtgctctcggagagtgtgactgagcctcccgagggctgcaccaagagagggcgagagagtcagtccagcaatcagaagrcaagtggcwtagaagacaagtagccatccaccacatggctgaataaaccatgacaggaccaatcgcyactcagcaatgagaagcagctaactgttgacatgccawcagcttgaacgggcctcaagggtgtcaygtggcatgaaagacactcatctcaggccayacaggattccattcatygaacattcctgagacaacggaattctggtgatggagcacwggtcagtggtggccaggggccrggtgtggctatgaaggggtggctgccttgtgatgattcaatatgctatgtttttcctttgtggttttctgtatctatgttttatcttattttcttttgagctctgtcacccaggctggagtcagtggcacaatcttggctcactgcaacctctgcctcctgggttcaagcaattctcctgcctcagctgcccaagtaggtgcaactacaggcatgtgccaccatgtgtggctaatttttccacttttttttgagacagagtttccctctcgttgcccaggcaggagtgcaatggcgtgatcttggctcactacaacctccacctcctgggttcaagagattctcctgcctcagcctcccgagtagctgggattagaggcacctactaccacacccgctaatttttgtatttttagtaaagacagagtttcaccatgttggccaggctggtctcaaactcctgacctcaggtcatccacctgcctcagcctcccaaagtgctgggattacaggcatgagccaccacgcccggcctgatttttgtatttttagtagagacagggtttcaccatattggccaggctgctcttgaactcctgacctcggatccacccacctcagcctcccaaagtgctgggattacaggtgtgaaccaccacaccaggacctgtcaagtattctttgaggactggacaccaggtccttgtgaagcaggtagagtgtgtcacctattggacaaatgcccaacaaccccatgagacatgctgttgttgttgaagtgcttgatttacagacagggaaactgaggctaaagaaggttgacggacctcatgtctaagactgcagaatgggtgagtcaggatttgaacccacacccacgttttcactttgtgcaggaagggtatctgggctgtgagggggaggagggtgcccttctcataccagcaaatagctcgggtggccctgggtggactccttggccatcagggtctctgccaggtcctcgtacagcttgtccaaaagctctgtgtggacagcctcgtgctggggtcagacagagtgagagcttgtttgctttcgttctaatctgtaaaaatggtcagatgattttcaccaagtttggaggggagatttgggatggaatggtgtaataccggccagctggcatgtaaaatattcacttcattgggcatggtggtgtgtgccgaatagtcccagctactctagaggctgacatgggaggactgcttgagcccaggagttcgaggacagcctgggcaagagaccttgtctctaaaaaaaaaattcacttggtagggaaacctggatgggagggccttcaacgagaggtgttgagagggtagggttaggtgtagtctagggcaggagacaaggattccgtgagagctgccacatgaccatgacagagaggaggaaaacaaaaggtgcttttaagtgagcccaggcagaactgtgagggcggcccatgctgcaggctgtggctgtcagcaggctgcttctccatggctggccccatcttaagattcacagggcagcaacaatatacactgggtgactgctgccctctcctggtggcacagggcagacctgctggtgaccacagatgcacccttttggggaggattagggagaaagcaggtattggagaagcaggggattgtttacttgctaaaagtgtggccctttcactaagataggtctgctactgcctactgaggaatggcctctcgacatccttatgtcaaaccctgcactttcgggcccatctttaaaatccatcctaggccaggtgcggtggctcatgcctgtaatcccagcacattgggaggccgaggcaggtggatcacctgaggtcaggagttcgagatcagcctggccaacatggtgaaactctgtctctaccaaaaatacaaaaattagccaggcatggtggcatgtgcctgtagtcccagcttcttaggaggctaggcacgagagttgcttgaacccaggaggcagaggtttcagggagccgagactgtgccacggtaatccagcctgggcaacacagtgagactctgtctcaaaaaaataagtaaaaaataaaatccatcctgcatcagtcaggaaagagctcattccagcaggatcaatgcagagaattcaccagaggaactagttccaaaggtatggcaagagctaaaccttccaacaggggcccatggggcaacccagagacagacaagagcaggaaactccaaacccttcggcgggcaggacagagggtgtgggtgagggttccagtgctgtgggctggaccagcctggtaggaatgagaatccatatgctaggagctggggccccagagaagcagctgctgtggaaaccccaggaggcagagtgagggagagacactggcctccccttcttcctgccctgcactgtctcccatgggtcacacgtggctgcagtcagttgcctggggaggcccctgtcatgctgctgtttgcaaagcaggcccagggcctgggaaggacaggggctccagcacgcaggtggctatgctgtctggctactgggcggacactccccataacggacgtttttggtgagttctgagagaaagccccgggcatacttgactgacggccggtgcttcacacacacaggatgcttcacagtctacggcaaaggacagaacgttggttgctcgagagcccgtcttaagtcccctatgagcttcaagccaacacagcagagggcaaactccaggctacccgatccctcagcaaagatatagatggacacagcgttctggccccatgcatctgaagtttgtcttaagatataaaccgtttcctaaaaatgcttccactgcagtggcacaggctatggcagcatttctaatgcccattctgagcaggaacacagggcacgtgggcccaaaccacctccctcccaggggtgccagtgtgaaccagggtttgcagtaaggacagtcgccaactgtctggctctatggaagaggcgggaaggcccacttggcaactgctctcttggagtgtgtgtccctggggacaggatggaggggaggggacgctcagggtgacactccagctaaagccgagagaagccgagtgcaggacgagcaagttccaggcagtggcaacagctggtgcaagctctgaggtggccgcggcctggcacttggaacggagggcagagggactgctgcagcaggaggggggcggtgggaaaacaggagcctggagggagagggaggagacggtccgcagcgcctgctggctgggagggatgcagattctgcccaagggcagcaaagtaccccacgcaatacacaggctcttcaggctggtgctggtttttcattttttctgacacacagtctcgctctgttgcccaggctggagtgcagtggcccaatcttggctcaccgcagcctctgcctcctgggttcaagcgattctcctgcctcagcctcccaagtagctgggactataggcgtgcaccaccatgcccagctaatttttgtatttttagtagaggtgggtttttgccatgttggccaggccggtcttgaactcctgaccttaggggatacgtccacttcagcttcccaaagtctgggattacaggtgtgagccagtgcacccagccttgtgctgggttttaaagcagctatccctacatttcatgcttcaccacctacgagagtgaggctcagggtgaaactcagagcagggtgcgagataacttcaggtatctccatgctcgaagccctgacctactgcattgccccgaaagtcttccctcctgtggctgcatcttttccacatggataatcttggttcacctctagcacaagaattcttcaccggggcccctaggatgggctggctgggtggaggtggaggatgtctgcctccagagtttgtatggaaaatgtattcttctggtgcacttctctctgggagggagtctattgctttgtcttttcagaagggctcatggcccttcgaaggtgaagacccaggatgcagggtgatctgcacttggccctcaaggccaaagtcaggctgtgcctgggcggggtggtgatcctgcctctcacctgcatgcagatgctcttgagtccaaaccccaccctgggcaaagtaaggacccatttaggtctagaagagacaggagtgggcaggacaggtctcatgaatgcaaaaaagaaagtctctgagcatctaccaaatgctagaagctgttttgcacctgtcatctctgtttttgctgtagatggtttaaaaaactttccctagattcccccctctcatgcagatttttgtatattctgatgtctttgtctaagtcttagatagaaaatgaaagagctggagctgtcggaggtgccgacacccacctgcagtgctgactcaatgttcaatgttctttgaacaggtgtgtttttaaagggtacaagcacacctgtggttcttctctcaggtcttccggagagattcaggaggcagggtcatgagtcccagggactctgggattcttacaaatatctgggattctgcaaaatatcccgcagaagctcagaatctgatgagtctcttaactttgcttctaagctctgtgtggaggggagagagagaaatctcaagggcgctttcacaggaacattaaacacgcaatagaatgtgttggcaaagcgctgtgtgatctctccctggggacgtggagccagttggaagtggaagccacagcagctgaaagcctgaccttcagatgtcgcagggtgcacctggatgagtcacaggaagaaggctagaagactgactcttggccgcattagtcctggctacttagaggccacctgggtcatgggccagctccctggttgcactggtcagccaggattgcactggttaccagggcagccatggcaccaaggtttgatgggcttgccatctaagtggaaatgcagaatgtgcccataccagcctgggttacattgtccttttacaggggcctcaagcccagcagcgaactttggctcccgaattaggtagactgtctcggctggtatgtgacacagggcaaggcacttcattgcttcagagctccttccattgccgtaaaaggccctacaagacctggtcctaatccctctctctggcctgttctccctcacccctggccaaccctgctcactccactccagccacactggctgccttgctgttgttcctcaaccacagctggcttgtttccaccacaggacctgtgcatatcctgttcccccaagcccttcccatggctggctgcttcaccactcaggccccagttcaaatgccacctctttggggaaggcttccctgattccccgactttggtgactcttctccccagttgctccattcaccatttccctgttttattggctttaaagccactctcatctggtcttttcttgtttcttcatttctttgtttattctctggctctcccatgcaagcagaccctcatctgtcacgggtactgctgatccatggtgtctggctcatagaaggcatttattaaacattttgagactgaataaaaacactatctaacactgacatgcatttaccatgagccaggcactgatccacaggcttttgtactcaaccctgacaacaaccctaagaggtaggtatcattctatcccccattttattaataagaaaacaacagcacagagagatgcagtcacttgcccaaggtcacacagggccaggggttgggccaggattcgaagcaggcaggctgtctcctgggtctgaactctcaactactgcaccctaatcaaacaatccctctggtcaaatgtgagtggtaataatagtacccacctcgtgggtgttgagggtgagcccaagttagcattcagcgtgggcatgtgaacaattatagtcaatattgaatggagacctatgatgcttttatgaaggtttctattttgggttaaaagtgcacaaatttctcctgaccggaaatgatctctgagtgcaaatatttcatatcaatggaataacgcaaatgattaagcaacaccccataaaatggggcagacccagggaggaatatatatccaaactcactcatcccagtgagctcaccgcacatgaattacaaatggggccgggtgcattaagcccctctactggcagaagggaggctgctgcctgccatgcgcctgtgctgagaatggcaggtccccagggagacgagaggccacccccttctctgtctcttccatcacaggcgtga

SEQ ID NO: 97003 - DNA, 29654 bp, Homo sapiens
ttgatattttggagatttctgtagcttcaatgggctaaggcataacagatgcttgtagaattttttattacaagttaatgttatttccttccataaagaagttttcctatcaaataactacaccagcgaggtaacacacatgaatgaaggcagctccttgtagtccaacagggagtgaattgcaaactagtgaaatgggtagtgggtagcccagcaaagcagacagctactcttcagcttgaagcaaatgttgctatgtggaaaccaatctttccagattttccattttaaaagaagagttagagacgacaggggacataggggaaatcttctgccttttaattttgctgtgaacataaaactacactaaaaataaagtctattaaataaagaaaaattgggctgggtgtggcagctcatgcctgtcatcctagcactttgggaggccaagccaggcagagtgcttgggcccaggagtttgagagacaagcctgggcaacatagcaaaaccccatctctaccaaaacaacaacaacaacaacaaaagtaattaaacttatgagccaggcatgatggcatgtgcctgtagttccagctacttgggaagctgaggtgggaggattgctgcggtaagctgtgatcgtgccactgcactctagcctgggtaacagagtgagaccctgtctcaaaaaataaataaataaaaaggaaacctggaaattttaatacaaaaattgcaaattttgactgttgataataaatgcttttcataaaaatatataacatgcgacgggttgaaacacagacatacacatcccttcattacaatatctcttgtgttaccaagtttgtgtgtgagtcctcatgagctgagaatgaattctatagaaacaagagcatggaatttaagcttactcagaatcccatgagatagggggacaaagtcttatagctgtgatcaaaaggttaagcttagcagctgtgggggagaactatacaagagctgactctacaagaagttttaaggctaaacatttaggcaatcagaacaacggaatccgcagactggcagcaaaagaaaatattaaaacaaattttaaagactagggagaatggcactactattttaaagatagggacaagaacaaaatacagtaacaattgctgtttacatctcctgtgtgcaagataataatttaggttatttacctgcatcatgcctaattttatgaagaaactaactgtctggaatggacttgctttctaaatggaaagtcagaagtagttctgccagagacagataagttgtaggtaagcttatgagagatctacaaacaataagctggctagaagcttataggctaagaggcaaagattcaagcacactgattctatgcagtagaaagaaggaatgtaattcgtcctatgcctactatgtgctagatactcttccaaatgtcttacatatattttttagttatcaaaaatcctgcatgacaggaatcacaattgctgattttacagataggaattggaggatcagggttgtctcacataaaaatatccaaaacatgagacatttcttcctcccagtcatttgttactattgctgagaaaacattttgagcagctccccagcagacttcccctccaactcccactaaccaagagtcctgcttccacagtaacttggggggaagggtgatgagaccatcatcactggcataaacaatccttattcacctctagtggaggctgggttgaaagattccagcctccacaaagtatgggccttgcagagggaaaaaccaacagtgtccataaagtcagcttcctcaggaagtataagaaacagaattagttctactcctgtccataaagtcaggagttttggtgataaactgaatactgtggtaagtgatactgagaagagagaacatattacttgagcccaggaggcataatttctagtttccattttcacagctgacttaaacactttggttaaacacttttctgtgcgtgtcatctatgacagttatctcatttgccgtgcatattgttgagactcagatgaaaaaatttacataaaattcacctattttttttgtagaagactgaggtagctgaggagataagaatttaaggcaactaaaaagttcacaatcattagagaaagggacaaaaagagactgctgaagtggaattttcggaattataaggggttaaaaattgtaagagttggaagggagatgacagaatggggtagagaaaggttactcagtagagcagaagaaaagatactttcatggccaaaaaaagatattcacctattgagcttacatttggagaagagacataaaacgaaacatgagggagatggacagcatgtaacaagatattgatattcctcatgtaacaagtttttgtactgttcataggaaaaaacacactggaaattctttcaacttttacacaccacacctttagaataaccaatctgtctgttcgcacaaaaatcttttaagtgtaagtcgtaccactaatttaggtaatcaggcaacatattgccagtattggggctcagaaaacaataccccaaaatattgcactttggtaggctgattactttgaattaaaggagtctggagggcctcagaagtaaagctctctctgaccacctcctgcccctctttctccattgaagaagtcatagaaaccagaattcctcctcccctgggcggtatattacaaactacaacccttcttccctacaaaaaatctagaaaggtcactttcccttccgccctgaagaccctcactccatatgagcccgggccggtccactagaggagtagaaagttatacagagaagccaagaaaaatctgaacaaacaggccttggtgggtttcccctacctctgtctattaccattaccatactctttttgtccaatcacatttctacatggctgtccattcttcattgaacctaatcataaatacagacagttttccttcggtctctggggcttcatttctgaaggctcccatgcagtgtaaaactttgattaaataaatctgttatgcttttcgcttgttaacctgtcttttgttacaggagggtcagctgtgccccttatgactgatgagaaaaaatatcacaccttttccatctttacatcagataccatacagacagattattttttacctcccagcttacaaatatatgtcattatttaaaagggtggactaacaagaataggtgagtggcattttccaggattgtgccattctttgaaaactggaagcatatgacctacttaagtgtctccagaattattcgagtataatttgtaaatgcgaaacatctcaataaaacttcaagtgtttttataaaagaacttaaaacaataaaatacttagttatttgttcataacactacaaaataaattacattatctaatgtaatcatgtccaatcatacgttcataatttctggttcaaaaaataatacataaaatgaatcctttctgtatccaactccgcgtatttactgatcctcttaagccaattccagaactctttacattaacaattgctgctatagaatctcactttatttgggaggccaaaattataaatttcacatcaattacttcccttacttaccagccttagcagcaagagactttgtagtatttaaaaaattaaactccaacctcgaagaaaaaaattagtcagcattgaaaatatttaacataatactacatactaaggtttaaaagcaattaattccaaaagtgtggttctaaaaaagtgtttctgcaatagcaggactggtttggtatatagtctaccaaggtaacaacttctaagggaacaaacatgttaaaaacgagtccccttattttataagcataccttgtgagagtagctcttaaaggtcagtacagaacatgatttggagtaagagtgacttgtaagaactttgcgaacttaattttccagaatgaaagccaccaataacagcctgccattcttttctgttaaacagcataaaatttcaccttttgaaagttctgaacaaacagaacaattgagacaacgaaccaagaaacacctaaagttcagtcagcatcaggccttattttagccaaactgattttgcagtaaatttttctattaactagactatttaattaaaaattattccattttaaataagaattattcgatattatctgaggatacatattttttaactgtatgaaaataatatttttaaaagggctaggagcccggcgaggtggcttattcctgtaatcccagcactttgggaggccgaagcgggtggataatctaaggtcaggagttcgagaccagcctgaccaatgtggtgaaaccccgtctctactaaaaatacaaaatattagccgcgcatggtggcgcgcacctgtaatcccagctactcggaggggtgtggggagctgagggaggatgattgcttgaatccgggagacggaggttgcagtgaaccgagatcgcgccactgcgctccagcctgggcaacaggagagccgtacccccggcaaaaaaaaaaaaaaaaaagggggttagggacttaacaatgttgtcatctttatttaaaatagtgtgaaactgttaagtaaatatacttgcagaatgcataaaatataaagaagcagttctaatttttgaaaaccattagagaccatagacatttgcaatgtaaaaggctgcagcaaaccaatttacagtaaaagttgaaataatatgaattgtaaaaatatttctaaactgaccatgataaaatgaaaaactcacaggaagacaacagaacaatcaagatgaacataaagtaattcttgagcgtggggacaagactatgaaagaagtgagaaatgtacatgcactggtcgctgtgagatggggagagactgctccaacagggtaaatcttagagactcaagaagactgactacgtgataagtgactctcagacgagaagcattcactgatgaaaactctggcttccctttcctttgatgttgcaacagttctattttccattctttgtgaaacctggagattactcttcacaattgtattttaacaattctgctgacgcggcaatcaggtgggcaaagggaaagatcagtggcgaagcctgggcagcaagggatactggaaatagactatgagagagattgagagattacagtcagcagctatgtgtcaggagggatgaggaaatccgagttagaagcgctgagcagtggtgcggcaggaggcagggagggtccggaggaaaacagtaaaagggggcaggagtggcagagcaagcgtgtgacccacaaccaagggaggtaaaccacatgaggagctggtggggagcagactgaggcgctgtgagggtggttaggacaagcccgccctcccaccctactttttcctccggtggagaggcagcgaccagtcacctggagtgtgagttccggagggactcgatcaggcgctgcttctgctgctggaggctggtgaggccaccgggggacccagccgcggaggaggaggcgctcttggtcaggggaaaaagccagctcatcctcctcgggtccacgggccggaggccctggaaggctctggcctgcttctcccagtggctcggcccggcggttctccagcgacagaggagcggggtgggacgtccgtggcccaagcgctggggaccgcgtcttctctaagcctgtcctgcctgcgctccccgagttctgggggacatgctacgaacggcgggcggctggagagggaaacttgcggcccggaacaggaggtcccaccttcacggcccagacgcccaaaccggccagccagggagcctggccgcccagcgctccaccacccgcgccgccgtcacttgcgtgccccgcccccgggggcgctctccgccccctctgcgtgtcgcgtcatcatctagcgcccccgtcaggacgtgcgaaaagcgacggcgcagcacggtgcggcgcagctcctgctcgcctttcccttcgctgggcgagaggtgtctatggggcacccgctgccgccgccgctaccgccaccgccaccgccaccgccgccgagtgctgtctctatggcgaggaggaggaggaggagcgcgagctcagcgacacaagtagatcttgcatccgctgcagccttacggggggaggggcgggttagggaagtagaaagggggcggggacgatgaacctgagagggtgcgcgatggcgccagctggagtgcggctggcggaggaaggagcctggcggcggrttgggggctgggtaactggggctgggggtttgtcaaggggttggcgcgtagtgatgacgcaaaggctttgtacctggggcttcgcagtgggacggaaattgggagtggagggcggtggcctagatcctcacctcttcgtattgtttcacgcggcagtgcttgggagtcagtgtagctccagtcagtgttatcagcaccttcgcactggcgctttgccagggaagagagttatctatggcttgaatacctcggtgccgtcctctcgtttctctgggaaactgcagtacggagatgctwtctccagtaatgagaaggcctttggtgtctcttcggggcttctgggactgcagtagagagagaggtggaggaaaacaatgttagactacagggtctttccaagtctttgtgtttttgtgcttatgtgtgtgtgtgtgcctatcggggtgggagagttataaaggaggggtgtcctggatctcctttagtttctctacttggagaattggaagttacatttgtgactcttcagagtttagaagacagtcataagaccctctttttactcttgttttttttttttccaatttgtatgaaaaatgcagaaggatttgaaatttccctgcccaagaatcaacaggaactctgtttatagaccagaaatgtgacatctatctttggtaaccatgcaatatgctctaagttttagacgttctattgtgttctttttccgttctgcaactgcgaacattcagataattttcatggccgttacttttttctcagagcatttacaaacatttttgacccctctagtctagttagaataaacgccggtaaagtagatcttgttatcaagtcggattttggttgttttattaatgaggaataaaaataaacaccatctttgccatggtaacatctgatcttgtcacatgtaaataagtaatttttcattttttgtctggaaatggatggctttataaagttttatgcagagtagttgaactcagataaataattagtggaaagttataaaatatgattagtatgtatgtgtaaaaaagctattttaaaataactgaaattaggaccaggaaatctgtactgtagtcctttttttcctatagactagctgtgtgaccttaagtyactttctaaactttgattttttttttttatgagtcaagaactttgaataaataacttcttaggttcctgctggatcaattattctgtgattcagatttgatatatctggtcttcatattgtttttttattttgacaggtacataaataaaggataaaatattttatgaaacaaatcttcaatcaagtataacattttgatgcttggcatctagactcccttgtgccctcactatgccagcggcaactgtagatcatagccaaagaatttgtgaagtttgggcttgcaacttggatgaagagatgaagaaaattcgtcaagttatccgaaaatataattacgttgctatggtatgcccacaagcagatctttaaaacgcttcatataaaggaggaaaaggaaattttaaagtcttgaattcaacccttttggttgatatttttagggattaatttcaccatgaaaagtaaaatttgtcactgccctccagccaaaatccatcaggaatacacctgtgatttgacaggttgggtttatccctcattgcagtgagggaaaacgcactggaattcatgggaaccatgggccgtttgaataagagttaggaaggatttgggctcgtgtcaggtggtcttaggggaaggtaagggaagcagrgctttactgtggattggatgtgttcgggaagctggggtaattctgtgattgggtatcttactaagtcttaaatgagagactagaatgaggttaaagctgcagagaaggaacagtcattcatttagccaggatggagatacttggtcattttgtggtttgacatttttatttttttgtccttgttcagacatgattacagagtggccttatttgaggttgaacttttgtgaaattgtgttcaacaggagaacattagggcgtggctatgagtgccaggtctgctcctagcaacaccaaagcctagctggtagtaccacatgagctcccagaagctagggtgctctttctcaaacaaaaaaatcagatgtgccagtgaaacgttgttggtctgcaatttgttttcataattaacactggagttctgtgaatatactgtgttactaagcaactctgcttttgcacgtgctgtttggtctgcctagattgtctatccagttaatgatttttcttctttaccattatactgtctatatctgttagctaccctactgttttctacatccactggattattattagctccataaaccaagtgttttaatcctttctctcccaacacctagcataacacatatagtattcaataaagtggctgttgaattgcactgaatttagagaaatattgawttctttactatttcatagtgacttgataggtagtttttattcttagctagccctagtttgaattctaatactaaaccgatgtatctttgtctcagtatttttaataaaaataaacaaatgcattactttggggaggagcaagttgattggttaaaatatgactgtttctttgtagatgacatactatttgataaaggtgtacttacccatgattagaactaaaattgttttcttaaccaatggaaattcatagtgatcattgatttctcagatgataaagagtggcaacatagagaagtgataacatcctacaagagtgagtaggtggcatgcaattcttgacagcatgctttctgtggactatagagagaatattgtttaagccagagaaattaggaagctaatgatgtttttcttagggttttggtgttgagaaaaaccttgtgtcagagaagcaattggaaagtacagggcgttttcccctcttttgaaccagttcttcaagaaacttggttttagcattggaatactgtgagcatcatttcatgtatcctttgggagacaggaatttatgattttcccccctttcttggttatagagtaagtatttggttaaatttatcacatgtatctcgtatagtaactttttggatatatttaaggaaaggttattaagtttatagagttttatggttctaaaaagtgatgttctttctagttaaaatatactttgtaattgaatataaatgtgtagaatatcatctgtaggattctttgatttgcatcaaaaattaaaaatgtgtggattgtagttttgactgtttagtacataatgaatcttaaaactattttacaggacaccgagtttccaggtgtggttgcaagacccattggagaattcaggagcaatgctgactatcaataccaactattgcggtgtaatgtagacttgttaaagataattcagctaggactgacatttatgaatgagcaaggagaataccctccaggaacttcaacttggcagtttaattttaaatttaatttgacgtaagtgggaaataactgtataacccagacttttttttttttttctttaatcttaggaattgattttcctcaagtatggtgacatgctaggtgaatttggtgtagttatcctggaaatatataaaacgtaacatttcaaaagcrtggttttcttttttactatgggaccaaaaaaaatactttgatgttaaagatgttatatttaaaatatgactgcagctttttttgtatttggaagactgggtattgaaagtacttctgatagaaaaaataatcctacattagttttactttcaaaaattttgtgtgcaatttgaaatatagccttttataatatttatccttcttgtgaagatttttgttgcattcatattccagtttatgagtagattacatgtcaaatgcagtaagacgttttctggaaccttgggtacgttttcctttcaagtcagtattatcattaggttgccacttcagcccacaaaagctctcttaatttacatataggagaagtagtagtatccttgaacctggtgtttatcatatgtcagaatcttcattctaactcaagccctgggtcttcacccagtttccttagttataatatttctgtattattaatagaagtagtcttgatagctaagggaagttttagatgtttttagagaggggcagattatttgcaaactaagttgggtaaataaaataatacattcttattacagcaggacctcaaatgacattttcttcaacattgtttcatggtaaccttcataaaaaataaaattgattcctgacccgggccactacctgagtggagtgtgcacgttctcgtgtatatgtggattttctcccgggtcctctgatttcctcccacatcccaaggctgtgcacgttaggtgaaatggtgtggctaagttgtcccagtgtgagtgagtaggtgtatctgtgtgagtgcactgtgccacggaacgacatgctgaccagggttggttcccacattgtgccctgagctgccagaataggctctggctttcttcacccctcaactgaataatggagcaaataattatcttgtttttattaattgttcttaaatttacatatagctcacatttatttcattgtttaatattagaagtattttggtctttatctagaagtttgatgatttttttgtgaccagaaatatgccgtaggaacttaactcttgtttttatcaattagcctgtggtaaaaattggtttcgttatccatcttttggcttaaagttgcaatttccaagaacttattgataacgttgagtgagtacttaactgtatgttgcaatattgcattgttcttctgtttgacatcctacatttgtgtcatacatcctaatatctggtaggtaaaatagtgaaagaaactgtaggcaattaatggtagtgccaatgtatgaattctttcttcctgttctttgtcagataaacaaagatatttagtatacacaattttacgaaagtagggcttaggaaaagcagagtaatgatgcctgtggtatagtagtgtggcttgtaattacactgtgtttagcctgactctccatttcactcttttgggtttaataatatactctccatttggagaccaaggcaggaggattgcttgaggccaggagttctagaccagcctggtcaacatagactctgtctctacaaaaaaaaaaaaaaaaaaatgaaactaagccaggcatggtggctgtgtacctgtagtcctagcactacaggtacaggtacaggtagctagcactacaggtacagggaggctgaaccaagtggattgctttaactgaggtgttcaaggctatagtgatctagattgcaccactgcactccagcctgggcaacagagtgatactttgtctctaaaaatacctgtatctatacacacacgcasagtctacagaaccttgtaaagtaaacttgtccaacccttggcccaggatggctttgaatgcagcccaacagaaattcgtaaactttcttaaaacattatgagatttttttgttgttgtttaagttagtttatttaatgtgtggcccaagacagttctttgagtatggcccaaggaagccaaaagattgaacacctcatttataaagggtgcaaagtactccactcaaactgaaaaccttttataagaactacatctgtgaaacactgaaaattgcctcctatcctttttctcaaatgataaacctttattaaaattagtgctttaccatttcatttgttccatgttaactttttgttcaagtgaattagaacattgtttttaaattagatactattgtgatctcagtacgtgagaaggaggtaacccatcagcttctcagtttggataaaattgacagtttccttttctagaaacacctttgttcgagtaacaactgctttcttagtacagcctgtaagtgacattttttctttcttactcaaaaatgactgctaaagtttactaccaagttttgctaccatttacactaggggtgtctaatcttttggtttccctgggccacactagaggaagaattgtcttgggccacacataaaatacactaatgctaacaatagctgttgagctaaaaaaaaaaaaaatctcaaaatgttttaagaaagttgacaaatttgtattgggctacattcacagccatgccgggccacatgtggcccactggctgcaggttggacaagcttgatttacactgatgttaggagatgtttaaggagaaggatacagtgaaaaacattaggtagaagaagtcatttggaagataaacgagtaatgcctaatatagagagagcaccgtgaagagaatcttggaaatttggaagaaagatcaaaattgactttttaatggggtggctagaatgagtgtcagttacagtgctagacactagggatttagtactgaggaaagttggtcgtggtctttataactcagtgttttgtaactcttctgttttctctctattgcctaagtctaagaattacaattgtaacgtatgggaattctctccaaactgaatttggagttgatacatccatgaaaattgaagtggagtactgatgagctgtgaagaagagaagcattctgtggaaataatgtcactgataaagaggattaamacaaatttttaacaaattctcacttttaggctgggcgtggtggctcacgcctgtaatcccagcactttgggaggccgaggcgggcggatcacaaggtcaggagatcgagaacatcctggctaacacggtgaaaccctgtatctactaaaaatacaaaaaaaattagctgggtgtggtggtgagcacctgtagtcccagctactcgggaggctgaggcgggagaatggcgtgaacccaggaggtggagcttgcagtgagccgagatgccactgactccagtctgggcgacagagtgagactccgtctcaaaaaagaaaaatcacttttggtgattgcagtaattcaataggatagtagaaattacagggcaccttgggtttggtggtaacagaaaggatgctgatgcttcatttaaggaaagtggcagtgtaaagaaggagatagagagtgccataagaaggaaggctggatgcagtagcccattcctgtaatcccagcacttcgggaggccagttggaagccagggtgggcagattgtttgagctcagtttaagaccagttcgggcaacatggcaaaaccctgtctacaaaaatagraaaattagccaggcatggtggctcatatctgtagtcccagctacttgggaggctacaaaaggaggattgcttgagtccgggaggtcaaggctacagtgagccgtgttcaagccactgcttcctggatgacagccagaccctgtctcaagaagggaaagcagaatcaacagaatagtggtttttattttgttttacagataatacacagacatatttgtgtgttcatgagttagttaaggagttgtatgttaggataaagataggcacttgacaagtcctttgaggaatggcatggaatagcgtctaaggcattggtagcaattagctttggcgatgaggcaagctgtctttgtagtctaagtaagaaagatcttcacatacgtagatgtaaagaaagacaggaatattaatctgatgtttctttgtaaagcaggtatggggtgaagccatatgctgcaagtagacaggtgaagggtgttattggaaacttaagagaaaaaggtctaaactacttgtatacctataccttggcaaatggccaagaatgatgtgcacctggagaagaatctgttttttatccctttcattgcttatagttgctaaggcatgcctcagtgtgagcactgggacctgatgaatgagattctaattttttgaggtacatatttttagcataggaaagctgtggtttcactggaaaaaaaaaaaaaaaaagaaactacttcattgggtttattctgttacccttcctaaaggattttccaggggagactgacttttacgtgattgttgtggtttccttctcttttaaaatatttccattgttttgtaatttttcagacatttagaaataaattgatttctaaaggactaaccataacgatactttttggcccaagtgaagtgaaccccatggtttagatttgtcaagtgtttaataggaattccttttgccaagaggtagaaaccagtattcttacaatttaaaaagtaaataaaaaaacactttttcacgtattctcaaaaatgtatctgtattttggtaacttttttgttttaatatttcagatacagatatattttggaaacttttaatatttcagatacacatatttgtggttggaaatatatttgaggttggagatggctttctttttggcttaagtgaaatcttgaagaattggtttatatttagatttcctggcttgattttataaggcagtcttttaggaataggattgttggcagaagaaattattgctattacagtacagtcctttatacagtgttgcttattggaggcatttgcaaggctcatttgtgaaaggaggcatctccttctttaagatgaagtgtagtttaactcatccgcatgagacattttccactgggtctccttactggtgctgctgagagcacgggagatgggcatatgccccacagctatggctgcagctccatctgggagcattacagtggctgctgagactgagagtctctgaaaaaacttgtctgtcactttgcgacggtagcccctggtgaataggagacccttttccaaacccagttaaatgtatttaagtatgaaaggctaatagagttaatagaaaaaagattaaaattgcacctttggactctctgaatgattttttattcgaaacacttttctgaaataatgacctttgtattwaaattgcatttttcttgcatatatataaagcattgaaacaggtggactcaagccattcctctgtctcttttctggcactgtagttatagatgtaagcagaagaacagcttgtttgaagtaatggcatgtttgaatgttgtctttctctttcttctgccagggaggacatgtatgcccaggactctatagagctactaacaacatctggtatccagtttaaaaaacatgaggaggaaggaattgaaacccagtactttgcagaacttcttatgacttctggagtggtcctctgtgaaggggtcaaatggttgtcatttcataggtaaaacgactacattgaaaatggcatttgtttttccatctcatacttgctccacacttacttgggtcactatgttagcaatttcaggtttaattctggaaagagytgactgccatatagagttgtctcctaactcttaggaggctaatgttggtctgcttaaaggttaatttaaaatatgggatccatttttgcctgtgagaagcatgttgcatagtggaaacagtacaggttctctaaaaagtgaaagaccctggtttaaatccagcggcgccatttggaattggtgttacccagggttttcttttactatttctacaccttagtttttaatgttctacgggggaaaccattcacttacatttacacaacgttattgagtatttaccatatggcaggcactgagatgagattctaggaactaaggtgtgaataaaacagatgaaaattattttcctcatggagtttatattctcatgggggtgggcagacagtttttaaaaatggagttcacgttgtgatttgttagatagtgataagtactatctcaaaacagcaaagaaaatgctagggatgggtgtggagatggattttaatttttttttaaagtgataaggcatcccttagaagaaatagcttgaagacttgttttaatggtcaccaaaatactttataaacagtaaattctcaataagtggtggttctaaattctttattgttatgaaactagattatttaagagtgtttctggtaaggaaactattccgattttgtgaaatagacttccasgtatgaaaaagagttttcccatctaagtaaactaaactgacgttccagggactaaaagtaaccttcagaatgatattggcttttgttaggttttgaaaaagcattgtgttacatagaygttaatactctcatacttggtccacttcacacatgtatcttaaatctgagtctcctgcatgtttagtttctgtctctgatctgtgggatgtttatagtgaaggactgttcatgtgggcaactttgatgtgtactaaccagaaatggttgagttgtaggtactgaacacactcattcttacctatcatcttttttgtctcttctgcacttgaacttgtaccttaggaaacataacttaagactcttgatacaaataccttttttttagtcatttttcttccctagatatgaaggtgcaaaagaactggaaagtattgcccttcccttttactgtatatgacataccctttcatttaaaaaatactctgacaaaatacagtgcactaggcactgggtattaagatgaacaaaaacaaacagggttcattcatgtcttcttggagtttagaatctaagttagactgatatatttgaatatttatcaagatagaagattttattccattaaatatcattagttgttttcctcatattctaatttcaagtaatraagaatagtttaagaagtttataaatcctaagcgctaatataatcttttaatgttagtgagcaaatgtcatataggcttcctgttagaggtccttggaaggaaaggtagacaagggacggacgtgtctaagtggcctgggagtgtagggagacagaaagctgtgcgaaaggccggacaaagggagaagagttctggatttgagagtgtaggagtttgcattttatgatcaagagagtagttatttttttactacccttcacttcttccatgtgcagcatttccattaataatgactcttagggagccacactgaaaggaagagaattgtgaaggaagaaaagggagagactacttaacacagtcatttaagagaagtgaaaataccttgttacagtcttattctttggataaagtatatgaccaccttatgtaaaagtgggatgacttgcattacttttgtctaccgaatgccagttctcttgctacctttgctaactcttctggccaagtttccattcatctttatttctccatttccatagttactttaaaaaatattttgagacatctgtgggcagcttgatactcttcttggtgttctctattcagatatcaacaaaatagtattttattgaccataggctggtttggtagtgtaggtctgtgttgatatctctgaataataaagtgataaagttcttaatactgtaagatgacgacattttctcatagttctcaatatgtttgttttctctgttcttgtgtgcacttctctttaatgtttttgggagggctctagtgtgacttgcttaaatttgaatcagaaaaacttttttttttaatctttatagtatttatatgtccctcttctctattcttttaacccttttatagcggttacgactttggctacttaatcaaaatcctaaccaactctaacttgcctgaagaagaacttgacttctttgagatccttcgattgttttttcctgtcatttatgatgtgaagtacctcatgaagagctgcaaaaatctcaaagtaaggcttcggatggcattatctacagcagcacactgttcagaccaagtgactgtcatgmgagcctaggctgggatgttgttttaaaccatattttaaagtattacagtgaatgcaattatattatctggtcatgtgattttttttcttgcatacataatttgtagggaatccttttttcagagcttcagtatgtcttggcagaaggcagaattttcaacacatttcaggcttaggtccggttcttgtcactgcttgccagattgaaaatcacaaaccaaaacacaaatctgaggacattgaggctctcatatgcacgccattgtgagttgttactttctcccaagacgcatagaatctgttcttacaaggtggaatctaaggtggccagcgatatgcagatgtatttagtagtgtggcaaaagtttttctttccttttggcttatcttggctagaaattattttgtcagttctagtgataggataatgctcctaggattaaactatatagctaaaagatttttctgtggccaaaagatgtcagcttgttacagttaagtactatgggaaatgtgtaggtcctgcctagatagtagtaacattttgacgctgcataacatgtatttttaaattctaaacattaattctttttttgtttttgagacggagccttgctcttgtcgcccaggctggagtgcagtggcgtggtctcggctcactgcaacctccgcctcccgggttcaagtgattctcctgcctcagcctcctgtgtagctggaattaacaggtgtccatcaccacacccagctaaatttcgtatttttagtagagtcggggttttaccgtgttggtcacgctggtcttaacagataactgaagatgagaagctttcttttggccagtgtttacctttaatacatgatatggtcagcatatgactagagaaattttcaagaaagattattttatgtttgtagcagtagacttctgtgtaatttgaggggacttccaggaagtgaacttgcagtagggtatcccttgcttgagaaattcagcccaccctgtgaaagcactgcatgctgaggcctacatgttttcatctgactttttttttaattgacatgtctgtataatgatagttttcaggaacagggaaccaaattattgctcatcatgtggttgttactgggaagtttctaagtacagatattctgaatgtgtcctgagtaagctgctgtgttaaaattcaggttaaygacaaaggtgctttttgacctatagtcagccatgctgttctattcagttctagttctgttctcctaagcagctgctaacgatacctaatcctcgtgctatttttagcgcagaagcaactgctgtgcaaagccttgtttcaagctgtgatgcacagaagggccattttgcyggtggaggccttaacaagttagagaagaatttttgttttgttgttggtgtttctttccttcacgctctacttattctcccctccctttactctccttgcctgtcctcccactttctttccttctgttactgtctttctctttctttctttccactctttccactctcatctttcttttttaatcttaggagtattaacataggtggattatagcagaccactctaaggagttgtgtgcatatactcgtcttaactaagaaaaccatagtgaagcatttagcataytcttaatgattattcataatggctttgttttgtaaaaattaagtgaaaactacaaatggatggtgggaagtttaagaaaatatgaaaaaaatggtgttatactagcttttcagttttataattattactggattgatagactatgagtgtacttgataaatattaccctatatrtggtctgcttccttcccatatctaggagagtatttacctgtcatatgccctaaaacatgatgaaaatacattttcccaattaggatcttgttttctattaaatgatactttttccgcattcaacaaatacattagtaattcacattctctgtttcttccccccaatctttataagattcacctttacatactamagtttatttttattttggtcagcgtctaagtttataatttgtgaatttaggccttgtaagatttttcttcttgacaagcaattttttattttttctagggtggattacaggaggtggcagaacagttagagctggaacggataggaccacaacatcaggcaggatctgattcattgctcacaggaatggcctttttcaaaatgagagaagtatgaagacatcactgcctttttctcagttggttgttaggttgagaacattaaaaatcttgtggccaaagattttgggcaacaagtacctactaagtaaagatataattagagataccatatgagtcacatccaccacacttaaaagtattcaaaaataagtcatcttgaaatgtagttcagaaggaactgggagaacatgttcatcatagaaccaacaattttaaaacataaactacctgagaagtcatgtaggtccaaccatattatttctcaggtgagaaaacaggctaataacttccatgattaaacacattactagtgggagaactccagagttcttttctgactcccattggtgctcctyctacraggcaaggaatctttatattaggtttattctagcatgaccccttttaaggtttaaactggtgataaatatattatttgctcatgtcattcttcagtgctttgaagattttatagagaagaactcaggctcttttactgcattgagtcttaaaaggggggttgaattccgaagggatcaaataaatccaacgtagtagttgcatcagaaaccatattaggaaaaccctccttaaacggcaaaaggcagagatcagttccttgagtataaagtgttagggatggaagaatgaaactaaatgaacccattatctactcctaagtaattaagtgatgtgcacagatacacctagctataggtaaacaggaaaattggttgtgcaaaaaacaagtgaggtttttcttgactataagttttcccttttggaaaaattcgctgtggatttgagtatattttctcttagacattaaattgagactgagaatttaaaactttttgtagcaatgtattgataatagaaagcattaaagctgttttgctaagtagtgttgttgattcagaagtgatttggactatccattcatgacacgtaaatattttgttttggactccttccaattgtttcattagataattgaaacaaccttttggattttttagctttgcattttaaaaatgtcttaatggtttatttaactaaaggtggatttctggcactaatttatctttatttttcttggcttcttcaaggacagtaatagagtgtgaatgtttggattttactgtccatgactttatggtttgatcatttatagccagctcagccttgcatacagatttaagacagtttatgaacctaaactttttttcccccaccatcattggctttcttcattcttgagtattgttaaattaatggaatagttatttttccatgatgaaaaattcttataaaaatggtctaaatggaaaagacatgcatttatacactttttttgtagtctctttctttggtttctgagctctgtacttttgaggacattagtcttactcattgaactgaaatgcgtagcctcaaaggaacaccatagaaaagagccatcattattgtcagtgaacagtcagtacttacattgctgaaatataaattacaagtggttccttttggttaaaattatcttttttttttcttcaaaattcctttttagatgttctttgaagatcatattgatgatgccaaatattgtggtcatttgtatggccttggttctggttcatcctatgtacagaatggcacagggaatgcatatgaagaggaagccaacaagcagtcatgacatgaaatagtccttttatttttatttcgagctacacacatgcttgtatataggttttatctctggttgaatccctcgaacaatagacagtacctttcccccccctttcatggcccattttattgtctgcctttcagtactaagtatgaccgttcctatctcagatcttaataaaaagaaaaaaaaaaacgcattcaggttaaatttggccttaatttaatatacttgttagcaagcgtgtgtgacagagagtggggaaagctacatcattgaatattttgataaactttaccgacttgagtttggtttatttttcccttttcctaaattaactagcactgactgtaatttatttccctgtttcacgtctctcccttccattctgcaggagttttagctatttgagatcgtggaccatcagttttgcactttagagagtgtttctgactctaaacctgttttatcagaaaatttgttttttcttgatcttagctggaaaaatctgccaactttacacagtatttacttggttttgacccacagaatatagcacgttgtgcaaactgtcgattcagcgaaacttaaaaaagacaagaaactactgaggagcttagtaactgctgtttctgtacgtagtgtttaatcttccaagcacatctagtgtctgtcagtttctaattggcatgtgtaggctgctctgtgactgaagaattttcaaaccagctttacacccttcaggaaaaatcccttgtgattggatgtttactatctgccaggaaactggtactcaagatgttgaagctacagttattttatgatagcacacttcccttgatctgcttatttttattccatcaccatttacccttttttttttttaaattttgtagccattcttatgatgctcttgatttgttggttacacaaatcaattttattaaaaatccaaagataagtctttaggtatattttgtaccaaattaaattagaagacaaaaattgtgctttcatagttgctacaaaggtaaataatggagagatttggtacaaaacaacaaaatatatatatattctcatatatatatatatagctgataaaattacctgaggagtgtaatgcttatttttttgtgtatatctttgcaatctattttatatatattgacaaaagagactgtgaaatacttagccatgcagaatatgtgaccagaccrgagcatgtgtaggaagactttacrgtaatcattaactctaccccgaaatgatggactacaagttataatgtgtgttacctacacttcaatcagtaatattagcaaatctccaaatgttartcacattggtttgtctcccttgtacattctttattcatgatattacagtgctgtaactgggtggtcctttttaaacaaaacattatttgcaaaacagagggtattatttgtttttaaagcttttgtaaataaaggcttcaaaatgttttcttataaatgttgatgactggtgattttcttttggaaatacttatttgggggatattgttcatttttatttgggcaactcaacagaattcagtaacttccttcattaaccctagatgattattagtccattaattgaaaaatcagtctgagttttctgcatttcaagtgttggcttattcttgttctttatgagtacctcaactagctaattaaggactgacttctgtttctcctttccaggaatgcatttattccgaaggatatacttcacaaagtaaatacatttggtataactgtggctttttaaaaaatctaacacaatgtagtaagtttctaactggcttcttttgtcttcgttaaaaaggaagtgaagcttcttttcgcttgtgatttgttagctgagaaaactaatatttaaattctgttcaactatttgagaaatcaatgctggatttcaaataggaatgataaagattgcctttttattagccacatagttgctcaatctcataacttgtatcatttctggcttctgtccctaaaaagtatagataatccctaacttactttcgacttaatgatttttcaactttacagtgggtgtattgagaggtaaccccatcaaaagtttaggagcgccttaggaccaaagatggggttatagtttctactgaatgtgtattgcttttgcaccattgcaaagtcaaaatttataagttgaaccatcgtaaattgggggactgtatgctgttgcctgcattaaatgcatcttagtattttttcagatgtaacctcattgtaggttgagcaaccgtatagtgtaacttttgtagaggaacattttgacttttactgggtctaagttttacttttttattttgttccagacagtctcaatgtttgtaaagtctaggttccagatgtaagatatttggctgatattttagtgttactgagccattaattaattacaggctcatatattctgttaaatctactagagcaagggttgtcaaactatggcccgtagccagaatcagcttgctgcctgtttttgtgtggcccatgaactgaaaatggcttttaaatggttgggaaaaataatcaaaagattatttcctgacatctgaaaattacatgaaattcaaattttagtgtctataagtttttattggaatgcagccacactaatttacatattatctatggatacttttttgctataatgggaaagttgagtagctgctacagaacctgtgtatgtgtgtcttgtttcacattgccgcttggcaagctacagaatcatggtgatgcagatattacctgaaagcatttggaatgccctgtgtattgctagatttattactttttctgctaccagttcatgccctgtatctcagaacaagaaaagtacctttgaatgttacactttcaaggcacactggaatatggactattttattatatgctggtacattgtgtttataatgcagtgtcaccataactggtaaaagaatagactgacagtatcagactaacatcacaatattcccaactggtgggaaagcaacagtcagaagaattagaaaatttaaatgaaacatcacagcaaaatttcacaaaagtaataaaaatgaggctgcaaccaaaatgtttacaagtagcctatttgttagccaagcaaagaaaaccatttactaatgctgaattacatcgtgcttgaagatagtaaccaacccaaagacatgtgtccagagaaaattaagacatcagccctttgatgagaacagtagtttgaagaatgaggattttggacacaacatcaaatgacactgttaattctttgcctcttactagtcagtactgcctagctttattttttgagaaaccattgctggatttgaagtgatcgaagaatttgtatggaactacaagtaggaatattttcaaaaaagttgataaacagtacaacctgaagtggaatctactaagatgtgatgcaaccgatgctgggaaaaatgcatgaagcagaaaaaaagtttatttggtcaaattttaaggcttgtgaaaacgtaagttgtttaaagcctgtagttactcacttgattattcatcagcaggtacttcacaggaaatattggtgttactgaactggtcaacagttaacttcatttgctcttgtggacttaaccatcttcagttccatgattttttttttttttgtgagaaacagaagctgaatatcctgatttgatttgccacacaggcgttcaatggcttagcagtgctaaagatttatttttatttttttgggctctgggctgacattgaaatttttctgaatgagaaaaaccatcctcaaccactgttttttaacactgagtaactttggaaattaacttttgccacagacttgaaaatgtttcttaatgaatttgacctgaaattacaaggtacaacaacataatatggtaaattcatttcaataaaaactaaaacttaagattgtcaagctgctttatatactttctgtgctatgagaagtcaaaacagcgctgtattgccaaatccatttttagtggatatattttcctgtagcagttttttggaccttgatgcagtgcaaagaaaatttttaaattttaaaagcatttaactgcaattaaatgcttttaaagtttcctcttaatcttctgttggaaatgaatcatcttgaatgaatgacatgctaaagggcaaataccaaaaagatgaatcctacaaatgccttacaagtgatgaatatgcttaactaaaatcacatgctcatgggtggatgtgtcagtatttagcagtaccttgacctgtttgtgtgaaaagacattttcaaagatgaaatacgtgaaatcccattacacatcagcattaacagattaacattttctatttattccaatgaggggataccaactttcagcccaaattgagcaaaatgttacctcccgtcccctgccaaaaaatcccattattcccattagtagaactctattactaaaaaaagaaaaaaaaattgtactcaatattttgagttttcaatttttagaataaaaatttggtgaaaagtttccttgagtacctaaataatgtccttcattttgtcttagcttgcaaagcctctaatatttgctacctgcccttttcaaaaaaaaaaaaaaaaaaaaaaaaaaaaaaggcttgtccacctctctactagaagaaactcaagggtctatgtctgtcctgtttgctatttcatctgcattgccaaatgcagtggctcctctgggtaggcaacctgaggtggaatcaaattatgaatgcatatgttatctcatgtctataaaataaatgtgttagaatttataaataaagggataggaaaaatgctgattattctgtgtgtcggtgctttgtagtgaaggccagttcacacatgccatttgctatgttggtgtaatttatatgagagtttcatttataacaacgttacctgtcatttatttttctattaagacattatagaaacgtaggactgtacacatccaaatcctgcagaattttcatttcaggttttgaaagttaaaaaaatgtcaccatagaatgaaaattccaagaaaacaagattcatgtacattatcactagacaatttccatttgttttaaacagttttctacagcattagttacatttaacgtttagtataaaagcaattgagcaatttctctttagaagtccatttcattgctttgtagccatagtctgtaggtgaatgaacaagctacatttctccagaattactcattttctttttaaagataaactggtcaatactctccttcctggtatggaggaattttttgtatatgagaagcattcatgaatataatctgccctcttgctttattgtcataggaggggaaattcactgctttcacacccttctgttttggctctttctcccaaaagataagaatctttatttagtatcataccaagaaattggagttcctttagcttcagactatcatcatggcttccaaattgttaggaaatacaagtttgcaagaccccaaggggacttaatattttacatcttactagccatgtcataggttttaagtgcttttaatggggaactgtttcactcatgccatatacctgttttgtttttctaaaaaattaatactgtaagttgtgagcaggtgtcttgtatcactgcgaaacccatgcataataaaaacttgttcttgagctatatgtgtgtatacagactttccttccattcattgtagccattctggggctgtcctctacttcttgcctaagtatatgttttttaaataactttagcacatttgcatgctactccaagatgagtttataattaaggttgctttttaaagtattcagctttcacacaataagtgtttgattagttcatttaagatgttttcaattagggagccatacatactgacagaaaaagacacaaaatctaaactgacaaaatagccttgctctcataactgagaaaaatacaacaggagaactgacgcattctgtagtatctttttaaattcagaatcaacggaattttaccttgaagcattatgcgtttttttttcaattgattaagcacctttatcaatcaaacagaagcaatatattaagcattaataatttcaggtaggattcagctccttgtactgttaaaccttccccggaagatgcaacataaatcataggttttcataaaccataaagtagtactatttttcctgagcaaaagggaactagccataaaccagggcttaaaataacttattaaaagtttccctttggtttaattgctactcaaatcactcagatgattagccttaacagacattttcccccaattgtaaacaatacagaaatactgaatactggctatgaacatcaaaaagatctatttttgaacatttttcaccagtttgtttttgccctcactttcctgcaacaagaaaggtctgcaaatgattaaaagtgtcttctgttggcattgcccaggttattgtatttgaactttttgctggtataagaacaattctcagcggtgttggtgattgagctattagatacctggactgcatcatcatagttctttgctcacatttcaaggagactattttgaggaaggaaaaaaaaaatgggtgccctgtttcagagtctcctgaaacactcaacattgttctgggagatacttcatattcatagttgattcacaggagtctctttgaaacaagcctacttgatttcatcctttcagtgatgtccactgtttacaagccagggcactactacaataaaaaaatcttatggaaaagagaaaaggaaaatgcatggtttgcaacattataaggtttaacaatttcctgtgttctgtaacaaaataagatcctttggtaataaattctaaaggaaatctggtggggaacagattgctcagttgtaaaatctaggttaatgttggcttctacttaatgcttttcatggcgttacaagatcatattgctaacacttgcaataaaaagtagaatctaggaatttttaccaagacagtgagaaaattctaatggtatctttgtaaaagagtaatacttcaggtatgtaacatagtctccttccacatataagaggaaatcggtgctgaactggctaagtatgtggaaaagaagtgtaaaacatttgggattaagccacgtggttttctgctttagaagaacacgtttctgcagaaagatattaaacacgtgttatttgtgaaaaatccacttgtttaaatgtcactttggtgaaaatattcacagatcagaatctgtagtctaggtgtgtgggtgggatggttgtgctggaggacaccatcatgatttacaacgtaaactgctttgcatttaccattttctgaggtttgtatctatgtttgatcaaaggtatcagaaccatcactttt

SEQ ID NO: 97004 - DNA, 62237 bp, Homo sapiens
agtggctaagaacacagaggctggcatctcacagatggattctgatcctggctctgctgagtactaatttagggtcttagacccagagactgaatgtctctaagcttccgtttccacggtggtacggtggggacactagcactgccacccttataggggtgtcacaacgttccagtgggataacgaggcccttagggcatcactcaatatctaacacccattctgcacagagggcagttttctgaccccattttccagaggaaggaatggaagctcagagtgggtaagtaacttgcccaaggtcacacagttcagtggtggcgaaaacaccaatccccagacttcagagccaggcatcctttcctctatttcatggaggatctatggaagcaaaatacatctgaaacattccagtcttcttgaatttcatttattgggtgaagtaaacaaggtgtttgtaaaagatctatgcagtgacagccccatcaggcctcagccatgttaatgtgaccgcctccacctttctgagtcaaagagggatagtggtttagctttcagctggtgtcctgacaccatggtgatcctgccttccgatctttcttccccagttgctgcagatgttctaccggcaacaggaggagatccgaaggctccgggagctgttgacccagcgagaggtccaggccaaacagttggaactggagatcaaaaacttgcggatgggctcagagcagctctgagcagagacctctgccctcctcaccctcagggacaccactcggctccatggggaggtttagaaccaaaccacaagtcccctcaaggacaaccactatttctatattttttaccagaaaacaaaactctccatcgctgaaagagattccagtgggacatggtgccgtttttctgtttgccttcttgcaacaacagtttctgaattgactttgttttcagatgatgccttctgttgaattctgttattaagggcccatgatgagctgtaacttctcaagaggaaagaacacagtagaaaactagagctggaaggatctaggttgacctgtctgtgattttcaaactgtggtccagagaataggggaagactgggccagacgcagtggctcatgcctgtaatcccagcactctgggaggctgaggtgggcggattgcttgaggtcgggagtttgaaaccagtctcaccaggcgcagtggctcacgcctgtaattccagcatgttgggaggccgaggctggtggatcacgaggtcagcagttcgagaccagcctgaccaacatggtgaaaccccatctctactaaaaatacaaaaaaattagctgggcgtggtggcaggcgcctgtaattccagcgacttgggaggctgaggcaggagaattgcttgaaaccggaaggcgggggttgcagtgagctgagattgtgccactgcactctaacctgggcaataagagcaaaagtctgtctcaaaaaaaaaaaaaaaagaaagaaaccagcctggccaacatggtgaaaccccgtctctactaaaaatacaaaaattaggcagggcgtggtggttcacgcctataatcccagaactttgggaggccaagctgggcggatcttctgaggtcaggagttcaagaccagcctggccaacatggtgaaaccccgtctccactaaaaataaaaaattaaccaggcatggtggtgcatgcctgtaatcccagctatttgggaggctgaggcaggagaatcgcttgagcctgggaggcggaggttgcagtgaaccaagatcatgccacttcactccagcctgggtgacagagtgagactccgtctcaaaaaaaaaaagttggccagccgtggtggtgagcgtctgtagtccctgctattcgggaggctgagataggagaattgcttgaacctgggaggtggaggttgctatgagccacgattgcggactgcactgcagcctgggtgacagagcgagactccatctccaaaaaaaaaaaaaaaaagagagagagaataggggaagactaagcaggaaggctgtgtctcccttccccacactgtattccaaccagacagctcccttctattttatatgttgggctagtatgaaaaacaattctgctaggaaaaaaaaatttttttagaagtttgaaagctagtgatttgacccaagttcctcattttacagctggggaaactaaggcctagagagaggcaagtgatatttgtttcatggcagggctgggctgagatcctgcttttctgggtctgtctttttgctcttttgggtctgatgcagttctcagcccaaagagtagaaatctgttgcttctggcctcagctgtgccccagcttactcagtgacctcttgcaagtcctgccctctctggtctcagtttcttcatctgaaccaggggtaccctggaacaagctgctctctgcaggatctgccacctgaaaccttgacctaagagaaaactacctgtggggtgatctgggtttgctacagaaactaacggacactggcaaggggtcagaggcattcaacccaattctacaacacaggcaggtggtcaaaaccaacctttccaaccagaatcagcctgatatggatagatgctgtcccttatggagggacgcagacttcagaactgtgcccatgactgctgactgccaccaccaaggccctcaggtacacagcctgcctcctgcaggatgatgtgggcagatttcagccctagttaacagaagagtcccccaggaggtagggggcccccatcactggagacatgccagcagagcctctggccacctaaccaggaggtcttctgaaatgactatacgaggtaaagaagtagtaccagatggtcccaaagttcccttttagcctgaaagcttttctttgtccctccttagtgaatctgtgttccgagccctactctaaagttcagtggtcaatacaatagtccaccaagagactgggaatgattagaagtgaaattggtccctccttaccaaggaggggcagatgatctccattgcacagggcgattagattctggagctgaggtggggactgcaggaggccacctagtctggtaggtttcaacccaagctgtgtacattagaattcccttgggagcgtgcaggaaatacagatgcccatgccacattccagaccaactgaagctgaatctccagagtagggcctgtatggtcatataagctccacaggtgatctgcagtacagtgaagatggaagactgcatgtgtacctatttgcaataaagatgaagaggacagcaagctccagacaggagctgggactcaacccagatctcttaagtcctgcctggtggctccttaaaagtccagaagtgttgccccaagccctccctcaacatctctgggaaccgcagctgcagcacgatgggggttcagtgcccctgtttgccccttacccagctgtggtttattctgcttgtatgtctgcacaggccggatgctcgtgttccttgtcttattctccatttactcagtcactggggctcactcccgtctgatgcactagccaagattgccttagtgtgctccagaaaagaaggccaaatcccaggcattgtcagggcagcagagctctacaggataggcttacctttcccacctgtgtggctagcacttcacagtttacaaattcctcccacctccactcagtgacacatgctgttctaacacaggtcaggcaggcattacagtccccatgttcagaatcaaagacctagcctcagagaagtgaagaaacatcatgccaaggtcattgactgccaagcggtagaggtggggttgcatccagagagcttcccggtatgcctctgcacaatgccattccttggccagctccctccaccccaagggacccagactgcacacttaacaaacaggacacaggtgtctttgaacaaacttttttgtattattatttttacatctagaataaattatttaaattatttcacagcaagggagagggataggtaatttttatcagatatttttttaaaccatctgttttttaaattacatttttgtttatgttcttgagctgatgtagtggaacttgcctagcacattcaggtcccagccagttggcagagcatgctctcatctccttattccataccctgggcgtcccctttctgttgactcaggaactttctgagaatgaggacagcactaggagatgagctttggcaggtatccaccttaacgctacaataattgtgcttcctgaaacaaaacttgagattgtatcatagaaggaaacaggaagtcagaaatcaaatctatgcttttaattgaaaccgtgcctgaaacagtttgaatgattgttttaatgttgtttctgaaattccttgtacctttgtgaaaaataatgataataaataaaagtgaaaataaatagatgtggaatatgcaatggaaataatgtaacaaaataataaacatctggccattttactacaaggagctttccttttcttgatttgttccacaaataccaattaactatctactcttggagtcagacaccaagctggaaaacaggcagaacagacagtctttgccctctccagttttcagtcatggctgcgggaatggggagggccaggatagggaaagcataggctgttctggaaggagaaggagggaaggcttcctggaggaaaagatagtaaggtagaaacctgcagagtaagttggaatactcagggcaaagggcatttgggaagaagaatgttccaagcagggtaaactgcacgtcccccagtcttgaaaaagcacagggtggagcataggcagggcggagaccaaggatcttaagaaagagctgagggctttataagtggaagtctagacttgagcctgggggggcaactggaatttggggtggtggtgtgtgtgtgaaagttgtcagtaccaaaacagagtcacttacatcaaaaccaaactaaatggtgctcctgtagtcccagctactccagagatgaggtgggaagatcacttgagcccaggagttagaggctgcagtgagctatgatcgcactattgcactccagcctgggcaacagagcgagatcctgtctcaaacaaactaaatggtgctgggaggccatgaagtggggggccctcatcaacgatttgcctggtaacaggaactattattgcaaaagattccaccaaactgcaaccttgcacaaagaaccacaaccttgcacaaaagccatgatatgagcacatctgcccagcaactgcctgttcaacttttggactgaagccacctgtattaattcttgtaaccaagtattattattttaaaacgatctggccgggcgcggtggatcacgcctgtaatcccagcactttgggaggccgaggcgggcagatcacggggtcaggagatcgagaccatcctggctaaaacagtgaaaccccttttctactaaaaatacaaaaaattagccgggcgtggtggcgggcgcctgtagttccagctactcgggaggctgaagcaggagaatggcgtgaacccgggaggcggagcttgcagtgagcagagatggcgccactgcactccagcctgggcgacagaccgagactccgtctccaaaaaaaaaaaaaaaaaaaaaaaaaaaaaaaaacaaaaacaaacaaacaaacaaaaaaaacagtatatgcaatcctcctcgttttgcctttaaaagcctctgctttcctttgcctccctgagtactccgcgtccccaccccttgggtgccatggcacatttattcccgaattgcaatccttctgctcagtccgaaataaactcaattggagaatctctgtgtccttatttgaggttgatgaaggtatcttacagttgtgggaatgattatctttccggggaaaagggcaagagaggatcaagggaaagtgagaggagcacccccggaaggtcacagccaactttggtcccatcatcagggctgcagttttctgggcgttactggaacagcgtcattaagcaggaagcccaccctctcctagctggctcattaggagcttcccatttctggtgggaccacctcccggcctgggcgggcagagggagcaccctgctggtcggaggatgctccgaggcccgacgctgctcccggcgggctgtcatcctcctaggggtcggccggccggcctggagccgccccgcccacggccgaggtttcgstttcccttgggagccccgccctgtgtcccggggagccggaggaggtggagatgaatggcgggcgcggcgaccgggagccggacccctgggaggtcggagcttgtcgagggatgcggctggcgctgcccggagcatggcgaccgcgtggctgagctcttctgtcgccgctgccgccgctgcgtgtgcgcgctttgcccggtgctgggcgcgcaccgtggccaccctgtgggcctggcgctggaggcagcggtgcacgtgcaggtggggacgatggggacggggttcgccgcgcgggagttgggggagccagcccaggcataacggccgaggagggggcgtgcctggccgtggccagtggcgggttacaacctggaaaccaaaggtgccccagagggcgtctaagcggtcgaccgaaagttcagagcgggagcctgagacccaaggaagggcaaaggcgagccaaagccatcagttgagcttcagaaaaggtgggtttaggagtgagaggttgggagcccaggctggtacccagatgtccttgaccgtgtccaccatggccgatccgccacactgccattgggctggaagacagtctgccttttagttaacagaggtacaaactctccctcttaataaacagccctgtgtagctcagaaagccacacagacatctcaggtttacttaatctgcagtccacagaaaggrcctgtgaactttgagctgaggacggcctgactgccctgggagcagcctcagctgtcactacctacctcctctcccctccccggccacacagacactcccattcctgctcatagcagccctgggtgagccattattattacagccattttataggccacaagaggaaggctctggaggcaggggcaggccttgaacccaggactccattagccagatgcccccaacagggccattgtcaccgtggaacccttacccatgcataatcctaacagtgccccaggggctctgggctcctgctccagcttcccagctgactttttctgtggcttctctcaaatccttctctctctctgggtttcatgaagcctgggtgaggtaggccctcatgtctgacagctgttgatcctaccacttgtctccaagaagtcttctgtgatgaattcagccccatcgtgagcctttctccggtactgcatgactccagaccaccacactgtgacaaccttggaactccaaggtgaaaaggggatcatgggggacaatccagtggagtcgtgggctcaagacctgtccctgccaccagacccttcctttttttaacgtatgaaatggctgtaattataataatggctccttgaaaaactgttattcagaattaacaaggctgctttccacagatctggctcaagagtctcacccatccatttgtccatccccctacccactacctactgtcaacttgaagtaataagattcagaaaatatgattaagtacagagtttatccaagcctaaagcttgaggatggccaactgggaccatagattcaaatttctgtgactatccactctgattagcagcagttacatataagtttttaaggaaaaaagaagaagcagttcctaaattgtttaccaagaatttacattaaaatgacataagcagtcgggcacagtggctcatgcctgtaatcccagcactttgggaggctgaggcaggaggatcacatgaggccaagggtttgaggcctggccaacatggggaaaccccgtctctattaaaaaatatgaaaatcagccaggtgtggtggtacacatctgtaatcccagctactcaggaggctgaggcatgagaatcgcttgaacctgggagatggaggttgcaatgagccgagatcacgccaccgcactccagcctggatgacagagtgagactttgtcttaaataaataaataaataaataaataaataaataaataaaacagagaatctctatggcagaacaacaccaaacctattccactggggagtcaactaaaaacatcacgaagaaaatcccaagccttctttaaaagccaggaattggcttctaaaactttttctacaaccttccttgttgtagccaggaaataattcaggatttagtccaaattgcaggaaaataaaaactaaaaaacaatggccagggctggaatctaataacaggaataacaggtgtgcataacaggtgtgctaagattttcttctgaaacataatttttctctctctagttccctgtttttaccaaaaatgagtcttgataggacaaatttacttgcaaagtaagttttaatattacacttggcctgataatttgcattattggaactttcataaggaattttggatttgacttttttttttttttttttgagacacagggtctcactctgtcacccagactagagtgcaatggcatgatcgtggctcactgcaacctccacctcccagggtcaagcaatcctcctaccttggcctcccaagtagctgggactataggtatgcaccaccacacctggctaattttttttttgtattttttttgtagagacggggtttcaccatgttgtccaggctggtctagaattcctgggctcaagtgatcctcttgcctcagccttccaaagtgctgggattataggcrtgaaacaccacgcctggcctggatttgacttttaaaagccttacagctaaaaagccaaaccaaggattcaccatcagactatgcctgtgatacccatacacattgggtgaattattctcttctcaaggtcccaaaatatcttgaggttcctagacctgtcggaaagtgacattcttttcttaccacaaggtcgggaaccttgtaagggaactgtgtagacaaggaccaagctagtccagtctttccaaggatttttttttttttttttttttgagacagggtctcactctgttgcccaggctggagtgtggtggtgcaattttggctcactgcagcctccacctcccaggttcaagtgattctcccacttcagcttcctgagtagctggaactacaggtgtgcaccaccactcctggctaatttttgtatttgttggtagagatgtggcttcaccatgttggccagggtggtcttgaaaactccgacctcaagtgaactgcccacctcagtgtcccaaagtgctgggcccccttttattgtattttattttattcttgttaacattttttaatagaggcrgggtctcactatgttgcccaggctggtttcaaactcctggactcaagtgatccacctacctcagcctcccaaagtgctgggattacagacctgagccaccaagcctggcccccaagggtcttcttatgggctctgtaaacttgacttcagttcctgaaagcagtctgatcatatatgaagatatatcatttcagtcaaagccttggtaaaattaccagtgtctccaatgtggtctgttatgaaagaaaacatactcttattgaacttatgcaaataactatattgtcataaaataagaatactcacaaatagccaggtgcggtggctcacgcctgtaaacccagcactttgggaggctgtggtgggcggatcagttgaggtcaggagttggagatcagcctggccaacatggtgaaaccccatctttactaaaaatacaaaaattgtgctgggctcagtggctcacgcctgtaatcctagcactttgggaggccaaagtgggtggatcacgaggtcagaagttcgagaccagtatgaccaacatggtgaaacctatctctactaagaatgcaaaaattagctgggcatggtggtgggcacctgtaatcccagctactcgggaggctgaggcaggagaactgcttgaaccccacgaggcagaggttgcagtgagccaagattgtgccactgcactccagcctgggcaacagagaaagactccacctcagaaagaaaaattagccaagcrtggtggcatgtacctgtagtcccagctactcaggaggctgaggcaggaraatcgcttgaacctaggaggcagaggttgcagtgagccgagatcatgccactgcactccagcctgggtgacagagcaagactctgtctaaaaaaaaaaaattaatttaaaaatgaaaataaaaaaagtaaacacaaatagtttgcaaattttggtgaaatcaggtagagagaaagacaaatgtttcaattttgctcacaaaagtatcttttatccagttgctgtgacaaaagaaaaaattttcttgactgaaaaacaatataaaaagaatcagcaatgtttcaaattttaaaaatcataaaaatcacttttatcctctatcagtttagtcccatgtaaataattcttgctctgcttgatgttgggttagcagtcttcatgaatgcctcaggtttttattagagttctggaagcttttgcttaatccaatggtaagatctctgaagttaccagaaacctgtattcaagagtacttgtcagggtttttttccaaaaatttccttaaagatgaagcaaattttgtagctgattataaacgactttttttaaaagaatcaaagtaaaataaaaattgtcggctgggtgcggtggctcacgcctgtaatcccagcactttgggaggctgaggcgggccgatcacgaggtcaggagatcgagaccatggtgaaaccctgtctctactaaaaatacaaaaaaattagccaggcgtggtggcgggcacctgtagtcccagctacttgggaggctgaggcaggagaatggcatgaacccgggaggtggagcttgcagtgagccgagattacgccactgcactccagcctgggcgacagaatgagactctgtctcaaaaaaaaaacaaattgtctgtggatgataaaaggcttagaatagccacggtcaaagatgaaattgactaggatatgtggttatttgtgtggcacacaccagtttatcataataattatgataatgatatactgataacatataccaagacatatcagacttttaggaatctcatacaattttggaacacattaataatacgcttttataaatataactcaaagaaagttaaacatcatttcttatttgacaatatttcccatatgactttgacatcccaaataagcctaatgtgtctcttttggacwtccaggggtcctggttatgcccaagttagcttgggtcaaaaagacttaatttaattttgggaagtatctcaaatattaaaggtttaaaacacttgatatagaaataagaaaggtttaaaacacatgatcaaaatagaatcacaggtcactacaaaataatggtaattactttagccaaaatgattattcaaagatttcaaaaagcaaaaaccactctgatagaggagattcagttctcaatcaagagacctaataaagacagcatgggacaaactctccccagttaccttttctttgccatttatgcaaaagtaaatacatcttttaccgtctcttattaattctacattacatttttattcaaaggagaaaaacaagttttacttttaggccaggcacagtggctcatgcctgtaatcctagccctttgggaggccaaggcaggcagatcacttgagctcaggagttcaaaaccagcctgagcaacatggtgaaaccctgtctctacaaaagatacaaaaattagctgcgtgtggtggtgtgtgcctatagtcccagctacttggggggctgaggcaggaggattgcttgagcctgggaggtcaaggctgcagtgagccaagattgcaccactgaacttcatcttgggtgacaaagtgagaccctgtctcaaaaaaagaaaaaaattacttaggtgttagtatattatctatcatccaatttcagtcagctttgactacacaagataagataatcgataatctctcaccattttctattaaagagcagatcaatgctctgataaaacctggttgttccaacacaggagcccagactctggccttacatgagtgtgcttttgatattaatacttaagttttagaaaaacttataaaaaattccttcttttttttttttttttttttttttgagatggagtttcgctcttgttgcccaggctggagtgcagtggcatgaactgcctcactgcaacctccacctcccaggtacaagcaattttcctgccttagcctcccgagtagctaggactacaggtgcacaacaccatgcccagttaatttttatatttttagtagagacggggtttcaccatgttagccaggctggtctcaaattcctgacctcaggtgatccacctgtctcggcctcctaaagtggtgggattacagccatgaaccaccgcgcctggccatttccttctgatttttttttttttttttttttgagattgagtcttgctctgtcactcaggctggagtgcaatggcgcaatctctgctcactgcaacctccacctcccagattcaagtgatctcctgcctcagcctcctgagtagctgtgattacaggcgtgcaccaccacacctggctaatttttgtatttttagtagagacggggtttctccatgttggtcaggctggtctcaaactcctgacttcgtgatctgcctgcctcggcctcccaaagttctgggattacaggcaggagccaccacaccctgccatttccttctcattttaaccaatttgatcacatacaaaatgtcttttgtgagattaatcttccacagaccttctagaatttgcttaaatcttcagttttgtcctatacttcctttttattttggcattctaccttaggacaaaaatttacttcccttttcccattatcattttgactacacaaagttctctctcatgcaaaagaaaaattactctctttcaacagtctttaccaaaaacacatctgactttatacactctgtaaatagaactgtttcttttatatcaagtagttttaatcacatatgttaactacaattttcactcttagtaacccaaatttccagtgaaaaacctaggaagtaagtaatttttagctgttttctaccagcatttgtagatgaaaataatttcataatttctagaaagatggctcctcaatttttttttgttaacagatcgaaatatatttagcttttctataccatataaatgattcagacgttttataatgacctattacttcatttaacataacatgatattaagttactgaaaacaatttttgtttgtttgtttttgagacggagtttcactcttgttgccctggttggagtgcaatggtgtgatcttggctcactgcaacctctgcctcctgggttcaagtgattctcctgcctcagcctcccgagtagctgggattacaggcatgcgccaccatgcctggctaattttgtatttgtagtagagacggggtttctccacgttggtcaggctgtctcgaacccctgacctcaggttatctgcctgccttggcctcccaaagtgctgggattacaggcgttagccaccgtgtccagcctgaaaacaacttttaaaactatgaaatgttcatttataaactttgatctcatttacatttatttaattttttcattcttaacaattttgcctgaatagttcattaaacaaagctagccaccatcaatttatttctttgctaatcatttctatagcctgtgaatgtcatcctcccaagcagctggaacttgaggcattctccaccatgcccagccaggttttttgttttgttttgtttgttgttttttggtaaaaatggggtctagctatgttgctcaggctggtctcaaactcctggccttaagtgatcctcccacctcagcctcctgagtagctgggattacaggtgcaagccaccatgctcagctcttgaatttcattacgtaaggttgacactatgaatattcattttgcatccacatacccactttcctatccattcacccattattcattcatccatccatcattcaccaaacatctattcagcatatattttgggccatgagtcaaagaacagatcagatccttccctgacctggaagagttctctggctggttgggaaagaagctagcagcacctgataattgttttttttttggggggggggacagggtctcactctgttgcccaggctggagtgcagtggcatagtggcatgatcatggctcactgcaacctcctgggcttaggtgacccgcccctgacctcagcctcccaagtagttaggactacaggtgcatgccaccatgcccagctaattttattttattttattttattttattttattttattttattttatttwattttttgtggtagaggcagagtctcactatgttgcccaggctggtctcgaactccttgggctcaagtgatcctcctacctcagcctcccaaagtgttgggattacagacatgagccaccatgcctgaccagcccctgataattctgttcaattcagcaaacacttctggtcacaccctgctccctgtggggagtgagaacgaagcgagcctgccctcaagaagctcctagtcaatggggcagccagatctgggcccagcagctgagtgtaaggccagctgtaagaaaggctaagatggagacgagatcacacccttggggaaggagagtgcagagcagactttggggaaaaaagcaatttcaaaaagcagagatatggaaggtgggaagagcaggaagcatgaaccccactgacctctcacgtagtccagggccagagggtcacagactccctggaatgtatgtttcatgagggcagcacctggaacagggcccagcacataataggtgctcagttaatactccataagtagatgttctttcccaraccccaagctgtttgccttaaagtcccacttgaaaggctggaaaagcaagtcacaggcaagacttgtcctagataaagtaaagtgtgaggaaggggtgcaaatcaagattagaggcatacctgatgtggacctcygaggatcagagatgtcctagtcccagctcatccaccaacttgccatatgactttgggcaagttacctcaccttcagatgcctccattggaaaagaatacaagggtaagaggaggtgacccctgtggggggcctgttatttggaaagtgacagtattacgacttttttcctaactccctcctgtacagaaactcagccaagaatgtttaaagcagctggcaatcaagaagcagcagcacattgacaacataacccagatagaagatgccaccgagaagctcaaggcaagtggacatttcttcctcatacccatggaaagacccacatttccccccagacaaaagggacccccaatatggagccaatgaaaataaaaaccaactgcgaaggggcagatggtggggcctggagcttctataattcagggttctttagaaaaagaacacaaaattacagacaaaattaggtgcaagaccatgaaggggctctgcaagtgaggggccctgagctccggtttcctttgctttgtggcaaatctctggttccttagtgtcatctgccagtctcttggaggaattagcccattatcccaaattgccttaaacaaagcaaaacacagcttaaggaatatgcagatatctctttaattccactgccatgctgaaagaaagcaagtagggtaagatctgttccacaaataggtactttcttcactctcctttcataatgatgtttgartggattctctgtggattttgaatgggaacttgaggctgatgttattctaagtaaccattttgacatgacaaagttgttgtgtttttagggcctcaggggctggtcatttccccttgcatcctccgttgctccctccccctttcatcctgttgctccctccccckttcatcctctgttgctccctcctccccttcatcctctgttgctccctcctcgcagtgagggctggggtgggaggccctcctggggcctgccccactgagagctggaagaacccctgctctgcactttgggaggccaaggctggaggatcacttgagcccaggagttcgagaccagcctaggcaagatagtgagactcccatctctactaaaaataaataaaataaaatagccaggtatggtggtgcacgcctgcagtcccagctgtttcagaggctggggtgggaagatcgcttgagccctgaagcttgagactgcagtgacctaggatcacgtcactgtgctccagcctgggcaacagagcaaaaccctatcaaaaaaaaaaaaaaaaaaaggaacccctgactgattcacacaagaggaggagtggctgtgaccatgggagaagctggcacccagtttctcctgtgaccaggccaggccacagaattggctcccacatttgcctaaagtccattctctgtcagttgtcttcatgacagtttgccagtaccctgaagacgtttgtagttcacacctgtggtcccagcttaatagtgtctctcatgtcttcacaagcagaactctgggctaggagatagacagtaccaaaggatttagaaagtgaaagctgtcacgttggaagggttgtggggaggcctgaagatcaggctccctgtctgcaaatgcctgagcagatatggtttgagggcccccaagaattaggacccatgtggagggtctagtcttccccaggccacactggaagaattgtcttgggccacacataaaatacactaacactaacaatagctgatgagctaaagaaaaaaaaaatatccaaaaaactcatgatgttttaagaaagtttacaaatttgtgttgtgccacattcaaagctgtgctgggccacatgcggcccacaggctgcaggttggataagcttggcctgagggatggcctggggtaggtttcagcttaatctaagccatggttctctttctcttgaccctttscccaactaactttttaactttttatagatttagaggaagttgcaaaaatagtagagttttgtgtaccttgacctagtttgccccaagggttacttgttacataactatagcacactatccaaaaaaaaaaaaaaaaaggatggtatgtgtgtatagttttatgtcaacttatcacatgtatagatttgcataaccaccactgcaatcaaaatgcaggctattccatcactgccaagttctaccttcttctaggccaagcgaggtggctcatgcctgtaatcccagcactttggtaggctgaggcaggcagatcatttgaggtcaggagttcgagaccagcctggccatcatgttgaaaccccatctctactaaaaaaaaaatacaaaaaaatgccgggaatggtggcgcctataatccaagctactcagaaggctgaggtgggaggatcgcttgaacccaggaggtggaggttgcagtgagccaagatcatgcctctgtactccagcctggatgacagagcgagactccatcttaaaaaaaaaaatctacctacacctttatggtcacctccctacccacygtatccccccgaccaatccctaacccctggcaattattaatttgtttgataattgttgcatttgaaaatgtcataaaaatggaaaatgatcttttgaggtatttttcactcagcagaatgcccttgggatccacccaagttgttgcaagaaccactagttcattcccatgtattgctgagtagtaatattccactaatccgatagtatgcatgtaccatagaggttttttaaaccatttacctattgtaggctgtttggtacagtctagggctattgcaaataaggcttctttgaacagttgtgtccaggtttctgtgcggacataagttttcatttatctgtgttagatgcccaggaatgctattgctgggtcatatggcacctgcctgttttgttttttaagaaactgccaaacgcttttccagagtggttgtgccattttacattcccaccagcaatgcatgagagtgtgtttttctgcatctttgacaacatttggtattgtcacaagtttttatcttaacttgcataatctgtgtgtagtgataccttatcatggttttaatttgcattcccccagtagctagtgatgttgagtatctattcatgtgcttgtttaccatctctacaaaaaactaaaaaatcatccaggtatggtggcacatgcctgtagtcccagctactcaggaggctgaggtgggaggatcgcttgagctcagaaggttgaaattgcagtgagcaatgaccatacccactacactccagcctgggtgacagagcgagaccatgtctcaaaaaaaaaaaaaaaaaagaagaaaagaaaagaaaaagagtttgttgggattttgataggaattgtgttaaacctgtttatcaatttggggagaattgacatttttactatgtattcttccaatccatgaatatggtatatctttccatttatttagatctctgttttctttcatcagcattttgtaattttcagcatacaaattctgtatgttttgttagactaayacctaagtggccttcataaggtaataagaaaaatggaattaatagtcagcattttaaacctgagacatatttgtataaaaatttatagttaggaaattagaaagatattgccaccctatgcctgcactctcatgtgggggcagatggagctgagcaatggctactcccatggcatgggatctcccagctccaccctgcccacttccttcagtgttaacaacctggctcctgtgagcatttatattcaattcctgatcaagaaacatatttttaaaaattcatccataatcctgcatcctgccacttcaggccaaccattattcacattttgagatttttttcctgtatatgcatatgcttttaatgtagcttgagttatattgtacatacaattctaatatatccccaatctggaggtgaggcatggtggttcattttcttgtgtggtttgtcacgtgtattatcatcttgtctccagtagctatttaccatagatgtccaatacactgtggattgtgagtgtgccccttcagagcactgtgacatgagcatcttcaggagatgctaagagtttcagtagctccagactcattttcatattatttttcagttttgagtttccgtgaatttggactccaaccctgcttaatgcaaaactgttgttttatttgttttgctggtgattttcttttcacctgtgaccctggatgaatgactagattcctcttcttttccctgggcccgggggtggaktttttctggtgctagttgatggatggagcagctctttgtggatctgacttgatgcaggtcactcctttccactctcagctggaatgtggccaggtactctgtgctccccctggatggccaggccccattgtggctttcgtctgcatgcatgcacctctggctccactccttccaggtcacttagcttcagctcctgccaggtcactcacactgtgtttcctctttggttttggcatcagtgaatttactttgtttgtttgtttttttgtttktttgtttgttttttgagacagagtctcgatctgttgccaaggctagagcacagtggcgtgatctcagctcactgcaacctccgcctcctgggctcaagcaattctcctgcctcagcctcccgaattgctgggactgcaggtgcccactaccgtgcctggctaatttttgtatttttagtagggatcgggtttcactatgttggccaggctggtctcgaactcctgacgtcaagtgatcctgaaaatgcagtcggcggggctcagcccctctgtcctacagagcagagccggggatgggcaggaaatgggcctgagacacaagggcccagcctggcaccagacccagaacccctgcgggtggaataaggagcctcagttgctggctccatgcctttctctgtgacccgcaggagctgtagggactgagccaaggcttgggatcaaggcaycaatggggggacatgaaccagcctttgccagactgggaacaaaaagatggggaccctgccaggccatgctgctgacaaggccactggtgtccattgcccctgctgggcatggccactccctgcctcttcctgcctgccattgccaccatagcagagtctaaagagtccccatgctaacgtggtctgggcaaggttggacagcatgccttctttccctggtggtgcatcccatgagaggcatccgtgggagggttgttggaagtcatactgagttttcagcaaaacagcgccctcctttcatctcctcactctccacaggacccagaggtggattcacacagcagcccacactctgagtgcaaaatcccccagccttccctgaccggggcttcatggctgttcagcttctttctcttccacagtccttagaccctgctcagctagactctgttaggccctcacccagccaccagctctcttcaaagcccagcccagttcagctgggatcttcactttgaaccartgggacccaaaccagatggcgtacttccttrtttcatgaccatgatattctcttgctctctttctctctctctctctccccttccctctctctctctacccctttctgaccatattgcataatcagcctcatctgcttatacaagaagttttctggtggctgttttccatactggttgccactgtgctgagagttagaacaaggtatagcgtcgtgaagcttcttttgtattttctactttacaaagtggatctataaaaactrcttggagcataacttggttgggaggagatatttgctctcttggtttctctgcaaaggtcctctgtgtacttacgttgcttcaacatgtgttcataaatcaagagtttgaaatacattttattttcttcatttgatcattcagtaaatatatatttgtgtccaggctcattgacccattgcaaccataaaaatgtggactaattcccaggctagcttaaagctataatccataggcctgtgtatgagctagcctctgaacctatccataggcctgtggtatgagctagcctctgaacctatcctctgcctggagcattggataggaaacacagatttagagaactcatctcctgtttgctgccaaaccacatgctgtccccctgagaacacggtatcacgggagcctgcccacccctcgtgactggctgggtgctgggktcattctgctatgtggactgtgcagatgtttgggctgaggaagggagctggcctatgtttaattttttttttttttttttttgagacggagtctcgctctgttgccaggctggagtgcagtagcacaatctcggctcactgcaacctctgcctcccgggttcaggcgattctcctgccttagcctcccgagtagccaggactacaggtgcccaccaccacacctggctaattttttatatctttagtagagacagggtttcaccatgttggccaggatggtctccatctcctgacctcgtgatccattcgcctcagcctcccaaagtgctggaattacaggcgtgagccaccgtgcccagctttagtgtttttttaattgtataaataatacatgaacaaatkgtcattttttaaaatttaaacaatggtatagtatggaactacataaggtacaaagtgagagcctctcttttcccttacccccaatcccatgcctcttgccaaatatgaccactactaacaaacattttaattgcacttgcaaatatatagatgtatacatatgtccatatacaggttttgttttattatgttttacataaatttggattatcttgcttatattattctgcagcttgttctttttcacctgttttttttttttctggagaactttccctgccaggacatataggtctactgcattgttttttgttgttgttgtttgtttttggagayggagtctcgttctgttgcccaggctggagtgcagtggcatgatctcggctcactgcaacctccgcctcctgggttcaagcaattctttgccccagcctcctgagtagctgggattacaggcgcccgccacacgcccggctaatttttttgtatttttagtagagacagggtttcaccatcttggccaggctggtcttgaactcctgacctcatgatctgcccgcctcagcctcccaaagtgctgggattgcaggcgtgagccaccgcgcccagcctactgcattgtttttgttgttatattttcttcttctttttttttatggtgataaaatatacataacataaaatttgccattttaaccattttaaagtattcaattcagtggtatgaattatattcacaatgttgtatagccatcacctgtgtctacttccaaaactttttcattatcccaaacagaaactctgaaaccatcaagcaattactccccatttcccctctcccagcccttggtaacgtcgactctactttctgtctctataaatttgcctggtctagatgtttcacataagcggaatgataaattatttgtccttttttgtctggcttaattcactggggatgatgtcttcgaggttcatccatgtttagcatgcatcagcacactgcattctttgtaatcgctataaattatttcattgtacgaatgtaggacaatttatataatgaaccgatatacatatcccatattgaaaattgtgccaaatatgtcatggttaacaactgtctgaggctggtgcacaggggaataaaataatttaccaaaacagcattgagtttagaaaggcagatttatttagagaaaagggggagatacattgaaagggagcaatgggtgagacagcagaaagaagactgtctgcaaagaggcaggagctggaggtggagttttctaaggttgtgctgcttgagctgaatgcttgcagacaggatgcctgggtgcaggtggactgtgagttgagtgcttgtaacaggatgcttgagtgctagtgagctgtttgtggttgaccctatttctcagaacgttcrctccccactgctgttgtttctgtttctgctagtgacgcccatttttcaatgtttttttcttttcttttttttttttttttttgagtcaaagtcttgcattgtcgcccaggctggggtgcagcggcctgatctcagctcactgcaagctccacctcccgggctcaagtgattctcaagcctcagcctcccaagtagctgggattacagacacctaccactacacttgcccaattctattctctatgtgtagaagctatatactgagaatcttggtacacaaatcttcatgcacatgtgaaagcattttctaggatataagtaaagtaagaggaattgctgcatgaaagaataaatgtatttaaaactttgaggccaggtgcagtggctcatgcctgtaatccagcactttgggggaccaaggcaggcagatcacctgaggtcaggagttcaagacccagcctggccaacagtgactccctgtctctgctaaaaatacaaaaattagccaggcatggtgatggccacctgcagtcccagctacacggctgaggcaggagaatcgcttgtacccgggaagcggaggttgcagtgagccgagatcttgccattgcactccagcctaggcgacaagagcaaaacttcgtctgaaaaaaaaaaaaaaattgatagctattgtcgtattgtcctctaaaagcgaagtaccaatagaccctaccacccacagtttatataaatgccctacttcacatacccttacagactgtatttcagtctcttaaaagtcttccaatctaatgatcaaaaactattttctgggctgggcatggtgtctcatgcctgtaatstcagcattttgggaggctgaggcaggtggatcacctgaggtcagaagttcaagaccagcctgaccaacatggtgaaactccgtctctactaaaaatacaaaattacctatgtgtggtggtgcgtgcttgtaatcccagctactcaggaggctgaggcaggagaatcgcttgaacctgggaggcagtggttgctgtgagccaagatcgcaccactgcactcagcctggacaagagtgaaactccttctcaaaaaataaaaataaataaataaataaataaaaattgttttgtatttcatctaattgatttattctttgggctttatgtacagtgttttagtttaactggaccttctcttttgtttgttttccttaacctttcattgtggaaaatctcatattattttaattatttttacttttatatttttagtacaaaaaatacaaaaatttgttctaaaatgccactgttacaccacacatacacatacatacatttccatatataatttgagttcttttaaaagctctttattttgtacttttgacctcttatctatgcttgagccacatggttttagatcctgtagatttattgttttgttatcagataaggcagataaggcagataacctcttatcagttttctctttattgatttttttaaagcaattttggcttttcttatgcttattctctctcctaatgatttaataatttttaatcagcatgttaagattttgattagaatttcatcaaatttatagactaatttagagacaaatagtgactttatagtaatcaaccctcccagtcacgaatatggttttgtattaggtatatttccacatattttgctattttttctcccattttcaaaaggatctttatttctccgtgcattttacgatcggtgatgggctggtgcttaggaaagctttggtttttataagttgatcttgtgtctgactggccactttactgaactcacatttcagacgttatgatttttttcatgttgattattctggatttcctggttggcagacatgtcatctgcaactggtttttctgtttttaggctaatgcagagtcaagtaaaacctggctgaaggggaaattcactgaactcagattactacttgacgaagaggaagcgctggccaagaaattcattgataaaaacackcagcttaccctccaggtgtacagggaacaagctgactcttgcagagagcaacttgacatcatgaatgatctctccaacagggtctggagtatcagccaggagcccgatcctgtccagaggcttcaggtaatgctggggtcactgctcttactgctgccacctgccacccacacttcatctcaagtattgtggcattgagcacagtattgacacactaagcaagtacatggactattgtcttgtcaccatgtagactgtcttgcccccacacaggtggtcaagagaatatacattgttaggaagataatacacctcttgggctaattaaataatattaacagccaccaatttcaaaggcccctgtgtcctgagcactgtgtagtttagcactaatattcaccagaactctgcaaagtgggctcaccccattttataaacaagaaattgaggctcagtgaagtgactcacctggtctcacacagcaggtaggtagcagagctggtatcaggtctggctgtctgtctaggtctgtctgactctaaacccacaagggaccctgcctggccctctgactgtacagtcttttttttttttttttttttttgagatggagtttctctcttgttgcccaggccggagtacagtggtgcgatctcagctcaccacaacctctgcctcctgggttcaagcagttctcctggctcagcctcctgagtagctgggattacaggcatgtgccaccatgcgtggctaattttgtatttttagtagagacagggtttctccacgttggtcaggctggtcttgaactcctgacctcaggtgatccgcccacctcagcctcccaaagtgctgggattataggtgtgagccaccgcaatcagcctgcctttatagtcttaaattgagacaccccacctgaaaaggcaggtgtccttgcagctactgagcacatttcaaaggctgagtcacagctggctcaatggtactccttggccactgggctttgttgaggaagagtctaagaaatagcccctgtggcagatcacttgaggccagaagtttgagaccagcctgaccaacatggcaaaaccacctctctactaaaaatacaaatatcagccaggcgtgatggcgtgcacctgtgaggctgaggtgggagaatcacttgaatcggggaggcaaagattgcagtgagtaacgagatcatgccactgcactccaggccgggtaacagagtgagactctgtctcaaaaaaaagaaaagaactagccccagggatagtcattgctacatttagagaaagcatgttgttgaggatggtgttcctgtctacttttttctttttttttgagacggagtcttgctctgtcgcccaggctggagtgcagtggtgtgatctcggcttacagcaagctccacctcccaccattctcctgcctcagcctcccgagtagctgggactacaggcgccccccaccacgcccagctaattttttgtattttttagtagagatggggtttcaccatgttagccaggatggtctcsatctcctgacctcgtgatccgcccccctcggcccctcaaagtgctgggattacaggcgtgagccaccgcacccggccgatggtgttcctgtctttagggaaccgtggaagaaactgttgtctggtgtcaatatccctgtgcagtcacttctgcactagaattgcttttccactaatagagctcctcctgtttccttctttgccttgggaagttcagagccaaatctgctttgactaaccagactaaggcttcatggcaaacactttgtgtctaattttctcttagcttcatttttctcgctataaagaaaaatcttgccttattagaggaccttcacaagacactttaaaggctgtgggacaaggcagggtacaactaaaagtggcaccaactctaaccacagattagtatgggctctggctggaaaataagacagacaaataagccagtcaacacaaaacccgccaagccagtctccagctggggatttccactcttgtgtctttatgtggcctcagtcggttcagcctgtgtctcattgtcagctgtttgagccaaattctggatgaagtgttttcctaggcataatgggtgttgtgctttaagagaggcaagatgcacaaagtgttacatgtaattgtctctttttaaataatggtcgtttttaaggctatggaatacaaaggaatccttccatggagaagcatgctattctcacatcagaaaacggtttcagggctttgtcatctttttttttcaaattctcttgggccacagctaatgattttaatcattcaccgttcccaccttctatgtgttcattcgtttattcatcaatatgtactgagccaggtcacttgctggacattaggagctcacagttgggtgggggacttgctcagaaacagttatttacaatacagcttaaacaattttgtaaatatgaagctagcaaaattatgtccaagaaatgtctgacactctctggctgggagaaggatgcagtctgggaagacttctaggaagaggtgatggtagggttgggtgctggacaatgagtaggagcacactgtatatagagaggacgcagagaggacagacaggaactgtgtacatgtgagagcttgacaggctggggaaccagctggggtgcagcctgacttgaggagaggtgagggtataagggtggggggattgagagacacagctggatccataggccatagttagttcatgaaggccttatgtgccatggagttcagactttgtcctgtaatgagataggagacaggaatgtttgtttgtttgtttttgagacagggtctcactctattgcccaggctagaatgcagtggctcaatctcagcttactgcaacctttgcctcccaggttcaagggattctcctgcctcagcccctggaagagctgagacgacaagcacgtgccaccatgcccagctaatttttgtatttttagtagagacagtgtttcaccatgttggccaggctggtctcaaactcttgacctcaagtgatctgcccaccttggcctcccaaagagctgggaggtgtgagccactgcacccagcccaggggagtgttttgaactgagggatgaaagcattcacatggtcagattagtgctttagaaaagtcactttagagatagagtggaagatggacagaggaggccaggatgggaggctggaagagaacttgggaggaggccacaatgtccaggagagagatgatggtggcctggaccaagacaggggcagtggggatggggagaaacaggcaggtcaagagatgccacaggaatggagattggaattggagaatgggtaggaggaatccccagatgatgcctgggtttctggcctgagagatgaagggctgggatttctgttctctgagtctgcaaaggcaaaaaagtggctgtgctcggtttcatgcattgatttattccatcatacatatgttttgagaacctgtgtgtcaggtctggtgctagctgctggagtttggggttaccaggtggtgccatgtgtcctctatcracccctcatcctaccctactcatctgccctctgagccccctctcgcctccccggagctgctccctgcccaccctggacttcctgctagtgcttggtctcccctggccagctccattccagcgctctgggtgtgaccttaggcctggttccccaccaaaatgaggttggactctatagactcctggcctcctaggctgaatggggcttgcaggccatctcacagccccctcccaatgtacagcatgctgccaggtgggatctgcccctgcccaacagccaagtgctaggccaccctccctccctcctgaggccctcatctgtccaccccttctcgggtgggcagcactgccactgccagccaagcctgatcacctgaggcagtcatcttccttccaactcctggccaggacagagcttcagaaaatgcagccatggttcttacctgcaaacatgagaatccactggaactgttttaagcaagaaaggagtttatggaagagtatgagatagcccataggatctccaggagggccagagagtcgggatggaagatgggcagcaggaatgaagtccagactccagcaggggttggtgccagtataggccccacggcacccctgctgggcaagacatcaccactcacaccactgaccagagcccccaccactgctgtccctcagtgccacatgccaccatcactaccttcaccgtcatttccaaatccacgctttggcttggaggcgtctggtcacactcctgcagcacaggtgcaaagggagctgggagagggggttttctagcttctccttagtgaagccacataccacaggaaagtattgaagaggggctgtccaggtgcaaaacaggacacatgtcccctgcggtggccacaccccctcagtcagcactgcagctgaaccttgctggcctttggcgtccttcttagaacatggtttcctgctccacctttgaataagctccaggtgctccttccccagggagactgacctctcaccctttttgtacccaaggcagacccgtggcgcagtgtgtgtgaggctgaagcctctctgggaagggccccgtgtcagcctgaccctgccttctgcatgcatagctggcacagagtaggtttcaatgaacacgtaaggaaggaaggaaaggaggaaggatggagagggaggaatccccagtgccagcactgaaaaaccgcacctccgcatggctcccacctcagggatgccgtatggtctctccagggctctgctcctgcaggcatggcctgggctgaccataggtgccaggccaacgtggagcctgggcatgctggtgtgggtttgttcctgggtgcagcacaggagkctgggatgctgcctgcatctcccagagccaccctcacccccgtgtgcccacacaggcatacacggccaccgagcaggagatgcagcagcagatgagcctcggggagctgtgccatcccgtgcccctctcctttgagcccgtcaagagcttctttaagggcctcgtggaagccrtggagagtacattacagacgccattggacattcgccttaaggaaagtaagtcgccgagtgaccaactttgtgtccttaactcccctagtgtcctttagcccagagacgaatgcaaagatcatctccctacatcctgtctctcccacactgaggcccttggctgggcggtcaggggctcctgggcctggtgcccaacccaccctcaccacttcacctccaacccttcctgagactgagacctgcccttctccagtcacactgccctgcttctgcccctcagattgctcctgggagcctgccacatctcagccttgctctgggctcccagctggaatgaccaactcttcctccttctcttcctctggctggggccaaggcctggcaccccttcgaggcagactggcacagctgcgcccacctgggaagccctttcctgccagcccagccctgactcactctctcctttagccatctcccctctcccttcccgctccagggcctgcccatgtcctgctagagggtgctcatgaagtggatacatggacccccctccttgccccttgtaagcacgtgaagggcagaaaccagctttaggtccaactctgaggtccccccagggcctggcacaaaacatgtactcaaaaatatctgttctttgattcatttatgcattcattcattcattcacctctgctatcatgattcattcagaacatttatcaagcccctcttatatgccaggcatarcagggcacaaaacaaagctccttctcctcttttggtgctcacagtcttcgtaggggaagacagaccgtacacaaacatgtcaggtgacaggaactgctatactgctataaagaataataaaggccgggcgtggtggctcacgcctgtaatcccagcactttgggaggccgaggtgggtggatgatgaggtcaggagtttgagaccagcctggccaacatggtgaaaccccatctctactacaaatacaaaaattagccaggcatggtggcatgcacctgtaatcccagctactcgggaagctgaggcaggagaattgcttgaacccgggaggtggaggttgcagtgagttgagatcatgccactgtacttcaacctgggtgacagagcaagactctgtctcaaaaataacaataataataataataataaaccagggcaggatggaagacaggaaagtgacaaggaggaggagctgttttatataagcagttgggatggcctctgagaaggggacactcaaggtggcccaaaggaagcattcattctgcaggttctgtgggtctgaagggccagagagcacagtggtcataggcacggcctctggagctaggcctcctgggttcctatccgaggtctaccacttggaaccctgctgaaccctgccatcttagacacggctcctcccttttccatgcctctgtttctgcatctgtaaagtggagaccataatgcagtcgcctctcctgggctgctgtgaggattaaatgagctcttacacatatagcgctcaggcatattaagcaccacgtatgtcttggcgattatgattgctgctgctgttacgtctgggggaggtattctagacagagggaaaagcaagggtggaggtcctgaggcgcgatgggagtgagctggccatatcgaaggagcagcaatggggacaacaggagtggacgtagggtcacaggggagagaggaaagagatcagaatccaaggatttggacgtgggcaactcgcagaaggaaactgtcattttctgaagtgagaaagagtatttaggactggagggaatgaagtgaacctgttagatttgagaagttggacttcccatgtggtggtatcgcctcggcagtaggacctatgattctagagttctggggagaggggagaggcttttgccttgatgaaagaacaacttcagccaaattaaatttaaaggagtttaaatgagcaatgaacgattcatgaatccggcagccctctgagccacagtgcactcagagactccagcacagccacgtggtggaagaagatttagggacagaaaaaggaaagcgacgtacagaaaacagaagtgaggtacagaagcagctggattggttacagctcggcgttcgcctaatttgaacacaatttgaacagttggctacatctgattggccaaaacttggtgattggcacaagtgcaggctacggtctgtttacacctccacttgttattgttcatgacgtacagaaaaatatktaggccgaacttaaaagatgtaaggaggagctttaggcaaaacttgatttaaacagcctgcaggtgggcttcccacagatctctacaggcccctgtgatgagtgctgggagtgatgggggcggaaggcacttctgcggaggtgctgagtgagctgcggccccaatagctgggaaggaggcaacctgggcaaggggggaagggtgtgggggggctgtccaggcagagggcacagcaagtgccaagggccctgggtgcccctgctgtgcccgcttgttgggatagactcccctccttctttctttctgagcactcagaccttcctgaggactcagctctactttcttgttttccatctttaccctggaatctgcacatcttccctgagtcgccgcccatccttgagtgttggatccagtagttgttcgcgcctcagctcctcctcctatttaggactctcccacaccagccttgtcatcctggggttttcctgtccctgtgaattcacataaatcccttaaatctgcctggctcttgggcgagattatgcgaatctccagttgtgtggtatttttagcacgtcttatttgtctgcttgcataagctccgggcgctcatttctcaacaattccttacaggcataaactgccagctctcagacccttccagcaccaagccaggtaccttgttgaaaaccagcccytcaccagagcgatcgctattgctgaaatgtaagacccccgggagtggggatagggtggagacggtggagatggtgggatgttgggtggaggaggatcatggaaatggaggtccctctttttttctcattagaatttatttatttatttattttaagaacttgttttttaaaaaatgtttattattaaaggcaataaaacaatacatgttcattgtagaaaaattagaaaatgaaagaaaaaagttactcataatccctcttctgtgaataactgctattattatttgtccttttagcttttttagcacatctaatatgcatataatgatatatttaatatatctttttatgttacaaacgtggtgtcatactatacatactgttttgtcatctgttttcatttactgatatattatgaacatatatatatttgggatttatacagtgagccactgtgcccagctaatattatcactatgtgtgtgtgtgtgtgtgaccgagtcttgctctggagtgcagtggtgcagtcatggctcactgcagcctcgacctcttgggcacaaatgattttcccacctcagcctccctcatagctgggactatcagtgtgtgccaccatgcccagctaattttttatttttatcattgtttttagaggttgcatggcattgcattgaatggatgtgtcatatttagccaatctcataatgttggatgtttacattttcatttctaaaacaatgctgtaataaacatccattcttgtacacatttgttgaattgaattaatgaatgagagaatgaacacaccatacctcattttcagattattttttaggagtaatttctcaagtggaattactgggtgtcaacctaaaaaagactcaatctaaagaaggctcagtatccagttagcagagtttattcaagtgcaaagtaaccatcaggagacagagggaaaccaaagaatggtgatcactgcccctggtgttgggagggggacagtgaatatcaaaacagaggcactgaataaatttacattttccatacaaaggctaacatactgatttaaaggccgagcacggtggctcacacctgtaatcccagcactttgggaacccaaggcaggtggatcacttgaggtcagcagttcgagaccagcctgcacaacatggtgaaaccctgtctccactaaaaatacaaaaattagctgggcatggtggcatgcaccagtagtcctagctgctcaggagactgaggcaggagaatcgcttgaacccgggaggcgaaggttgcagtgagccgaggtcgcactactgcactccagcctggcaacagagcaagactccgtcttaaaaaaaaaaaaaaaaaaaaaagtgcacaaatcaaaaatgtgcagatcaatcagctcaatgattttttaaaaaggaaacatattttgtaaccaccttcagatcaagaaatggaaatttccactccccagaagtcttcctcatgtgccttcttgtttactatccccaaaggggatccactctccagacttctaggactataggttagttttacctgtttttgaactttcagtagatcattcacactatacccttctgtgttttgcttctttcactcaatatgagatttatccatttttgtatattgacatactgagtggctgttataaattcacttagtacttctaagctatctacagattatttgggtttttgtgtaaataagcatgtcacctatgaataataatctttcatttccccgatctttattctttcctttcacttctttttcgtgccttgagttactgtctactacatttagaacattgttgaatagaagtggttataatgagcagcattttctcccaccttagacatatatccaacagaaatgcatacatatgtgaatcaaaagacctgcacaagaatgttatgtgaccgaaacacaggttcagttgctcaacgctttgcagagttcaattaacaagagcgaggtctggtataaagaaagtggttttattctaaagattagcttaggggaagaggtacaggctcctcctgcccttaacggtaccgcctcacttttggggcagaaagcagaggcttttaaatggggactttgtatgaatggcatgcagggaaggagcaagcagatgggggtctatatgactcattttgatgcgttttctaccaagtggttgagctggtgccattgagggcagaactaggttgtaatgtggccgttgtcttgagatgctgtccgggtggaagagttctgttgaaggcatactttatgttgtaaattgactgttgtctcttaaggcaatctcctggtgggagaaagttctggttctagaccctctaagtaggtagataagtttgccctgtagggactatctggtgaagggaaggtaatggttataattacatttctaaagagctaagtagaggcagggcacagtggctcacacctgtaaccacagcactttgggaggctgaggcaggcggatcaccggaggtcaggagatcaagaccagcctggccaacatgatgaaaccctgtctctactgaaaatacaaaaattagccaggcgtggtggcaggtgcctgtaatcctagttactagggagccttaggtaggagaatcgcttgaacccaggaggccgaggttgcagtgagtcgagatcacaccactgcactccagcccgggcaacaagagtgaaactccatcttaaaaaaaataaaaataaagagctaagtaggaagtgggagacaggagaaaaagggggaaaatcttaaaaataattcattctctttctcttagaaaaatgctctttttcttagaaaactcagtctctgttacacgtttacagttatagcaacattagtcacaataggcaacacggaaacaatccaaatgtccatggaaaactgtttggccttgtttatgaaagctgaatatccacataccctgtgatccagacttaaaaaacaacaacaacaacaamaamaaaaacttcatgtgtacatacatggtgtaatgcaaagagaaatgttaatgrgagtttaaatcactacaaactttggggaggatagttttgcaatatgtatcaaagaccttaaaaaaatacccattgacccagcaattcctgttttaggagtatattctacagaagcaatcagatacgtaaaaatgtaattgtattagtggtttcaaaagctttttaaacggaggactaagttatgcgtccaaacatcaaaattttagaatctccactaaaatgctcttgtgaaaggatattatgatgtgtcaaaatgcctcacaagtagatcaatcaattttaaaaagcagattacctaacgtcatgtatggtgtgacaccaatattaagaaaagctataaaaattagccgggcgtggtggtgggcgcctgtagtcccagctactcgggaggctgaggcaggagaatggcctgaacctgggaggcggagcttgcagtgagcggagatcgcgccactgcactccagcctgggcaacagagcgagactccgtttcaaaaaaagaaaaaaaagaaaaagaaaagctataaagcagcaaggggaggggaaagataggaagtacacacaccctaatgttaacagtgataggattagttttaattaaatttgtattaattggcaacaaatttcacggcacaaaatacagacagtataagggatgtgcagcagagtgatctcttcttcccctttccccaagaccccgccccaggggcagtcgcggtttaaaggggtctgtcaccccttccttgggccatttccgcgcttcgcattttgtgatttgcacgtgcgttggtgggttcccgggggcggggcgccgcgctggccccgcccaccaggtgcgtcccttgtctcgccccctgcagacgcgcgcacgcccacgctggatcctgacacgatgcacgcgcgcctgcgcctgtccgccgatcgcctgacggtgcgctgcggcctgctgggcagcctggggcccgtgcccgtgctgcggttcgacgcgctctggcaagtgctggctcgtgactgcttcgccaccggccgccactactgggaggttgacgtgcaggaggcgggcgccggctggtgggtgggcgcggcctacgcctcccttcggcgccgcggggcctcggccgccgcccgcctgggctgcaaccgccagtcctggtgcctcaagcgctacgaccttgagtactgggccttccacgacggccagcgcagccgcctgcggccccgcgacgacctcgaccggctcggcgtcttcctggactacgaggccggcgtcctcgccttctacgacgtgacgggcggcatgagccacctgcataccttccgcgccacgttccaggagccgctctacccggccctgcggctctgggagggggccatcagcatcccccggctgccctaggggccaggaccggcgtgacagcctccaggtacgccgcagctgcccagtctcgcctaatctacctagatcagcgtggctggtccccttactgcctgcttcttagggccctctccctgccccagctttccccgaccaatcacgcctacagtgctttgaaggtttcctctcctaggctagtttcaaacaggccctaaacaagtctgctgctgccctctcatcagacctccgcaccctcaccccaccatcacttamactactttaatccagttccttcaaagtgatacccccacaggtaagccctcagcatcctgaatacatcatccgcagcctgggaaccttctccctcgtacagcacaggaacctgacacatagtaggcacacagtaaacgtttgtgaatgaatgggagtcatccagtcctgactcttctgtctcttgaggtcccttgaatcttccgcttcctccccaccgatttcagcgtgtccacatcacagctccctccagaagctgcaagagcttcttagcagttcctggtctgaaccctctcccagtcctcatcttccaccctaaaactagagtgatcttcctaaaacttcacttaacccctcagctatgaaaaggcttccaggagtttccatgaaataacaaaaaaaaatacaagcgcctcaccttagcattcaaggcttgtctagtctgcccaaaattacttatcctcacctagctcctaccactcttcttagagactctccagtcagaaatgtgtcgcatagttccacctccacacctctctgctgccagcacattcatgcagaaaagtcttttcacctgtctcagtcttccgcaggcttacctgcgccaggaagtctaaccaaggaacaagaatctcactatcagagccacaaatctgggacctgtctttccaactaaattggaggctttggaagggcagctttgtcctatactctctccaccctgaaaagttcccagaaagccccttccctcccaagcagtgaattaataaccagcaggtgcctatcactgagtaacagaagagctgagttaggcgggcctcacaggtcacccagccagatctcatctggggagtctgaggtcctgaaagaaagcagagctgcgtaaagttaccccggggtgatataggggggccagacgtgtgccccgttcacccacccccaggcaagcatctgacctgtcccctggcccagcccttaggcccagctttcaacctgcttactcatttctcaggggattttgggaaggaatcagcaggtgacagttgctaagcaaccaaagggggtggtgtttcccaactgtcttgggacaaaaagggtaagagcacccttagatccagatgttgccaaggaaacccagagtgcccagctgtctggaatgaagtgacagaggtagaaaacagtaggccctcacaggaggccaccttcgctagcagggagtgggaggcttctttccagggatttgtgtctccgttctgaaggttctgcgtcctgttttgtcaattccctagacggttttgaagttatattctgttaaagcatcttcataggtgcttggtgggaggccaaggtcgccgaatcctcgtggtttaaatagactttcagtgcattagtttgaaccatataaaactgacaattttcaatagtttttgagttaaaaatggcacttttgatatgagacaatgtagcagaataccaggcagacagaaccttgcaaacaccttaacttctaaccaaagactttaaaactctggctggacagagttttaagcactatgctgcaggaatcctgagaaaaaggggaaattaattctattaggaatggcccaaactgaattgtgacaggcagagggtgttcctgacagagggaagatgaatacacttgaccccaacatttctgcccatccctgatgaccaagacctcttcccagacccacagctgcaggggccaagtaataacagctcttaatagtttataatgcactgttttaatgctttacgactaaactcatctgatcctttcatcagccctagagggtagaaagttttcccaattctacacatggcaaaatggagacccagagtcacttgcccaaggtcgcacagctagtggtggagctggagtctgggcccaggctgtgagttccaggtctgtgctcatggccaccaggccmtactgctcagggtgaatgcagctggtctctggccagtgcctggtgctctggcccctctcgtggagctactgcccatgatgctttcctagtgcctggttactctgcgagacttgagtctacctttggactgccttccttgggggtctgagatgaggccttatggcccagaggggaacttgattcaaaaatttgggattcatgtagcagagacagagctagactgtaaaggtcacaaactagctgtgtcaaggcccgtgatagccagaaagcggcagtttcagtccatatcaattgtgtgaccagggctagtcactttttacttctcagtgccatctataaaatggggataatagcactacctaccaagtgctgtgaggctcaaatgagccaaaggttataaacttgccttaaaactatagtcctatacaaaaattagctgggygtggtggtgcatgcctgtaatcccagctactagggaggctgaggcaagagagttgcttgaacccaggaggcggagattgcagtgagctgagattgcmccactgcactccagcctggggacagagcaagactcttgtctcaaaaaaaacaaaaaaaacatatatactgctgtatcatgccaggatttatcagcattcccaagggagcttgcacggtactgaccgagtgctgagactactggtattcccagctgccatgtggcagcagcaggagctactagaatattctcagcacaggaatgaggcttccttggtttccatgtctgtaagggttactgatcacttaccttcttctctttcagacttgaatctgtagacatttctttattgatatggcaaattgcttgcagatatttttaaatgacagcaattttctaatatttggtttaataaaatgtgaataatgtcccttttaaccatggtcttcactgggagttcatgttgcttcaagtccctagcacccagtgatacccccacakgtaagccctcagcatcctgaatacatcatccgcagcctgggaaccttctccctcgtacagcacaggaacctgacacatagtaggcacacagtaaacrtttgtgaatgaatgggagtcatccagtcctgactcttctgtctcttgaggtcccttgaatcttccgcttcctccccaccgatttcagcgtgtccacatcacagctccctccagttcatgttgcttcaagtccctagcacccagacccagaagggcctttactcatatcttattccttacgcagccttctggtagtagtcagctgctccctgattaactatctccagggatggggcattcactgcttctgaagataactcattaaagttctcacttacgtgtaaacaaaccctgactcccacctgttcccatccaagatcgtattatagcttgaactcctggtctcaagcaatcctcccacctcagcctcctaagtagttgggattacaggctcacacaagcacgcctggctcacataccaccttctaacatattgtgtgactgaatcactatgctatggatttttatgcatctgcccccatctgaatggaagttctctgaggaagggattggggcttgttcatggccatatactctgtgcctaaagcagtgcctggcacaaagatggccctcaatatttgttcagagaaggaacacatgccatttccctctctttgctctgaaaggagtgctttcagcattttctgcctacaagatcctttgaccagtcctttctctgatgtggagtgactgctatacaatgccaactaaacacagaggccaagggcaggaaagggataaagacaatggagaagtaaagggctgtaaggaagtgagaatgaaggcttaaaggaaaggacatgtgcagccagctctcacccctctctgcagccacccagcaactggaggatatggactttgtttggaaccaccccttcttctggtgctctgtttataatgcactgttggccagtgcactaagctggccaacttgaaggagagattgcatcactggatctttttctgtctccagtgggctgacacagggcctagcccagaaacatctgctgtctaaggagcaggtggaggtggatgacagccaggtccctggagaccgccattcctgccctcgcctcactcaaacacacctgacagcatcagcaagggaactgagaattcagagaatggcactttatttttaagacttgatttttttgccatgattatctaccarttcttccatgatggtgtcatcctcttcaacagtgaccaggaccttcttgcccactagattaaagatgtcttcaggaggatagcctttgggctcacccaccttcacggtgagcatgtccattgttagaatggtgccttccggaattttcactttggccaccacagacttgcccagctgtggacaaaatgaacattcagtgccagcttcacagaagtaactagtgcacactactttactttacactcaaggtccctgatcagtcttccccaggcagtaccttgggagcaggcactcygttgccccctacactgctcagaatatctcatacatggcaggaattcaaccagtatagattgaattcagagactcagaggaggagcctttacaacaaagtgcaaaggaaagggctgaggctatgtaggcggagccaggttcaaatcccagtctgtggggtataggccacgttttagtttctctgtcaaatggaaacttatcctgtcagatgactgtaaggattggtgatattacagaatgtacgtggaacatagaatgctctcaatacatgcaaactctgattcttttggttaccattcagctcagtatctcattgtaaacatggggaaactgaggcccatacagggtgggtgacttggccagggttgcagacagccaagatgaaacataacatagggatgagattcttaactcctgacacaccgttctccagggcacacaccttaccgccactttgtttggtaaaatagaaatatgaaggactcataagatggtgaatgtggctgttatgcagatggcaagaaaaggagcccccgaggaaggggcagataatacaggcagatgagggaatgaagggtacctgaagctcatgaccagtgtttgtcttctctataaatgctttcaaataaattacgtgttttattactctatatcctccacgtaagagtacaaggaatcaattctgcttggaatgtggtgccaggaaaaaatgtcaagtgataatcatgcatcctgttatgttttactgtctgctcagagagccaaattaagtgctcagctgttataaatcttactctggtttctggtctrattctctcctgtttcctctataaagaaactatttctttttactttattttaatttcctggtatagatgcatctttgatttggggaagcaggtaggccccactagaataaaaggtgacaacagtcccaggcatgcctggtgtttggtctttgccttgaccccgacagcctacaggttaggtgtgtgtgtgcctggcagccccaggatgcctgcctggctctatgactcagaaggcaagaaggtccaggccacggcttccaggaagccctgatagtcagcatgccaggcagtgcttctaggcccaccagttcctctgtctgaaggtcactgttgcacaaggaatagctgcatcatcacccacccacctctgcaacgactcactgcccttcccaccagtgccaccctggcttaggaaatgccacaggctcttctggtacctcagggaacaccgtgcctaaatgtttctcagggcttacctgctccaagggagcccagacttgacttattccagggcctcactcctgttacatattctggagtctaggagtactggggccatgggcttcagagaattagtggaagactctaatgtgaccctaggtggccagagaaactgctaaagttagataacatgtgtctcctgctgctgctacaggccagagtgacatgcattactgaagagaagcctgaagaagctgacacgggtgggagcacattcactgatcatttcatcagcctggctcagggagggctggtcctgaccatccctctcaggccagccyatcctttttccacacacggcagcagaaccgagtagagtccggcaggacacaccttctcattgcaggccatctcacagggcagcagctgcttggttggggagcccagggcacgctccacaagacgcactgaccgcaccagctcggccagttctccaggctccagcgaggccgagtggtcactccccttccaggtcttgtccaaagttatgtgacgttccaacaccttggcccccagagccactgcggccacagatatcgctatgcctgtttcatgcccagaataccctatgggaatgtcaggaaagagcttctgatattcctttaaaatggaaaaagaaaaataacattaaatatcatgctgctttatgcatattctccaggtgaagcgtatctggttgagccccggtttagccactcactagctgtgcagccaggggcaagatactgaggctctctgagcctctctttcctagggatgataataatacctgctgagtgttgctgtaaatgcatgagaagcactcagcacattgtaaatgctctaaaaatggttactgttattctaaagaatgcattttaagaatgtttcacattgcacaatacaccaagagtaacaacagaactataaatgaatgtctaacctcattcaaaaaccatctgtcacatttaattagcctgagctgctgaaagcaagtgtgctatatgcacaaatatcatcaataatatacacagcccaatctcaaaacaatcctttggtgaaaatgataaataattaatccgttatctataattcactgaatgcaacaaaagacactctaagatgggtgagtcttgttggtgagggtgaccagaaagctgagtacagtagaaagactcaggtagcgtgtattattattttattgttatttattatttctttttgaaacagagtcttgctctgtcaccaaggctggagtgcaatggcgtgatctcagctcactgcaacctctgcctcctgggttcaagcgattctcctgcctcagcctcctgagcagctgggactatgggtgcccgccaccacgcccagctaatttttgtatttttagtagagacagggtttcgccacattggccaggctggtctcaagctcctggcctcaagcggtccacctgcctcagcctcccaaagtgctgggactactggcatgagccacggtgtctggcctcaggtgggatttaacaaaagattaggagggttaggtggcaaaggccttgaaaaccaggcttaagggtgtgtgatggagtgcgggttgctacaagtttgaaaattcaaaccactgtactatgtgcaggcccaagatgggataggctggcagaataactcctgcaatgtgtagtgtcaagagagaggacatgacagcaccttgagtggggacggagatacactgaaaaggaaaatagctggggtcacgtctactaaactgttaattatcggaatctctgtgggatgggagtgcaggggatgtttactttcgacattacatatttcacagaaatcatttttaaattttaaaaataacgtgatttagataagctgtaagtgaagcaaaaacaggattgggagggacagaaagtttaggtaaaaagagagtaatgtcagttttcaaaaaggctaactttttaagttaatggctgtataacaacatgtaagaaagcttatattatggggaaaacaatgtcaaatactatactgaaaggaaaatataaaaggaaaacaactgcaatatcaggattctagtatgtgtggatagatagatagaattccattaatgttactataatagttttaatgataattacatacatattttcgaataaagttaaatttccagtgctacaggaagaactgagagagatggcgtgagacagtaagagacaaaggcctagggggacatgcccaggttctagttccagctttgccaccaagctgctgtgggatctcaggcttcccgacttgggactggatttcaccatctgtgaaatgactgagtaggcaaaatcgtgggagagagtaatttccatcaaggctgtcactataactagtatgagcctcagggatgctcagcattagaaaataagagagtcagcaaataaagcagaaaaagccaggaagtttcaagaaggcctcctataactcagtatgaaaaaagatgaatatttatctgtacgctagtgttcatagcagcatcattcacaatagccaaaaggtaaaatcatcccaaatgtctgttgacagacagacttttttttttttttttttccccctgagagtctcactctgtcacccaggcttgagtgcagtggtgcaatctcggctcactgcaacctctgcctcctgaattcaagcgattctcctgcctcagcctcctgagtagctgggaccacaggcacgcatcaccatgcctgactaatttttatatttttaataagaaggggtttcaccatgttggccaggctagtctcgaactcctgacctcaggtgatctgcccacctcgacctcccaaagtgctgggattacaggcatgacccaccgcgcctggccaagaaaatttcatttacagtcaccctctttagaatgtatgtgcttcctcaactgcttagctcgaatttgatttggtaacagcaagactgtcaaaggatgttcaaattataaagtatgccatgtttgttagaattttggttataaaaaagactacgccttccccatagtaaatggcccaagaagggaaccccctccctcctgctcaccgagatgacccgcaggttgacgtcctcaggctggagcgggtatgcgctggtacactgcaagaagcagaagttggggttgaggggcttcacgatctgataaacttgcttcatggtgtccattgactgcatcccactggagatcaccattgggcgacctgagtaatccagcaccaacaccatcagcactttctctttagaggttctgactctccccaacacatcccaactgctggtctcatcattcaactgaactccacagacatctcttaaaacactgtgccagcccctgtgggggaacagagaggagcttgttgggttcctgccctcggccacaggaaaggtgggctcccctctgccccccgacagtgttcttgagcaaaaggaactgaattaaagaggcagaggaatttcacactgccaagaggaaaatgagtatcttatctgattaataggttgtataccatggcagtacagtagaatgagtgctgattcaagagtgtgaatgaatgtgaggtgtggagctgccacttctagctgtgcctgggcagagtactgtccgtctctgagtctcagaggcctcccctgtgaaataagtatcaagcatcataatcatgacctgtttcagtcctaggagtgttatgaggatcaaatgaaattgttcatgttgtaaaaccactttacacgatcatgtcccactgcggtctcaaactcaagcaatcctcctacctcagcctcccgagtagctggggccacagtaatgcaccaccatacccagctaggttttatatatactgtcatatccttaatttcttataaattttagttaaaaaattttctaggacaggtgcagtggctcacacctgtaatcccaacactttgggaggctgaagtaggaggatcacttgaatccaggagttcaagaccaacctgggcaacatagacagaccttgtctctattaaaaaaaaaaaaaaattcttaaaaagaatttctaaatgtcttataaaaactgtcatattcttaattcattttctttcaaattagcttacaaaaaatggaagtacaggctgattgaaaagaggtttctggcagggcacagtggctcatgcctgtaatcctagcactttgggaggtcgagatgggaggattgctttaggccaggagttcaagaccaacctggccaacacagcgagaccctatctctatttaaaaaaatgaaaagaggctaaaatttgtcttcatgaaatctgctgaaagtgggccaccatgaggggagtaaaaatatgaaggtttggactcccttcgattttaagtcaaaaattagacacttaccttttttggctgtcttttccagataaggaaaattattagtgtctccagatccaactttgaaaaatggaacattcagttcatgcaggaattcaactgccatctacaaaaatcaaagagggagctccttttcaccattgtccaaaaacactgttgttatgacaggcaaggaataacatacaagtagaaaaacccctcatcttaggcagtagagggacgctcagcaacttgaaagcaggcaaagatttgttctcagtcatttcattcaaatgcaaacattcatttgcatccacccatccattagcccaacaaacgtttggtgctggtctttgctggctacaggaatctggaaaagggctgggcgtggtggctcatgcctgcactttgggaggccgaggcgggcagatcacctgaggtcaggagtttgagactagcctgaccaacatggtgaaaccccgtctctactaaaaatataaaaattagccgggtgtggtggcgggcacctgtgatcccagctactcagaaggctgaggcaggagaatcacttgaacctgggaggcggaggttgcagtgagctgagatcatgccactgcactccagcctgggccacagagcgagactccatctcaaaaaaaaaaaagaatctggaaaagaacctttcccctggccagaccctacctgccccaggggcccaaggccaaatgaacaaacatgaaacggtcatgacctaatcctgacccagaaaaccaggcagtgaaaacatgaatagcctcaaaggctttcccttctactcggccaaacgagcaggaaaaggggctatttcaattcttggcgaaagggggaaaatggagcatttttttgcccagcctctacataaggatccatggctggcagggcccattcaacccgagccctttcaggcctcaaagcacgctgcctacttaaaagtgaacctcagtcacttttttcagatataacgtcactgcttgaggttacctatttagtgctcttcaacatccttctctagtattcatcaacaagactcaggaaattggtaaatgtcagcaaatgcttgctgaaggaatcagtggatcacaagttataagagtaaaatctcagtttgctgtcaaattataagaactcaaaaactttttattatcatttctttccagcttcagtaaggtgtaattgatatactaaaaactgcacataatgtaatttggtgagttgggacttaagtatacactactgctaccatcagcacaagagtaataaacatacacatcaccttcaaaagttttcttgagtccctttgttttgttttgaagttggaaatcaaaagtcgaaaaaatcaatgtctctgaatggtgactcagaaataagttagggcttagtgagttgctcacacttgatcacatgggcacaaatctttccctctcccagggaagttgctgaaatgaaatgcaaactctgattggtctaggaccgacggaccgacggaccaaccaacctacctcccttcctgtctccttccctccctcccttccttcctccctccctccctttcctccctttccttcctccctttccttccctccctctctccctttccttcctccctccctcccaccgtttccttcctttcctcccttccttcacctttctcactgctcttcctcygctttatttttaactcttctcttttccccttccatctttttcttttcttttgtggtagagacggggtcttgctatgttgcccagactggtctcaaactcctggggtcaagcaatcctcctgcctcagtctcccaagtagctgggaccacaagcacgtgccaccacatgtggctaatttttttttttttttaatttgctgtggagatggggtcttgctatgttgcccgggctgttctcaaactcctgacctcaagcagttgtcccaccctggcctcccacagtgctggggttgcaagcttcagctgccatgcccagtaccttccatacctttccacctcactccttcctgtttgtgtctcataacactgctaactagccctaagacagaactgaaaaaacatcagttttaaatatattttttcaataaaatctaattttcctacccttctcacttcatttggcagatgaagagagtgctttctgtttaaagaaggaaccttccactgagttttcttttgtataatgttcatcttgtgggagtgtggtgtggcccaccagggcataaacagaagcagaaacccccccaagagaggggcagagcgatcggggcaaggaggggggacaagtgcagaaaaacaccttgtgaaagcttacctacagaggctgtaaaatctgcatggaattctgtaattttcaagtaaagaaaaaggccaattcctgctggaaagggaaggggcgcctcattttgccgcctcctggggagccagcgccacccagtggacatttagaaaactgccactcagagccatcgggcaaagggaatctgagtaatctggaagatcctaactttcagccctaagacagtatcgctgtgcctaggggctactacaggctgggtcagcaactggtgacccctttctcttcagggactccttgacttcccctagcctgccgaccgtgctatcgggttccctctatctggggttccatgcagcccggcagcctcagcactcctctctccctcctgccccatagcacaaagtctgtgggagtctgaagggagctcaggcatgtacaactctcctcgggctcccagctgagttcaacatgcagaaatgggtcccatggatagcctcgtttgggagaaacactaccctgccttaatgccttcttagagggtcccagtaaatcaacttagctgagttccaaacccagtgtttcccaaacttattcgactcagaactttattaattctggccaggcatggtagcccatgcctgtaatcccagcactttgggaggccaaggcaggaggatcattttagcccaggagtttgacaccagcctaggcaacatggcgaaatcccgtttctacaaaacatataaaaattagccgggtgtgtggtgtgtgcctgcagtcccagctactcaggaggctgaagtgggaggattgcttgaacccaggaggttgaggctgcactgagctgaggtcgtgtcactgcactccagcctgggtgacaaaacaaaaaataaaccaaaaaaccctttattgattctaaatcaattaatgaatgagggtggacaacacgtgcccacagaaccccatttctgtactgtgtcctgtgggacactctgggaactgctgatctgagtcaggggtaaggaaagagaggagtggagctgagatttttctaaagtcccttcctctcccctcaggttttggatccttcaggattggaaaaaaaaaaaaagaagcccaggccaggcgcggtggctcacgcctgtaatcccagcactttgggaggccgtggcgggcagatcacgaggtcaggagtttgacaccagcctggccaacatggtgaaaccccgcctctactaaaaatacaaaaattagcccggcgtgttggtgtgtgtctgtaatcccagctactcgggaggctaaggcaggacaattacttgaacctgggaggtggaggttgcagtgagccaagagcatgccattgcactccagcctgggtgacagagcaagactccgtctcaaaaaaaaaaaaaaaaaaaaaaaaaaaaaaagcccatggtgatgagctggggagaacagggagtcaggggaagggtgtagccacaaataggctgggccagcctcagggcagcagcctgtcagagggcaccgtgcctaggacagaggcaggtgctggagggaagggcggctttgctgggatggccactgtgtgtgaggagagcatgtccctcaggagtcacctttttggtcatggcttccatttgccttctcaatagaactttccttttagactaaagacattctgctgtttcacctgagttccacagccttggtgcaactttcaaccagaagccctgacggttttcttggccttaataaaattctgccacaccttaacctttcctcagcacacagagaacgccctagaacagcatacagtgtggagaaaatatgcattcaataaatgcctgtttctataaggaagttagggtaggtaaacactgggagccacttgctaggtaaatacagaacaaggaaccaatctacctccaacagtttgacagagggcaaggtaaattaactctcgtaaaggctcttaaagaatgcactttcctgccgggcacggtggctcccgcctataatcccagcactttgggaggccgaggtgggtggatcatgaggtcaggagttcaagaccaccctggccaacatggtgaaactctgtctctactaaaaatacaaaaattagctgggcatggtagcgggcacctgtagtcccagctactcgggaggctgaggcagagaactgcttgaacccgtgaggtggaggttgcagtgagcagagattgcgcaactgcactccagcttgggcgacacagcgagactccgtctcaaaaaaaaaaaaaaaatgcactttccctcactgcctgtgccctaggtcaggcaggggactagctggggacaaaaggcattcctcatccagaggaacctacctgcccaaataggctgaggcagaaaaactccaaagggttctgagtcacagaacagccatcgctgggtgagtgtagacctggccctgtgctggcaccccacgggtttagctccctgaatcctccagatagccccaggagcatcttaacaatcctgtttttacagacgggggccactgcggctccaaggttacatgaggagcccaagccacacagagtgtgagcaccaggagctgagctcagagagcctgactctaaaacacccatcacagacaccaagcaaatgggctgcctggggagcagagggaaggaaaaccaaggaggaagccccgctgcaaacaccagactcctccctatcacccaactgctccgggttctcaaccgatgccacctgcagggcacggcctaaagaagtgactccgccttggcagcctcacgggcaaggaggcacctttctcctaggtcagatccaggagctcagggagcttgcatttccaggaaacgtggacggaagcagaaaagtccccaatccaggtgcaagtcaccttgatgacatcttccctggttctgcgctgactcaggacatcagaatagagagaaccactggatggtagcttggtcacacacggaaaatgaaatggtggcccaggcagggaaggggctcaccaaggtcacactgagagttaaggacaaagccaggacaagtacccagatgtcccagcctgcaagtacccagatgtcctagcccttagcccaggttgctttccttaattgtaactgatattcactgaatactgattgtgtactatgctttatattaacgatcacatttaatcttcactttccctcccagatgggttctgctaggaagcccactttacaactgaagaaaacaggcacaaaaaggttaaataacctccacatggatataccaaaaataacaggcagagccatattcaaacttaaaatctgaccctagagtccattcacttggccactgggccatatagcccgggtatgggccacacagcagggtgtgtaccacagagctggggtgtgcatcatacagtcgggggtatgtaccatacagctgaggtgtgtaccatacagtcgtgccatcatatagccaggtacacaccacacagctggggtatgtgtatacagcattcagcatggagtcccaaatgttttcatcttcaaattcttaaaaattactaaggaggccaagtgcagtggctcacacctgtaatcctagcactttgggaggccgaggtgggagactgtttgaggcccagagtttaagaccagcctgggcaacatagggagaccccatctctacaaaaaaatttagaaattagctggttgtggtggcatggacctgtagtcccagctactaagaaggctgaggtgggaggatcgcttgagcctgggccgtcaaggctgcggtgagctatgagctatgattgtgctgctactctccagcctgggcaacagagtgagaccctgtctcaaaaaaaaaaaaaaattactaaagagtctgcagatcttttttatttttattttttgatgtggttttatttattcgtatttgctgaattaaaaattaaaattgtgrccaggcgcgatggctcatgcctgtaatcccagcactttgggaggacaaggtgggcggatcacctgaggtcgggagtttgagaccagcctggccaaatggtaaaacctcatctctactaaaaatacaaaaattagtcgggtgtggtggcgggtacctataatcctagctactcaggaggctgaggcacaagaatctcttgaacccaggaggcagaagttgcagtgagccaagatcacgccattgcactccggcctggccaacagagtgaaataaataaataaaataaaaatttaaaatgaaagctgggcacggtggctcacacctgcaatcccagcactttgggaggctgaggcaggcagatcacctgaggtcaggagttcaagaccagcctggtcaacatggtgaaaccccgtctctactaaaaatacaaaaattagctgggcatggtggcatacacctgtagtcccagctacttgggaggctgaagcaggagaactgcttgaacctgggaggcgaaggttacagtgagccacaatcgtgccactgcactccagcctgcgtgacagcaagactctgtctcaaaaaataaaatataaaataaaatagaggaatcttttcttaattttaaactttgaattttgagataatggtagattcaggtgcaactgtaagaaagaacacagagagatactatatactcttcccccagtttcccccaatggtaatgtcttgtaaaactatagtacaataccacaactgggtgaatgacattgacaaagtcaaccaatcttattcagatttcaccatttctacaagtattcatttctgtgtgcctatatttaattatatgcaattttaccccatgcacagactcatgtgagcactgccacggtcaccatacagaaggtaccatgatgccactgctacaaggatctttcatgtcacccctttataaccacatccccttccccttactaacctttggcaactactcatctgttctccactgtcataattctgttatttccagaatgtcatggaagcagaatcgtacagtatgttcccttctgcatatgctgctttctcactcagcatcatttccttgagatgcatccaggctgctgcacgcatcaatagttcattcctggctgggcgcggtggctcacgcctgtaatcccagcgctttgggaggccgatgtgggtggatcacaaggtcaggagtttgagactagcctggccaagatggtgaaaccccatctctgcaaaaaatacaaaaattagccgggcaccatggcatgtgcctgtaatccctgctactcaggaggctgaggaaggagaatcacttgaacccgggcagcggaggttgcagtgagccgagatcacaccactgcactccagcctgggcaatagagtgagactccgtttcaaaaaaaaaaagaaaaatagttcattccttttgattgctgagtagtactctacggtatgcatgtactacagtttgtttcaccattcacccactaaagaacattttgcttgttctagttttgagctactaagaataaaagttgtaatgacactcacatacaggtttttgtatgaatgttaagttttcatttctttggggataaattaccaaatgacaactggtgggtcatatgataaacacattatctagctttataagaaactcccagtctatgttaagtggttgaattatacagtatatgaattatgtcccaataaagctgtttaaaaaagaaggaatgaaactgccatactgttttctagagtgattggatcattctacattcccaccagcaatatatgaatgatctattttctttgtatccttgacaccatgtggtgttatcaattttttttttttttttagagacaggatctcactcttttgccaaggctggagtctggagttcactggtgcaatcatggcttaccacagcctcaagctcctgggttcaaggaagcctcccgccttcctgcctcagcctcccaagcagctgaggctacaggcacacaccacaatgcctggcttttttttttttttttaatagatggggtcttgctattgttgcccaggctggtcttgaactcctggcctcaagcgaccctcctacctcagcttcccaaagtactgggatttcaggagtgagccactgcatccagccaaccactttttactttaacgatactgacagctgtgcagtgatatcacattgtggtttaaaactgagaaataaaggaaaaaaaaaagctaaaaatggctggtgaggtggctgacacctgtaatcctagcatttgggaggccgaggaaggcagatcacttgagatcaggagttcgagaccagcctgaccaacaaggtgaaactccatctctaccaagagatacaaaaaaaaattagctgggcatggtggtgtgcgcctgtaatcccagctacctgggaggctgaggcatgagaatcgcttgaacccgggagttggaggttgtagtgagctgagattataccactgcactccagtctgggtgacagagtgtaaccctatctcaaaaataaaaataaatgagaaatttttaaacatataaatagataaacacaagaagaaaaaaagataatttggacatcatcaaaattaaagatgtttgtaattcagaggacactatcaagtaagtgaaaaagggcgaggcatggtggctcatgcctgtaatcccagcactttgggaggccaaggttggctgttcgcttgagctcaggagtttgagaccagcctgggctacatagtgagatcttgtctctacaaaaaatacaaaaattagctgagtctgatggcgcatgcctatagtcctagctacttaggaggctgaggtgggaggattgcttgagctcaggaggccagggttgcagtgagccgatattgcaccactctgcactccagcctgggcgacagagcaagaccgtatctcacaaaaaaaaaagaaagtgaaaaagacaacccaaagactaggaaagttttttacaatcatttatctactaaaggacttgtacttaaaatatataaagacaattcattggaaggctatacatgaaaaaataattaaatttcaaaagaatatataaagaaaaataatccaattcttaaaactgacaaaggatctgaatagacattcttccaaagaagatatgcagatgaccaacagacacatgaaaagatgcatcagagaaatgcaaatcacaaccacaatgagacaccatgtcacatccactaggatggctagaatcaggaggtaatcacaaatgatgaggatgtgaagcaactggcaccatcaaaccctgctggcgggaatggtgcagccattttggcaagcagtctggcagttcctcaaaaaagttaaacatagagttaccaggtgacccagcaattccactcatatatgtaataccgaagagaaatgaacacatgtccatataaaacctgtacataaaagctcacagcagcattattcataacagccaaagagtagaaacaacccaaatgtccaccagctgacaaatgggtaaataaaatgtagtatagccataaaattgaattatgagttagtcaaaaaaagaaatgaagtactgatatatgctacaacataaatgaaaacacaatgttatatgaaagaagtcaggctcgaaggaccacatattgtatgattctatttatatgcaatatccagaataggcaaatttatagagacagaaatttgaggctggacgcagtggctcacacctacaatcccagcactttgggaggccaaggcaagtggatcacctgaggttagaagttcaagatcagcctggtcaacatggtgaaaccctgtctccactaaaaatacaaaaattagctgggcagggtggtgcatgactgcaatcccagctactcgggaggctgaggcaggagaattgcttgaacctgagaggtggaggttgcagtgagccaagatcctaccactgcactccagcctgggcaatagagcgagactctgtctcaaaaaaaaaaaaaaatcggtaagtggttgcctaggcctgggagaattggggcaattgaggagtgctgctaataggtagtttttcctttgggggtgataaaaaatgttctaacggtaattgtattaatggttgcacaactctgtaaatattactaaacaccactgaattgtaccctcgattgggtgaattggatggtgtgtcaataaaactgttctttaaaaagacacacaacacaccttccattaggtgagccgctgccagaggaatgatgtcatcacacatcacctagcctctggaaaactccactatatacttgtgagaatgatgatggaaaggacaaataacatttgagtatcattatggaaatagctttgcctttgtggacctcctgaaagggctcatgaatcccccaggggttcctgaaccacactttggaaaccgccttcatatacttctcattactctgattggttattattgtttttaattgtcactgcaatgaaatgcacacataacatttctccttactatggattcaacactaggtatggtcaagttttagaaaaactgtgtcctggggaagcaactatggaggaggagggatgacaaaactactgagcctaattatttttaacaaccaggttaggacttagtcctccaaatgaaagtgcttctcaaagtgattactctggggaaggctgtaagctgtaattggacttacagtttcacatggctgggcaggtctcagaatcatggtggggggcaaaaggcacttcttacatggcagcagcaagagaaaatgaggaagaagcaaaagcagaaacccctgataaacccatcagatctcatgagactcattcactatcatgagaatagcacgggaaagaccagcccccatgattcaactacctccctttgggtccctcccacaacacgtgggaattctgggagataaaattcaagttgagatttcggtggagacacagccaaaccgttatcattctgtctccagggggaaaaaaaaaaaagcagctggatgcagaggcttacgcctgtaatcctaacactttgggaggccaagaagggtggatcacctgaggtcaggagttcgagaccagcctggccaacatggtgaaaccccgtctctactaaaaatacaaaaaaaaaaaaaaaaaaaaaaaaaaattagctgggcatggtggtggacgcctgtaatcccatctacttgggaggctgaggcaggagaattgcttgaacccaggaggcggaagtcgcagtgagccgagattgcaccattgattgcactccagcctgggcaacaataacgaaactctgtttcaaaaaaaaaaaaaaaaaaaaagcaccaggagtgactaacactttaaaagaataatattatttcaccagaagctaaacattgtaattctctgttgaaaaacaatcctatttatttagaggacaccacatacaatctcagaaactctcctgggctgtgagtacgcccagaaggattaacacaataatgtccctttggttctgttgttgatacttacaagacctattcctttctgaatgcaggctgctatgtcaccagtttgaactgaatttgagcaaacccaggtctcagatttgaaactggatgcagagtgaggcccctgccccaggttgcagggcagtaattaactgaagatcagcaatatatctaactaacctttttacgtaggtttaaaaaaaaaatctgtccccactcccaaggcagctcttgggcccagagactctccagccaacttcagtcttgaactggtaccgagcgtggtgcatgcggagactctcctgagctttcaggcattcacagtgggagtctacgctctgggaagcctgggctgccagccaggcagcagcagctgagggactgtggaaagcatactgctctaggcatcagatctgctacctttaagacccatttcctaactgtgtgatactgaacaaacttctggcccctctggtcctccatttcttcatctgtaaaatggggcactgtagggataaaatatattactgtatgtgaagatgcttcataaacaataatgtgtacttcaaaagtagggaattagggcgggtgcggtggcttacacctgtaatcccagaactttgggaggccgaggcaggcggatcactgaaggtcaggagttcaagaccagcctggtcaacatggtgaaaccccatctctactaaaaatatacaaaaactagccgtgtgtggtggcaggcgcctgtaatcccagctactcaggaggctgaggcacgagaataacttgaacccgggaggtggaggttgcagtgagccaagatcgtgccattgcactccagcttgagcaacagaccaagactccgtctttaaaaaaaaaaaatagggaattaggattgttaagtacacaactgcatttgaagaatgtcatgcgtacgaatgctgtgaattaaggaatgaatttggtctacagaagtgtagcctgaaactgccaagttctctagaggcctaggttctccaccttcctccttttttaaaccacccattacctctggcctgagctgcatgtgtgcttctttcaactcagtcgacacacatgttttagaactggaaaagtggcacagagtcagaagtctgcttcaaataacctggttgaccaaaagaaaaagtgtttcaagacccataaaaatgttctaaggttttacctaaaaatctatttctaagaagccatcttaaggaaacaaccccaaacagagaaaagatgtctatctcagcactacttattagcacaaaaaaacaggctgggtgcagtggcttaaacctgtaatcccagcactttgggaggcctagatgggaggatcacttgaggccaggagttcaagatcaatctgggcaacacagtgagaccctgtctctataaattttttttttaattagccaagcgtgttggcacatgcctgtagtcccagctactcagcaggctgagacaggaggatcacttgaggccaggagtttgagactgcagtaagctatgattgcatcgttgcactccagcatgggtgacaaaacaagatcccatctcaaaaaacaaaaaaaactaggccaggcacagtggctcacacctgtaatcccagcactttgggaggctgaggcagatggataacctgaggtcaaaagttcgagaccagcctggccaacatggtgaaaccccatctctactaaaaatacaaaatttagctgggcctggtggcaggtgcctgtaatcccagctactcaggaggctgagccatgagaataacttgaacctgggaggcagaggttgcagtgagctgagatcacaccactccac
